United States Patent Application Publication US 2005/0208558 A1 - sequence listing, part 28

SEQ ID NO: 28114 - DNA, 36194 bp, DROSOPHILA
cttacgaaacgagttaaatagtaaaatttcccagtttcttattccccttttgggattttctctcttctcaggctccacccctacatatgagcagaaaatggctctgaaatgcctatacatacacatatttacatacatgacggccagttgctatgacattctacatcttacatgcataataaatctgaaatgtaacgtacaacgtaagttagaaatcactaaaatgaaaaatggcgctgtattagttccaaaaacaaacaccatttgtcgtaaacggataggcgttgtgtgctgttagttccaaaagtatacgagaaaagttgaataaatcatggcgcagagttaatcctgcattggcaatttataatactagattaatttaagaccgatcttgaccaacttcaatgatgatttcattcggaatgattattaaaatcaaactgatacatcatctctgagagaactagcagggaaaatattataaattctactactctactaaatctactcctttcacatagtatatttacgttaacaaacaaagtacacttttattaatatgaatattttgttatttgattaaagtaattaatttgtagaaaggattgagcataatattgttttaaattttttttttctatctcaacgctaattcataacattgcatcagaagagaaaataattttttaaaaattaagagaaaaaatgctaatgtgctctttatttcataatattcgagtagtggtagcgagtaagttgtttgtttcattttcagtctgttggaatttctcgtgctgtgcggttgtcatttgtcgcgatcgtgcttggaattgactttagcggcatttttataagaatcaatgcaacgcgtggttttcctgcaaattttggcacaagttcttaataaaagaaaaaaaatatatatatatatggcattggcgtttatcagaataatccacatcgccatttagttcggtggtttttcatcgacttgtgcttgtgtgtgcgtgccacttggttagttgttgctgctttcgctagtcgtacgatctagcatttgtgctcaattctgaattctaaaataaaacaacaactagcgttttccatatgtgcaactatttgccttaaaaagcaattaaagcaaaggcagtggttaaagttgactaaatattagtaaaacgtgaattgtgaatgcagttttggtgcattaagcgaagagagtggaagagagagcggctctcttttagtttgtgatttcaaagtggaaaattattaattcaaatgcagtctgcaattaatttcatggaaaatcacttgttagctgctcgttcgctctgtctctttcgcacttcagctgacgaattttccgtgctaaacttgacacttttcagtccatcattccaactaattctttgactgcagttttgcgtcgcatttcctttctacgccgatctgcctctttgcctttcttttctctgatatatttcaacagaagctcagttgttgttgtaactactcctcctcctttttgttacttgctgcttgtttttgttgctcgtcatgtacaattttttccaatttgtgcgccttttcatattttattctgccgcgctgtttttctgttttctgtttctgtctcgccgccgctactatttttagcaacaagtatggctgatgttgttgttgctgccgctcaagttaactacgctacgctggcagaaacaacaacaagtcaaactatgcggagcgagagagagtgaactgaaaacaaaaagagtgagcgataaaatccgcgagaaagagtacagtggggctcgacttaaattatcatattaagccagatcacaagtattaacaaatcgaatgttcttaaatccaataagcgttaatcagcaatgttgatcaaaagttttaaaattatttaatcgatatcagtgaactattgaatactattggtaaaagctcagtcttgtttgcatcttcaagtgggggtcccactgtattcgactcaggtgataacaataacagcgacgagtgagagaactctctctcactctctctccttcatttcatttcccaatctttcgtgttcgtgttctgtggctaatagcatttaaattttaatgcccaatttcatagaaacgcaacgcaagtggaaagactcgagaaaacaaaagtgcaggccgtctaaattgatggcgaagtttcgtgtgccgcctgcatttcatttataaatatattttcggccttaattctgtgcttcctgtgaattaacgaggaaactgaagagtgcgcgagcgagacagccgatcacaaatcaacaagtggaaacgaagaaactttcttcgcaaaagccggctgatcgcaacaacaagaagaaaagagagcgattctctgcgactggaaccataacatttacatcgaccctggaatttcttcacttttcgtccaacatgtaagctccattttaatatgcaattactgttcgctgttgtcgaacagcaacttatttattcatacttattgtttatttatggatttatgccgcctacgaactttgtgattgcacaatcgttcggcctttgaataattttttttttcgccaaggcgcccttttgtctatatacccatctctttcgactgctccagtgctgtctttttctggtccgtgctttgaataaacaattaaggctcagggtctttaagcccttttctccgccttagagccgaaagtgattgttgtaatttataatttatatttcctttcttaataaataaataaatagtcaagtttatgtttgagttttatgatttatattttaagttatttcaactgcaacaccagcaccacgacctactcacagcaaaaaacgtacaagaaggaaagaaggaataaaaagagtggtattctcttacaatatgttttatggcataaaaggtgtggccattcatatcaaatataaagtagtgttgtttaacgttatttttgtaggttgaatagtatattccaacactgccccctcaaaaataacgtctataattaaaaacataacaataatattcattagtaactatcaaatgtgggtggtgtgcattctgggaagtgttaactgatccagcatttgctgcgaggataccggggaaaacccagaaagacccgatcagatcattgtaacaaaatatgtttacaggaatttaaatttgaaaaaatatatataaaaaatttcattcagcattcgattggtcgtcttgcagcaaacccaatttgtctcgtaactccacaaatctcgcagcaggcaacggttttgtaaatatgtcagcccagttgattctctgtaggaatatactcaagacaaatcacattattctgaacttgctctctggcaaaatgatatttaatatcaatatgtttagctcgtttatgacatgagggggttgtttgctatgctaatacagccttgattgtcttcgtaaattttaatgggggttttctagtttaatgttaatactagttaataaaaatttaagccatagagcttctctcacgggttcaaatagggccatatactcagcttcagttgatgaggctgctactgagttctggctctttgtattccaacaaatgagattaaaatcaaacattttgaataaataccctgttgtactttttctatcaatttcactaccagcccaatcagaatccacataaccaataattttattttcaaatgccaagttctttttaaaaatcaatttcatatcgatagtgcccttcaaatatctaagaactctttttaagttctgccataattcggagttatttttgctactatatctgctcaagatatttactgcagtagttaaatctgggcgtgtacaaagcattatgtacattaaacatcctatgaggctacggcatggggtattgcagtcttcatctgaattaagtaattcataatttattttactaggtaaaggagtactaactgcattacaattttccatgttaaatttacttaaaatttttttaacatatgcagattggcttaaatagattttatcttcctgcatctctatcctaattccaataaaatgttttatttcatttaggtcagtcatcctaaacttttccattaaataccttttgaagttattcattcttgtcatatctcctgtagctataaccacatcatctacatataataatacatatatgttttcattgatgttacctttgtctaaaatatatatacagcgatcaactgaagagtttacaaactcacactctttcaatgcttgctcaaatacttcaaaccagcatctagccgcttgcttgagtccgtaaattgccttattcaatttacacacattgtcactattacacgatataccttgaggaagtctcatataaatttcctcttttaacggtgcccatttaagaaagctgtttttacatcccatttgatggactttcaagttatactgtattactaatgacaatataaatcggaaacttgaaaattctagctacaggagcaaatgtctcttcatagtctatttggtatttttgagtgaatcctcgtgcaaccaatctagctttgtatctaattggatttccaagttcattatatttaacagaaaatacccatctgctatctacaatatttttggtttcaggcctttatgtaattgtccaaggtattattaattttatgagcatttaactctgtattgatggcttcttcccaagaagatttatcatccctatattgaatttcatcaaatgaatttgggacatcgttaaatatagtgtgagcatttagaacaactttatttagactattatcctcttcattataggatatctgaggcttagtctttaatctctcacttcttctattaataatttctatgccatcatttttagttggattatcaattccaatttcttttaagtgctctgctgtttcactttccctactctcattcggggttgcctgatcccttactttcattcaggtgatcatctcgctttcttttcttactctcaattcagaaaatatttattactttcccttactatctttcaggaattggatgttggcgcattccttactctcaattcgggaactctgtttgtattattttcctactgtcattcggaaaatttttattttcactttccttactatctttcaggaattgtatgttgtcgcattccttactctcattcgggaactctgtttgtattattttcctactgtcattcggaaaatttttattttcactttccttactatctttcaggaacactgtttcaaatttaacagctctagaattaaccatattggtttcatcgacaacaacatctcttgcgacaataaatttttcatttacagcatcccacaacttaaaaccattgggttcatagcccacaaaaatacttttaaatgatttatcatcaaactttccttgtttgtttttaatatgcacataaacagttgcaccaaacactctcaaatgttttaagtatggcttcttattgtgccacatctcatatggggtctttgaactatcaacaagtgctctgctaggaattctgttgattaaataagtagcagttaatactgcttcgccccaaaagcttttatctagctttgcaccactaaccatggttcgagctttttccgtaatggttcttatcattctctcagaaacaccatttaactgaggtgtatgtggcactgttaagtgataagaaattcctttcttaacacaaaattgtctcatctcatgtcataaacgaaaattatttttatgcttagcatttatagaatatgcttgaaaattgatcacaggtacattgtttaacatacctgaattttttgacaaccattaacccatttttcgaaatggttacaccgcttttgtcaaattcgatcgacattcctgcctcttggagacgctttacggacatcaaattaccagcagcttccttacaaaagagtacatcctccagtgtaatctcatggtcattccgtagtcggacaataccacgcttagtggcataaataaattcgccttgcttggccactgcaatcttaagtggaggcacaacctccacactgtcggtatacagcgactcatcatttataagatggtcactagcaccagaatcaaggacaaacccgcagttgtccatcactgaagtattattcacttcttttaccataaacgcaatgccgtgtgatgttgcagtttgaacttgtttttcattttctttatttttattatttaatattcttttataatggaaacaatcttttttaatgtggccttctctgccacagtggtgacacttgactttatactttgaatttcccttgaatattttctttggtttagttacccgatttttaaacaaattatttttataagtgttattattggtgtgcacgatcgcgttcataactttcttgcttgtatcgttgtggtcatttttaattttaatttcttgatccagcaatctatttttcacaaacgccaatgtcaaattttcttcagataatgtctctatcgctgtaataattccatcgtaacacgaaggcaatgtgatcagtagatgagaaattttatccatctcttctatttttgcaccagctgccaacaattcacttataagttcgtcaaaaatatgaaaatggcttaatagtgacatctcactcgatagcttcagagaaagcaaacgttttcgcagcgccagttgcgacgccaaactttttcgttcataaacggcgtccaaattctcaagaatctgacgcgccgtaatgtcgcttgttgcgaaatttaaaaacgagtcgcttaggtactctattattggactttttgcacaacgctctgcctttttccaggagtcatctacctcgttaggcattaaaccatcaactactttaagcacatcttgctcggctaaaagagccctaattctaaatttccaaatcgcgtacttctcgccatcaaacggcttaatattacgtttagccttgtccatttttcacctcaaattctgagaaggaaataatttcacaagaatgtgaaaaaaaaagctatttcacaagaatgtgaaaaaatgctatttcacaatttattttcacaatctttaattcacaatttaattgtttattaggcatggactgggcccataacctgttgtaatttataatttatatttcctttcttaataaataaataaatagtcaagtttatgtttgagttttatgatttatattttaagttatttcaactgcaacaccagcaccacggacctactcacagcaaaaaacgtacaagaaggaaagaaggaataaaaagagtggtattctcttacaatatgttttatggcataaaaggtgtggccattcatatcaaatataaagtagtgttgtttaacgttatttttgtaggttgaatagtatattccaacagtgatcgtgccaaaaatgataagataaatcactaaaagctagtaaaacaataaatacactacacttccttaatgataaacgatctgtatgaaggttatatcgttttcgaattttatcaaaaactttcattagtatgagtgtatattatatatattatctgaagtaaaaaccccccgcttatcgaacaacttctcaaggacactccaaggataagtcgggaatatctctatcgacagtttcttgaaaactcattctttgtccgcatttattgcacattcacattcttagcgaatcacaggaaacaaagctcagttgttgtttcagttactgctgctcacttttcgctttgtttgctagtttatttttagcattttgtcataaagtttaacaaacaaaccaaccaggcaacagtgaaaaattgctgacactgtgccattaaatttgtattcgatcgattttaggtgtgagggggtgtatagactctgttttacaactgcgcagatttcgaacgtagaaatatatacacatattgggtaattataaggaaagggtttccttatcggcggtaattctagaagttgcacaacaactcgttcgaagcggagtaataaatttgcaaagccatttgcctggtcttagaatgattttctttcagaaactaagtcgcagttcgaaattggactcttgaaaggtaattccttcttatctaagcttcaaacgatatgtcgtgaatgggggttatttggatatggggaatacggaatatgcgcttctgcattttattttatgatcattagatctgaaattccataaatcaaaaatttgtgtagatagtagtggcaaagcgaatcgtttatgtgtttgtttatccgagaaatcatttggcaaagcattaatggcacgaaaaataaacaatttgtacaaatttcaatttttggtatccattacacccgaattttcgcattctttatccccccgccatagcaaattgcaattttacccgctaaacgattttttttagcccacgttaaggtagaatttcaagaagcaaaatcttgtgtaagctgcatatcaaatttatgtcaagttggccaattttcaacagtaaaaacgacaaagaaaaactctacgccaatcagttagcaaaaaaaattagcaccaatttaatttttcatcaatgaaacttgtttatttgaaaagtggtttcggcgcacagctgttttgaaggaacgaaatggaagtagaacgttcaaaacggagaccttaagagaaaaatgctcttaagatcgacaaaagtctcttagcttggtgtaacatttgacattttatctatttaaagactttattgcactttttgaaattgaaattggatatttgcttcgacaaataacaaagatactaataacagactaatagtaatttattattaaagttatttttcggtttgtaaaatatttaacccgctttccgttatcgatatattttatttcgctgtcatcactaactgaaaaagctcttgagttttgagcttgcaagtctgtaagctttttatcgctgcttacaagtgaaagcttccctttcagaaatgtaacggattaaccgaatttgaatttaagaaaataagatttttttaaagctggaaaattttaaaaatgtttttaacgtttttgtaccacgatacgaaataatattttcattttattaaagttgctatgcattcttttaatttttaataccaagtcaatattttgtttttaatactgcccaacccaaagttgcatatagaattgacataaagcaaaactgggcgggtgttgtcactactcaattgttgctgctctgttgccgcccaaataacctttcccattcgattgcaccaattatataaaatatatataattattacctacgctcactggcgactctcatgacgccttatcaatagcgtcaatgtcgccaaatacaaacaaaatgcagtgacaacaacagcttgtatcggaacaatctaataaaagtaaatgcaggccactgaatgttttccgaggggtggagaaactaaacaaaggggttaaaagtatataagctaaataaacaatatgactcattttgttttctttatatgcaaggtaaacaaaataatggttaagtaatcaatgcatgccatttatattaatttatatgttaaaatcctctttcggtgagccactgtgtgccaatcagctcaattaaccaggcatgacaataaatgatacttcctttctttctgcacatacaaaaattatattgatttcattatagataactgaaaacattttgtacataaataggaatttaccgtgctatgtgcattataaaaattcaataatatttaaatggaatattatttttaatcacaagaacttcgtcaattttttgttcagtgtttgaaaatcttccacttttgccacgatttccaattggatttgcatgtaaacaatttaataatgttttgatttttgcttaaatcacgtcccacgtgaaatgattgttgcatgctcgactcaatttccttctctacattttcccgcttctattccgcctgcgttgataataattccagttcggttttgtttacatgcccccgtaatgctgttcgtaataaataaatcagttcccctaaacgttttccgcagcaatttcgcccaagtagcgaccaacaggcttttgtaattatgacataaaaagagaataagcggctaacaatttggccatgtcgaaatttcgcatgagctacaggatatgatttatgaagtgatccgcactaaatcatccattgagtgcagtctcgtgaattggagcatagtttacgatatattgcctggggctgtcaacacggcgtatgcgtaatattttctaggtgcatgcaaattaagaatgacttaggatattcaaattgtgtgctaaggcgagagctaagagacacaaatatttagcgtaagtgactctcagctcctgttttatagcacacttttaccagcgggcacctggcgtatacgtgatttttaccaaaattgctgttttctgttgagaaaaaaagctgtttttttatgttatttatatcaacctgcaagtgctgcccccaattaagatgtcaaccgcatatcctttaaattacccacgaagctaagctatcccaacagcccagagcggttcatgaatatgcaagtaggggatctatagtgacagcagtgccggtccgtggtgcgtgcgcctggaagtacatactttcgatactagatggtgttatttgctactttttgcaaccgcaatgcttttcattctagcatgccagccagcaattagataactgccaatgcaatttttccaactccgcgtttgtgtgagtggtgcgctactattattttatttgaacgatcggctggccaacgcacgaatcacaggcgaggcgtggacatattgatataaatttttatatatgctggcacatagtgtgcgtgcacccaactggtttaagccaaattccgagttttaatttaagcgacaaccacaaacgaatggaacggaacgacaagcaaacgcttctggggttcggctggctttgcattgggttcacttcgataaccgacgacagtcagtcaactttgctatcgataggcttacgatcttacgatcgtatgtgctacccaacactcgcggcgaaaaaacagttctcgagcgtcgctcaatcggtcaacaacggatgtcgctagcacgcaaacgtacatttcggtgattgacaaagtacaaaataagaaatggaatgaacaaaaaaaaaaaaaataaataaataaaaaacgtaacaaagcgcttgagaagcaacggctccaactaattaaacagcggatcggaatcttaacggctaacgggtgtgcttgtgcgtgtgttacacttggttttggctcattaaaagtgcaaattgtttacgagaattttgccagcctctcaaaggtaaaacagccaatttccttttacgattcttttttttttttgcctctcgtacatcgcatcgctcccaggcgggcaattttccttaccaagactgtgtggtgcgtgtgtgtgtgtggatcgatgtattaattaatgccagagcaaaaaggaaaaagaagttcttggtgaagagttgctcctgaagacagtcatgtgacaggcacaacgctcttcaagtcttcaagtgaccaccaggcactaaattcatataaaaacacgcaaagaaattagttagtgtcgctttatgatcaattactatgtttttaataaggaacgtcgctgcttcagtcgcgaaaaatgttaaacttggaaaggaaatggaaatactttgcttttttctcgctgtgtattcagtagctaacaactggcactttgaatggtagaggagatctgaaaaggggacgggaaaatgatagatgcacttgttgtgcggtccagaatccagagttgtatccattggtcgtcaagtgagtttcctccgaggaaactaggagcaatgtacaaaaaagtgtgacggttgattagctggtttgatcatcgttaggatcattaggaatgccttaacaactctatattaacgaaccgactgcggagtctaaataaagatgttcgatccatggaaatagccaaacggtatcattccaacgagtttagcatgattgcaagttggttttaacttggctagaaaggcaaaagtggcttattattggttttaatttataaacagagccattgagatttattaactttggtttcttcacacatccacacatctcgcatcattatttatccatttttcattggattaccacatgactggcaaaagtctcgagtaatttgagtggctcataagcaaaaacggtttgattagaacttgtttgatcacagaccgccggtcttttgagttggcgttttttgttaagaacttttatggtcttataattgtcttatgcttgaaaaagactggaattatcagtaccatatgtaaacaaactatttacgagggttcgaaacatgacagaatgccttctggactgagaaaattaaatttttggtttttattgctatttgactctttgactttgacccaattaattatttgaaaggcagcaacgaacatattattgctatttatattattgtaagtgcccatctgggctttatttctgacaactgggggcctaatagtacttaaaataccttcaccgaacttttttcgccactcaaatcaaatgccaaataatcccttcctcaaccttcggtgactcacctcgaaatgggaccgattccgaattttgtcaaccagccggagtttgcaatccagctgtgcgaaggcttaattgattgaacgtgcgtttcataccaattttcgccatacgaaatgtggtatccgtatccgtagttagagctcgcttaatgcccactagccgcctaaatcaagtcactagtctggccgtatctgaatgtctttcgagtgttatcaggcgatcaattgccttcggcatggcgatcgatcaaccgacgtgtcgccgggactaatgaacatttgtaagccgaaaatagacgataaacaaatcgacataactgaaaactagccgcaaattacactgaataaaaacttatatatacgatcctcgacattggctcgattttgaggggacttaaatcatttgctttgattatatttctttgcaggggggtcaggtcagtctaaaaacagacttcttgcgaaatttacgacttagactcgcgtttcaagttgaatttttattgcctttttttttattgattttttgtgttgcacaaacgaagcaacgaaattcgaaaattgaaattgaaaataagttgaataattgcacgctaacggcgtaaatggaattgaatggagtgaaatggattggaatgaattccggccgagatctagtagaaatccggagaattcttgtttcaatttggagcggcttcttgtgagtttgtttgttcgctttttgaggaagcgccgggcactcaccagtaattgaaacctataattaaagcagtctagaagcaaacatacatatatgtatgtattcagaagatggcatttccaaatatggctgacataactctcgattgatgtctcaattcgagggaaagatcgtcattggctgactaaccgcttaattatgtttaaatgtttaaacgattcgaatgtggcgcatttttggcatgcccattaagttgatgttgctatttgttgctaccggtgtttaacatgctgtctccgcctgtcactcatgtccacttctatgcccgtctctttcgccccgccctgttgccatatttctctctctctctctctctgattgacagccgggacattcggaatatttgtttgggatctcctgatgatcgcaaatgtcacttttgattagcaacgacgacaatgatcacaatttgccatggggccaagctgaatggacgggaaaagcgatttaaatgctgatcactgcgattgactttgatggatcgcaaagctcaaggatgcaagatgtctgatttaatttggtctcaattaagaattgtatttctaccttccaaggattcaaatcaaagcatccaccattccattgcaatctttatttataagggactagtgagttaatgatagtttatatgttttgggaatcggttgatatctcaacaggataaatcgagttcacttaactcaacaccttaccagcagctaagtatctcacagatatcaatctcttctgctgctcaaaatattcgtagataccgatctatgtaaatttggtggccaacagctttaattgtagactgctaacaacctgtatccttatctgcgatcataatgacacactaattgcgctatctgccatcgtgagttgttgcaaactcacaatttgcatggccagtcacgccgaagcgcagaacttccctaaatggccagcgatacgttgctatatataatatgcaaagacctccctacaattactcattatttacaagcaatatatttatattctctgttgactcgactttggcctgttatcagaggcatgaatgaactcgcgatcgatcgatgttaataccctccatccaaagcgagttgacatttggaagatttcgagtttcgtgctgccgttttaataaatgttttcataatactaattaaaattaaataagaacctgttcgccagtgttgccaccgaagcgggaatcatttaaatgacaataaaagcataaaatcgtttaaaatattacgtatacgcctcgtctgtctcctgctgtctttttgcttatttatgcgcccgagatggaaacaaattgcactcgtaattgcgcttaagtggcccaaaagctgccttcgatcacgagcagcgatattcattgaaaacccatggagcagactcacaaatatgcggggaactacgatgatgatgatgatgattttgagtggcccatcaattgtgttctataaataaaaaaatacccacagacagcaccattccatcctcaattgtctcaattcgttgtgtcagtgtttcaatatttcgcttttttgctatttcggtgtggtgtagatctacaattgcatttagcaaatttgcgggtaattacagatcgataattgcccgcactttgagggcgtccgcctggagtaccgacccatccacccaaccacccacccacccccacctgaatgtcgtttggcattgtttatggagtgtcggtgtataaatagcacggcatacgaatcgcacattaatcggcagtgcgatcattaacatgctaatggccgtctaaagcgatcgttttcgctgtaatcgaagtcaagagtctggcgaattctcagatccacttggatgagtccagaatcgaggtgaatcgagctacttgaacaaatgatcgccgaactatgtggacttgaacgggtttccaaacggatctttgtcttttttttttttgcgaaggcttttttggcatgctgcttaaacgatcatcgtttttatggccataaaacttgttcatatcttaaaaaaataacttcatttcatttatgtgtccaatttgtcttcccattcttaagccaaggaaatatatgtttatattgtattagatttaatttatatatatttgttctcacttctggcagatgctagtttttggggatatcataattaagtgcggcatttatattaatctttatggtattatacgcattttagcttttcttgattaactttgcaataacaataaaaagtcaagcttacatctgtactgttcaatattaaagcgttctcttaaccagtcaggttgatcttgttcggcagcttttcgtttactttcggccatgctcaaccgcaaaataattttggtagctgatcttcagttaacccactcggtgtacccaagtgatcgtcccacttgcgaatttcgactgctttttctatgttccgcattagattcgcacatgaagtggaaagcgaaaccagccacacttgtttatagggtttcagcgtgctttgtttataagttggctaggccatgtttaactttaggtggatttatttttagcccgctcattccacttgaattattgtctaaacgtgtccgaaaacaatggcaaaaggcaacgcgaatatgtaaataataaaaaatgtgctagcttcgcttttggtatttggaattctttcacaaagcgtcgacaaattgtcggctgtcttatcttgaagggcttaaggcgtgtcgttgcccaaaaaaaaaaaaaaaaaacacaaaacggcgaagacattgtcaagttgtccaacaagttgtgtatccaggggaaatgataaccgaattttgttgaatattgtgataattgttgccagccatgggaatttgggcaagcatgtgtacactggggaaaaacactaatatatatgatttatttgatttaaactttgctcttttagtgtaaaagctttgttttgttgcaaagaattgccctgcataaattgttaatttaacaatcgtgttaaaccaacgatcgtaaatcagttcaattcgactgattagccagcgattagatttcataatagcctgattggcactctgtctgaaagtgattcatgtttacaatattattataatattataaaagtcgcacgcagaaaactttcaatggaaaatagataatatttctgttttgtttattacgggctatattttattatctgcctagaaagttttgctgtatttattattcgttttatttatgcactatttttgttgtattattttttttttgtagggctcccaacgcctggctgattgagttttccgtggcggctgttgatcaggaaagccgcctggatgcgtttctgctttgatcggctgtgcttcgcaaccaagcggccagcccaaaactccaacagcaatgcaccacacagcagcaccacagtagatgcaccaccacgtccagcggatgtagatgtagccactgtaccagtagcaacaccagcaccaccaccacaacagccagttagtaatctgttctatgccgactaccagaagctgcagccggcgataatcgatcgggactgggagcgggacagagatacagatacagataccaggagcgaggccaagccaccggacattgtggagcacatagaacccgtagaggagcagagacagatacacacacagatacagtcgccggcagagatacagatacagatacccccgacgccccctgccccatcgatacagatacagatacagcagcgctatcgccggcacagcagtgccgaagatcgcaatctgaacacgaggcgaaacgattcgaatattacggaggcgttacgaaaagcagccagtatgcagcaggagccgaacgccaactatcagttcccaaccgacttgggtctggtgagcatcgtcaacaataataataacacaaacacccatccgagtggatccaatagcggcagcaacaacaacagcaatatcaacaataatctggtgggtggcattgtgaccttgccggcggctggtggtctcataggtctggagcatacggcgtcgggtctgcgactgataccagcaccgcctacccactcggatgtgctgacccacacgctgatctatggcacaccgccctcgggcgcccagcaattgaaccaggatccccgaagccttctgcaccaacaggagctgcagctacagcagcgctatcagcaattgcagcagcttcaggcgcagacgcagggcctgtacaccagccaaggaagtccggtgctgtatcaccaacccagtccgggatcgagtcaaccggtggccatacccggagccacttgccattcgcccacgcaactgcagccgcccaacacgctgaacctgcagcagcagatgcagagtctgcggatctcgggatgcacgcccagcggtacgggtggctcggccacgccctcgccggtgggcctggtggatccgaatttcatagtcagcaactatgtggccgcctcgccgcaggaggagcgcttcattcagatcattcaggccaaggagctcaagatacaggaaatgcaaagggccctccagttcaaggacaacgaaatagccgagctaaagtcgcacttggacaaattccagagtgtctttcccttcagccgtggcagtgcggccggttgtgcgggcacgggcggagcgtcgggatctggagctggcggaagtggtggcagtggtcccggcaccgccacaggtgccacacgcaagtcgggtcagaatttccagaggcagagggcattgggtatctccgccgagccacagagcgagtcctcgctgctcctcgagcacgtcagctttcccaaatacgacaaggatgagcggtgagtgctttgactcatttatccatttatgtttttattttatgtagctcatcatattattcaagctcacattgtacatattgatatttgtttacattatgatgctcaacatggcgcgtgatcagtgatactataaatgtaatcattactttcactttgtgtgcttagtaattctccggcttttatcgtacattattataaaggctaaagtaaataagtttgctttactctaagagagatttttgagtgtttggcttgaggaaatcgttggcttgccttgcacagtagcatcaggttaaacctaatcgcgccgcccagatgagcccatcattatagcgatcccaatacggatgtacaaagtttagactagatgctatatagccgaaacgataacgatcggaatcggcgtcattgcgccgatcttaatcatatattgggaacagcgccctgtcgcctgtcgtcggttgcttgtgtcgcctgccacaaaatgcgtttatttaaaattgagttggggtgacaggcgcggttgcaccagccacccaccaccccttgccaatccgcccaatggccttgggcagtgtcagtactcggatataaaagtccgtatgaaaatataagccacatatatgatttgcaacccacaaagaggctgccaattggcagccaactcacgctacgttgcgtcacattcgtttcgttctattgggaattttttaagacacattttttcgtgtgtttttttttcgatcatgcaaaattcgttgcagtcactccgaaatacatacctatatacatatatacccatataattaacagagtataaaattaaatctgcgaaaatgcgtgggcggatctgtcggctccgcgattttcacactttggctggccactggaagtcgttgctcttggccagatttccccactttgtctgctgcaaaacataagaaaacataaatatttattctttggctatgtggcgctgtttcctgaatgcctttcaataatacacgggggcatgtgtgatcacagatcatttaaatggcgacacgcgttgtccaaaaaccgctgatccaaatttctgactaatttttatgagctataacttaattttatagtgttttgtgtgctatcagagatatttaatttttatacgcaaaaaattccatttaaaatattttccacgattttcccattgttgcggataagcagaaataaatatatttgaattttcattgcgtttggcataaacaaacaaatgtatatttcctattttaaatgggttttttttttaagaatggaaatctttgtgttaagaataggcgagcatttggaggttttctaaaaataaccatgtcttcttttgcgatttttttttaaacaaacaattaattacagttagttcaaggctatgccataaaataggaatattaaaaaaataaaataatgtgaataagatacttgctatgatcatagcgctactattgctgtaatctcaaagaacctgaatgacaaaatgatatgcgatatacatttatttcttatatttatcttcaattttaacatggagctggtttagattaatctgaatcggacgctaagtaatgcggcaaatttgtttaaatcggccatttttatgaccccaagctgttgacacaatcacaaaaaatcaccggcaaattcgcgaaatccaattgcattcaaacattttactggccaaaatgattgcgaggggggcgagaaggggtcccatagactttgcatttcggagccggccaattgaggtccattttatctctggccaaaatctgtgccgacggcgacgcttgtgtgtgcaacaggacattttttgacacttgcatggcataaatcaaaagcgccgtaggcctccacctcggctttacagatatatatatatatatcgtgtatatatctgtgcgatcgggattgagactgaggttggtccgagtacttttgtggccatttacaccacgcaactgtcgcttgttggctttcaacggggccatctaataaataatgccagaaaattgtgcgaaatcgccttcacgatggagtttccaggaggggtggcgtcatgtgggcagtggcgttcctggcagggggtattttgtcagaacttgctacatgttgcacatacatgtgtccacggtcaagatggcaagcaaacagtttgtgggtcatgcaattataatgctaattagagcagtgctagattgagagaataataaagtgctattgaagtattcagatgatcgtgtacatatgaaatgagctattttgactatgcttattaattaatatagctaatataatatataattgcagttttagtagctgttggcaagcaataaatcaaaagaaattacgaaatttggacactatattttttagataaggaaaacccaaactgaagtcagtcattatgcacttagcagttagctactaactattatttaatttgtataacaacataaaattggcgtgcagagattttcttttcgcagccgaatcccgataagtctccacccccttgacaaacatgccttgattgccatctcacagatagttaaccgtctcacacatggatatacacatgtgtacatagatatagattgagccaaaaatcaagccccacccaaaatagctcactttgcagttggtttgtcgcttccattggcgctgacttctatgcgcaatttccattttcaattcccccgccgagacgccagttggcttttattgtcaactgctcttagccgctaagtatttgcactttcaattcgggtttgccagtcagccgccaactgaacgcacccgcatccgaaggagatctctctggggacagactccgtgtatttctgaggtgcagccaatttcattccatgccttggcacacatttcaaattcaatttacgcacgaatatagccatatgaatggttatagcttccgacaactggaacgctcgagcgatccggcccgtaggtctaattgaagctattaattgttttggctcgtacacgcagtggcaccactggcaccacttgcatcaccgccattgtgccacgcatgtgcgtggtgctgcagccaaagaaaatgttaatttaggcatataaaaagtgctccgctggcaaaaccccacggggctgacaccatcgagcgacccaccgcctcgggcgactcgtctacactcgaaaaatatattataaaaaagaatttaaagctaatcttaagttaccaaatcaacagtcattatacgatttttgccaaagatatttgctcaagattgggattgtgtaactattggtattgttttatgaatgtcctaaaacaaggatattcttatactgtgatatgtctcaatttctctgagtgtatgcgcctccttcttctttggtttcaactccattattaaaactagtttcgatttgtggggcgctgaaatctaatacttcactatgccagaaaactatccatgttagattgtcgcttcccagactcactggtcgtgactagggtatcgattagacatgattcggttttttttcgcattttattatttttcattaaattttaattgtgagtgttatgcggcgtagccgaaaataccacaaagatacatgactacccgccaaacgggcgccacaggtgttggagtctgggtgtagctgtcggctttggccaaatgtccccactccatcgaaccgaaccaagccaactcatcaccacattttggggcaatcaggtagctggtggtttctcccaactcagactgctgccaaaaacgaggcttacaaattggcccccaaccccattgacgacagcctgggcaacgccctcgtgattaacttgatcattgatcagagatcggtgggaccaattatgaaaaatgaattttaaaccataaaacgttttttaagccagaaaacataattaacacatttaactaacattaatccctttcatcgtagtttctccctagtattttaagtattttaaatcatacaaaatgttggccacactggctggcagtgctctggttggctttaattaatcacccaggtcaggtatcagcattggcttccaattttatccgatccactgcttctattcccattactgtttctctggcccgggcgagttgtcaagttcgctgacagataaagtcatttgacatttacaggcattgccgacatggcatggtacggatccccactccccagccgaagcatacaattttcaaatttgtattaatttcatatcgctcgattgcgcgcatgccaacatccatcgacattgggctccaaaaacaaccgaaaaaattgagttaaaatgccgccaaatttttggtggcacaacttgttgtgcggcttgtaagccaaactggccaaccagataaaacgatttatatgtgtcagtcggaaaattaattggactcttgcctttgctcatttcattggaagtctcttgccattttcaatattcacatctaattgcatttatctatcgttttgcagctcccgtgaacttatcaaggctgccatattggataatgatttcatgaagaatctggatctgacgcagatccgcgagatcgttgactgcatgtatccggttaagtatccagccaagaatctgatcatcaaggagggagatgtcggaagcatcgtttatgtcatggaaggtgagttgaagctccaagcacttgtgatatatctttcatttggttagcaattttagttccttaaagatatcaaatcaatttttagtacaaagatattttctgtgggattgttaagcagtacctttcagctaataccttatatcgtacttgcagccaaaaagtatgctaacatatttgattggaaatgcaaccgaacaggtgtaaaatgcatgtagaatgtgtgtcgtctatatgtggaaatctttataagtctcttggttctttaatgacaaagtgatatttaataaagatatttgtttagtttatattataaactatttaattaagttcaagcaattgaataatatcaatgttaaaattctgaaatattatctactaattctgatatttttcaacaaattgtttatgtatccttgcaaataccttaacatatgcgttcaccttgccccgccaagatcgtgcaactagttggcgcagataagcagctactccttgggtttggctagttgcacgtgcgccttttggccagatgtggaatgcctcagttgtgggctgggattggaacgtagttttgcgtgataaaaggggatttcggggggactgtgtcacacccacgcccccagaagaagagaagttcagagtctcgccttgcagcgaaatgtcagcaactgactgtcgactcgagcgaacaatggccaagaagcgggttttcctttcagttttcgcttagcattttgtttaatagttttttgcacgtttttctgcgtttttcttgggcccgtttttaatttcagggtgcgctactacgggccttttgacttcagcctcgtggctaattgttgctttaaatatttgcgcgagttgggttcggtttggcatcagctctgtgtacctttcgtgttaatttggtcgccgacttaatttacgtactagcattagcattttaattgcgcgcagacgactggagaaaagtaacaacaataataatgataatcaacagtcgaattatacattcgcaagtggcaagatgaatcggagaagaggatgcttcctcaatcttgcaacatcatcgtctgggattttcgcttccttaacctgaagcaccgatgtccgctactccaaaccgatgagcagatgtcacggcatctgtctatatatcatatagccccgcgcatatgatattgcaacgagagagaaaatcagagaggattcatatgatcgaaaaaccccttacagcagatgtttacgagatctgcaaggtttcggccttgctcattgtgcgaatgccctgtaaaacgcattcgagataagaaaagaggaagtatttacaatataataccctactcataaaactgccccatctcgagggatgtctgatttgttttgaaactctgctctgattaccaaattgaagaatatattttgtataatgacagacttgattaggcaacagtttaaggcgcgttggctctgaggtcactggacctcgggatctataattatttctgcacgttcattgttccatttctgaattgttacgttttccagatgataacgttcgaatctcttttgtttcgcgtagcgaattggcctgtcacttaggaccaaaccagttcgccggtttggtactctaaagctacactgcgagaaaaaaattgaatgggtcaatgtgtcgaacattagcagatatttcgatatttaaaatagaacaaatttgttttctcaggttaatatattggtacaaatgactttattaagacttagttaccaagcttatatggtctcagatcattaaatataaataccatgctctagattagtgcaacttatttcctcagtgcacagcacttgcttttgttcagctctttacttgtatatgtgggtattttcgctctcccagacacacatacacacacacacatataccccgatctctggggctctcgcccacaaccaaacaaaacgtgctcagctgtccccactatctgtacctgtctctgttctgctctctcagccgatcgctcagttggaaatgagaatgagtaatgctccagtgtttcgaatcccgatcttcgggcaattcgtcattcgtccggcaggcggcgtagcgagaaaacgtgtgtggcgcatgcgcatgcgctcggttgcgaaaagtgcacctggatttgaaattaagccacaagaataacagaaatcaaaactcccccacttcgtgtttggccatttcttcggctgtcgtatcgtgattttcaattcgccctcgtgtgtgcttaacggtattatagagcattttgcatatggcaaccgctgccagtgaattaataataaaagccacaaaccagacaattaccatgccttgcgcatatgcctttgagctatttccaacaataatgcttacataaatagcagctctggttgatgttctaaatagcaagtaaacaaaaccgcacaattttcccatgctcggtttttccgctcggctgtaattatgttgaaagagatcgggaaacgcttcgtgttaatttctttgaactgctcgcaaattcttggaataaagtgaattaaaagtgaaagtgaattctttaagcactcgcattaagtgagggaaataagcttaaaaacacccacggacttaaagagaatgagacgcagaaacggagacttggattttgctctttttctcgaattgaacgcaaagatcacttgaagaattccggtttgtggttttcctgtgcagctgttgttgttgttgttttggttgctgttactgccccgctgatttgtatgtgtatttatgtcccggtcattggtccgaagtaaagagccaaaaacacaaaaatcggcaataatggtgtagaaatacagacattataaaccgtataatgccaaatgtcactgctgcgactcgatcgtgcaagaatgtgagaacacaaatcgtacactgaatctgatatggccccagaaatgaaagaaatccactagaagtgcggaagaatgtggaaaattaaattaaatattgctagaaacacaaaacagaaaagaagtagcccgaaatttagaaatcgtgcgagtcaaaagccaaaacgatggtgatcacggacgagagggagaggcaactaggcatctgtgctaatgtcatgccctggaaccgggtctccacctgtcatttggcttcttctctcgtcatcttcccaacttggctggggcatctggggctaagaccggtcggaactatgggggctcggaactcggtggggcactctcactttccagcgacccaacgagttttgcattcgccttttgacatgccaaatgaactggcttcgcttgggcgctcaaataagattgagtaatagacgaaaagtggaaaatgatgacttgggggaagtggatcacaagattatggggaaacttggctctgaattggtcaaaataatggcgttccgaagtggtttataattgaacccaaacaagtggaacgaactctcagtagcttcttgatgctgggtcttatttaatttccagcactccaacaagttcatgtttttcttattttctttttaaaaaaagagttgagcttaaatacccaattaaaaagatacccagcagcattttagtattgattaatcgaaagttaatgatgcaagtctattaagacgtttccatgaagcttgcttatacatatgtatatttcttcgtttcagaaagtggctgttttcagaatctctgtggcattccccaatgatcttaaatctaatcagtaactcgaacgctagtcagtgctgacaaccctatagatcacttcagaatctcgtttgtcagctttatcgctgttttaagtacacttgcgaaataaagagaaggaatagtgttttgcgaaaacgatctgtcccgtttggctgattctgaatctcgattccctcgcgatcttgcttgactacaatctaaattgtatacacaaaagatctttcggacctctgatcttgcctccctcttccaaccagtttggataactttctttatagccgtctttcattagcatagacaaacaaaagaaacgtcaactgagctatggccataaattattattatgatgattttttagctccaatgtgagtgccaaaatgcggtcatgtcggtaaaaaaaaaagaagcaaaaataatccaaaacgaatgactaagccaatggcagttttgtcttgccttaattgtcagccaaaagggcggaccaaaaagtaaattacgagctgtcatgcaaaaccgaaaatgacttggactcggactcgatctcattccgaatccgaatccgctgcccttggcacacaagccaatgtctgtgactaacatcgccttaatcgaggcttccaaaaaccctgctctggagatccgttaacttctataaatagctgcttcagaaaagccaagtggcgggacacactgtccaaaaaaaaaaaaataataataaaagatttaccaatcaattacaatcaataaccacgactttaagtattttttcccatgagcaccgccaattacaaatgctaattgatattttcatacaattaagtccaatgataagtgaacctgaattgttgcaataatttcaaagatttttccacagtgcaagagctgtttaaattcttgtttcctccgctctgcgattgtattcaaatcggcgaatcagacaccggctgaccttgccaacactcgacatccaacaaccattaatacttgaagccagtctctgggcgaagttgcaaaatgtctgcagtttcaatttgtacacattttttctccatttacttttataatttgggtttttttttgttttgtttggggtgctcagctgggcttgacggatttccgcatttttaaaagccagcaaacctcgaccccgctgaactcgtggagcaccaagcttggccgcgggccgtaactttccacacttattttgaggaaaattcggccctttatgagggctaagtgcagtgtgctcatgccaagaaaatctctttcaaatcgcgtaaaaaattccatataaatattgttagctggaatactgaatctctgccatgtgctgtgcacacgttatcacttcgaaaagccaaggcacgagttgttttcacatggaaaacagcatatagtagtgataacaaaattctcgggtctcccgatttatctcgcccgctactcttacgtaaataagtatctgtgagcgcggtaatttgtttgccattagctgcgagaatagttcaacaacatcgatgtttactgtttgattgatcatattcaaggtgccacaaatgatctttgttgattgtttgtcttcgccgctcgtaattgttgtgtttgtctagtcatcgtttccgattgtgcgtagtcgtgacaatcgagtgttttccattggatcgcagccgttgttgtgtttataaagcgggttccctgcacatgtgctatatgccatgtttttttatggaaatttattagctgagttaaaaaagaattagtttggcatgtgatcttggtcttctgacgcatttgtatttatgaaaatgctaatagaagccatcacattatcttttgttgatatacttagaacgatttgtgggcggcacaccctgctccgcaacttccagactttccaatttactgagcctattttgctcattgaatattattaacggaattaaaataaatatttgcctgagatcgcccgcagatattgggcacacccctaataactgagtcataaagtgcacaatacacgatcgtttgcgtcagtttgcccgatcaattagcgtaaatggacccagatctaaatggaaatacctcgaagcaaacaacaactcccttccaattcagagtcacgctctaaattttggagcccagcaccgatggtcactggacctattttgggcttctctaggttggccaatacgtcacttttggctgttcagacagaccgcctttattattgtttacctttggcaacatcgccaattgtcacttcccctttttaccgcatcgcccacttttcattcacaattggctaatttgtcgatgattaagcttttgatgcactcgcaaatggtagaggtggaaaaaaaagagcgagactcactcattcacacgctcttaccaattggccgaaattaatttgcaactcagctaaatgcgattgtgtattgaatgggtttgcaagagaagttcggtgcgtgattccccaaatccggtaaggattgtggttttccaagagacagaaaataggaaatcggtcgagtaatttatatttcaagcaatatgctcatatgctgagcatgggtaaacttatgcagattccactgttttggtttgatttcatttaaatagccatttattgctattgtactgctcaccattgtgcctgactgctcttgtcaaagctggtagatcaacaggccataaacaaaatcaatccacaaacgtgaggcaagtcgcaaaaaacatggaaagtttacaacaccgtcgacggcagaaacgaaacagcaactgaaacagcaaacgtgtgtggcttttgcaatataaataacaaatacattattgtgattttgttaccaacaacaggcctgaaaaccgtaggcatcgccattcccagtgactcttcaaatattccgtgcgcgaaactgcagagctctttggttatgcaaaagacctccgaaaataacaaacaacaggcacaaaaacataaactaaacgctggtggagccaaagacaaacgaatcacgtcgctgcagctggtcaagtgaaatttttctttcgtaatgaaaatcaaacattatccgggcaaagccgtcgatgcgagtctctcgctggagggcagcagtgccatgggtgccctgtacgaggccaattggctgagggctgcgaatcagcccgccgctccagccacaacgggcaccaaattgagcaggcagagcagctccgccggcagcagtttcctcatcgagggcatctccgccctgagcaagtaccaaatgaccctggagaatatccggcagctggagctgcagtcgcgtgacaaacgcatagcgagcacgattaaggaactcagcggctataggccatcggcactgcagcatcatcagcagcagcagatgcataacgtttgggtggccgaggatcaggatcaggaacacgaagaactggaagatgcttcggagggaaaggagaagttggctagtatccaggaaccccctgcagttaaccactatgtcctggacccgacggagagaccaagggttcccagaccccggcaacagttctccgtgaaaccgccttccttgcgtcgctcccaaaccatgtcgcaaccgcccagttatgccaccttgagatcgcccccgaaaatcaaggaaaatcttagcaaaagttcctccgcctactccacattctcctcggctgcagaggattcccaggatcaagtagtgatctgccaacagccacagagactgatggctccgccacccagagaaccgcctccggagccacccaaaagggtatcgaaacccctgagcagatcgcaaacttcggttcagcggtacgccacggttaggatgcccaaccagaccacttcgttcagcagaagtgtggtcaggtctagggattccaccgcctcccagagacgtctcagtttggagcaggccatcgagggactcaaactggagggggagaaggctgttcgtcagaagagtccacaaatctcaccagctgccagcagtaatggcagctccaaggatctcaacggggagggtttctgtatcccacgaccgcgcctcatcgttccagtgcacacatatgcccgtcgacgcaggacgggaaatctcaaggagcaatccagcggtgggcaggaggaggaagcagagaagggtaaggggtggaaggatttctatgttttaagtcaggataggcatagtagcttttatatcaataggataggacagaattatgattatgattacccaattaattttaatatattttctccagatggacgcgtggaggtttcccgcgagggcaagtacctctccacattgtcgggagcgaaggtccttggcgaattggcgatcctgtacaactgccagcggacggcgaccatcaccgcgatcaccgagtgcaacctgtgggccatcgagcgccagtgctttcagaccatcatgatgcgaacgggcctgatccggcaggcggagtacagcgatttcctcaagaggtgagtagccctccccgatccgtggctttcctccttggaatacctccttcatcgccgccttctcggccactcctctcgaagaccagaccaggagagacttccccattgccaatcggcgatttaatgtgcattttaatgagcctctgagcctgtggcgatttattggcgagatggtgccgactggttatttgcaatttgggcgtaattaatgttcatttacacttaattatatcaattccgcagtgcagctcgtgtatggtcattactctataatggcaaatgtaaaaatcgcttagcttgaggattttttttttttttagcccggtcgatttgtgtgttcaaatcgtgcaaggtatggcgaataaagtaaggtaactttctccgccggccccatcgacggcatctcttcagatcgaatgcagcattatggccatctcatcatcgtcatggtgttgggcgtccatatgacgtgcaatggctcaaactcaaatgaaaactcacttcagctaaacttcaggctgcggccaacgaacgcatagaaatttctttcccaatgccagccatggcaaccagttttttggccaagtctgcgcggctgtatccagtctcacttccatctccagtcgctcctgcctccggagtgaccggcaaattaatcgcgtttaattggtcgtccgtaaaaactgctaaaaaccataattgaggcctcgaccatgcactcgttgcctattccacattcgagaagtagcggaaaaagcagattgaaaatgaaagtgcaatgggctgatgatgacgatgatcatagatttagatacagatactgcagctgcaactgcaactgcagctatagactctagatacatgtgagcattcactgaaaaaatgctagccggcgggaaaaaacagaatgggaggagttcagcttcgattacgctgctctacagagagagaaaaagataaagaaatattcctcaaatatcgaagagaatcgaaaatgctagatagattaaactgaaacctacaaacggtggctatgtggaagataacttgttaatatttttgttaagtgtaacaacaaaagatgtgtgcgatgcacatgaaaaaattccagccggagggaaaccagtaatgggaggaggagttcaggtgcgactttcagcttgaagatcgatgtaggtcaacaatagattcccattactatggaattctcttatctagatcgaacttggctcggccactaattacagcactttctttggcctgcaacgcagattatctcgaatgaaactaacaatttttggtcttcttatctaccgctagtgtgcccatcttcaaagacctggcggaagacacgctcatcaaaatctccgatgttttggaggagacgcactaccagcgtggcgactacatagtgcgccaaggcgcccgaggcgataccttcttcatcatatccaagggaaaagtgcgagtgacgatcaagcagcaggacacgcaggaggagaagttcattcgcatgctgggcaaaggggatttctttggagagaaggctctccaggggtgagtttcattgaaatgattactatttctacttcataactaatgtgtatcatatttgtgttttagcgatgatctgcgcacggcgaatattatttgcgagtccgccgatggcgtcagttgtctggtcatcgatcgcgagaccttcaatcagctaatttccaatctagacgagatcaagcatcgctacgacgacgagggcgccatggaacgcagaaagtaagcgaatatttgaaaaaaaaaaaacacgaatcaagataagcaatgaggaattgaatcaatcgaaagcaaggtcaatgaactacctccaaatcaacaaatttttgttcatgttttaaatgtatatttacccgatagtcaagagagggctatacaaaataaccacattcgatttgactcaaactagtagttataatacgcttggcaagaagatgaaaaataattttttgggtcttgagtagatgatcaaaatgttagtttcttaaaagtcttcggcttatcttgattataaacccatttgaatgtttgaatacatggactaaaaactcatctcttttgcaggatcaacgaggaattccgggacattaacctcacagatctgcgcgtcatcgcaacccttggagttggaggcttcggtcgcgtagagctggtccaaactaatggagatagctccaggtccttcgcgctcaagcagatgaaaaagtcacagattgtggagacgcgtcagcagcaacacatcatgtccgagaaggagatcatgggcgaggccaattgccagttcatcgtgaagctgttcaagaccttcaaggacaagaagtacctgtacatgctgatggagagttgcctgggcggagagctctggacgattctacgggacaagggcaacttcgacgacagcaccacccgcttctacacggcatgtgtggtggaggcctttgattacttgcactcgcgtaacatcatctaccgcgatcttaagccggagaacctgctgctcaatgaacgaggatatgtgaagctggtggactttggctttgccaagaagctgcagacgggcaggaagacctggactttctgcggcactccagagtacgtggctcccgaggtgattctcaaccggggccacgacatcagtgcggattactggtcgctgggagtgctcatgttcgagttacttactggtgagtaaaaagaaagatctaagtaccaccgtcatataaataaccattttgtaatccttattctaggtacccctccattcacgggctcggatcccatgcgcacctacaacattatacttaagggcatcgacgccatcgaattcccaaggaatatcacccgcaatgccagcaacctgatcaagaagctctgtcgcgacaatccagccgagcgtttgggctaccagcgtgggggaatcagcgagatccaaaagcacaagtaagatccatttcaaatagtatgtgaagcagatacttattcgattattatttcccgcacagatggttcgatggcttctattggtggggcctgcagaactgcacactggaaccgcccattaagcccgccgtgaaaagcgttgtggatacaacaaactttgatgactatcctcccgatcctgagggtccgccgccagatgatgtcactggatgggacaaggacttctgaggagaatcagaacccgtttcctagacgatgctctctaaacgcttctgctgcagaaaaccaggaggatatgaaagccagggaagaaaaattgatcttaagtgcgccatatgtacgccaaagccaacagcaacagtcagcagctcgcatcgaaaagctgccacaaaaaaaaacaaagaaacgtagcagtcgcaaggtcaagggccgacacaaaagcacaatcatccatcgtcgtagctccatttgagatttatagatacgtctccgtgatgttataaccatgatgtgcaacgcaatgaatttattaacgagtttataactattattttataatgaggatatatgtgtctagttcgcttggaattgatgtaaattgtaagtaggtctgtgactctgtttcagagctctgttagccatgtgcattgtataaattcagctatttgtatctattaaatatttttaacataattattacacatcattgttaaagcatacaaatcgggttgccttatagtctgtaagagaacatttgaaagcaacatttgaccaagatcttccgtcacacatttcttaaaattctatgtggcctctctactgtctttcattagtcttagcgatcatgtctattatatttacgaataacatgcccttttaattgtcttttttaagtaaatcagctagaaattgaataaacaaattgatccgataaatttttttgtatttatacactattatcacaagaaattgtgaaagatactgctggccattgctgccctcaatgggtttcttcggttgtagtagataagatatttaatattaccaaattcacagtacacttcttaatttctttaagtgcattgtgaaatgaacactgcttttacagcatgtaaaaccgcccactcaacttgacctttttcaaggtacttcctatatgggcgcttctctgggcacacgttttctcttggcaaatagtgctgtggaaaatatgcaataaaaagaggaaacgctgaaatgcaaacgaagttggccaaaaacgaaacacaactacgtgacgaacggaagacgaattgccatgcagagaaagccgagaaaaatcagtcaaaatgctacaaaaattaaataagaacattctgtcactgacgttagtgcagatcgcaacggaaaactgaagctctgcaattggagtacgaaagtgcaactagaggatcgattggatatataatttatttcgcaacttagagagattgccgccatatgttaatgaactgaacaaaatggtttggatttcgagctgggggcaactttggctggtgttgctattggttgtgggcctatcgttgggtcttccgagcttggaaaaccagacacacgaacaaatcgaacagataataggtgagtcgtggatttattcgatacgaaactagattttaataactcttttctattctacattcagcctgcagacagccaaaggcacctggtttgtgccggggtcaccagttgcgatatgcctacaacaagaagaccggaaactgcgagagcttcatctacacgggctgtgcctccactgagaacaatttcctgaccttcgaggagtgtcgcagggattgcatgcaacgtctgcgctactgaagtcgcttttaacgat

SEQ ID NO: 28115 - DNA, 4308 bp, DROSOPHILA
tgtgtgcgtgccacttagaaacgcaacgcaagtggaaagactcgagaaaacaaaagtgcaggccgtctaaattgatggcgaagtttcgtgtgccgcctgcatttcatttataaatatattttcggccttaattctgtgcttcctgtgaattaacgaggaaactgaagagtgcgcgagcgagacagccgatcacaaatcaacaagtggaaacgaagaaactttcttcgcaaaagccggctgatcgcaacaacaagaagaaaagagagcgattctctgcgactggaaccataacatttacatcgaccctggaatttcttcacttttcgtccaacatggctcccaacgcctggctgattgagttttccgtggcggctgttgatcaggaaagccgcctggatgcgtttctgctttgatcggctgtgcttcgcaaccaagcggccagcccaaaactccaacagcaatgcaccacacagcagcaccacagtagatgcaccaccacgtccagcggatgtagatgtagccactgtaccagtagcaacaccagcaccaccaccacaacagccagttagtaatctgttctatgccgactaccagaagctgcagccggcgataatcgatcgggactgggagcgggacagagatacagatacagataccaggagcgaggccaagccaccggacattgtggagcacatagaacccgtagaggagcagagacagatacacacacagatacagtcgccggcagagatacagatacagatacccccgacgccccctgccccatcgatacagatacagatacagcagcgctatcgccggcacagcagtgccgaagatcgcaatctgaacacgaggcgaaacgattcgaatattacggaggcgttacgaaaagcagccagtatgcagcaggagccgaacgccaactatcagttcccaaccgacttgggtctggtgagcatcgtcaacaataataataacacaaacacccatccgagtggatccaatagcggcagcaacaacaacagcaatatcaacaataatctggtgggtggcattgtgaccttgccggcggctggtggtctcataggtctggagcatacggcgtcgggtctgcgactgataccagcaccgcctacccactcggatgtgctgacccacacgctgatctatggcacaccgccctcgggcgcccagcaattgaaccaggatccccgaagccttctgcaccaacaggagctgcagctacagcagcgctatcagcaattgcagcagcttcaggcgcagacgcagggcctgtacaccagccaaggaagtccggtgctgtatcaccaacccagtccgggatcgagtcaaccggtggccatacccggagccacttgccattcgcccacgcaactgcagccgcccaacacgctgaacctgcagcagcagatgcagagtctgcggatctcgggatgcacgcccagcggtacgggtggctcggccacgccctcgccggtgggcctggtggatccgaatttcatagtcagcaactatgtggccgcctcgccgcaggaggagcgcttcattcagatcattcaggccaaggagctcaagatacaggaaatgcaaagggccctccagttcaaggacaacgaaatagccgagctaaagtcgcacttggacaaattccagagtgtctttcccttcagccgtggcagtgcggccggttgtgcgggcacgggcggagcgtcgggatctggagctggcggaagtggtggcagtggtcccggcaccgccacaggtgccacacgcaagtcgggtcagaatttccagaggcagagggcattgggtatctccgccgagccacagagcgagtcctcgctgctcctcgagcacgtcagctttcccaaatacgacaaggatgagcgctcccgtgaacttatcaaggctgccatattggataatgatttcatgaagaatctggatctgacgcagatccgcgagatcgttgactgcatgtatccggttaagtatccagccaagaatctgatcatcaaggagggagatgtcggaagcatcgtttatgtcatggaagatggacgcgtggaggtttcccgcgagggcaagtacctctccacattgtcgggagcgaaggtccttggcgaattggcgatcctgtacaactgccagcggacggcgaccatcaccgcgatcaccgagtgcaacctgtgggccatcgagcgccagtgctttcagaccatcatgatgcgaacgggcctgatccggcaggcggagtacagcgatttcctcaagagtgtgcccatcttcaaagacctggcggaagacacgctcatcaaaatctccgatgttttggaggagacgcactaccagcgtggcgactacatagtgcgccaaggcgcccgaggcgataccttcttcatcatatccaagggaaaagtgcgagtgacgatcaagcagcaggacacgcaggaggagaagttcattcgcatgctgggcaaaggggatttctttggagagaaggctctccagggcgatgatctgcgcacggcgaatattatttgcgagtccgccgatggcgtcagttgtctggtcatcgatcgcgagaccttcaatcagctaatttccaatctagacgagatcaagcatcgctacgacgacgagggcgccatggaacgcagaaagatcaacgaggaattccgggacattaacctcacagatctgcgcgtcatcgcaacccttggagttggaggcttcggtcgcgtagagctggtccaaactaatggagatagctccaggtccttcgcgctcaagcagatgaaaaagtcacagattgtggagacgcgtcagcagcaacacatcatgtccgagaaggagatcatgggcgaggccaattgccagttcatcgtgaagctgttcaagaccttcaaggacaagaagtacctgtacatgctgatggagagttgcctgggcggagagctctggacgattctacgggacaagggcaacttcgacgacagcaccacccgcttctacacggcatgtgtggtggaggcctttgattacttgcactcgcgtaacatcatctaccgcgatcttaagccggagaacctgctgctcaatgaacgaggatatgtgaagctggtggactttggctttgccaagaagctgcagacgggcaggaagacctggactttctgcggcactccagagtacgtggctcccgaggtgattctcaaccggggccacgacatcagtgcggattactggtcgctgggagtgctcatgttcgagttacttactggtacccctccattcacgggctcggatcccatgcgcacctacaacattatacttaagggcatcgacgccatcgaattcccaaggaatatcacccgcaatgccagcaacctgatcaagaagctctgtcgcgacaatccagccgagcgtttgggctaccagcgtgggggaatcagcgagatccaaaagcacaaatggttcgatggcttctattggtggggcctgcagaactgcacactggaaccgcccattaagcccgccgtgaaaagcgttgtggatacaacaaactttgatgactatcctcccgatcctgagggtccgccgccagatgatgtcactggatgggacaaggacttctgaggagaatcagaacccgtttcctagacgatgctctctaaacgcttctgctgcagaaaaccaggaggatatgaaagccagggaagaaaaattgatcttaagtgcgccatatgtacgccaaagccaacagcaacagtcagcagctcgcatcgaaaagctgccacaaaaaaaaacaaagaaacgtagcagtcgcaaggtcaagggccgacacaaaagcacaatcatccatcgtcgtagctccatttgagatttatagatacgtctccgtgatgttataaccatgatgtgcaacgcaatgaatttattaacgagtttataactattattttataatgaggatatatgtgtctagttcgcttggaattgatgtaaattgtaagtaggtctgtgactctgtttcagagctctgttagccatgtgcattgtataaattcagctatttgtatctattaaatatttttaacataattattacacatcattgttaaagcatacaaatcgggttgccttatagtctgtaagagaacatttgaaagcaacatttgaccaagatcttccgtcacacatttcttaaaattctatgtggcctctctactgtctttcattagtcttagcgatcatgtctattatatttacgaataacatgcc

SEQ ID NO: 28116 - protein, 1088 aa, DROSOPHILA
MRFCFDRLCFATKRPAQNSNSNAPHSSTTVDAPPRPADVDVATVPVATPAPPPQQPVSNLFYADYQKLQPAIIDRDWERDRDTDTDTRSEAKPPDIVEHIEPVEEQRQIHTQIQSPAEIQIQIPPTPPAPSIQIQIQQRYRRHSSAEDRNLNTRRNDSNITEALRKAASMQQEPNANYQFPTDLGLVSIVNNNNNTNTHPSGSNSGSNNNSNINNNLVGGIVTLPAAGGLIGLEHTASGLRLIPAPPTHSDVLTHTLIYGTPPSGAQQLNQDPRSLLHQQELQLQQRYQQLQQLQAQTQGLYTSQGSPVLYHQPSPGSSQPVAIPGATCHSPTQLQPPNTLNLQQQMQSLRISGCTPSGTGGSATPSPVGLVDPNFIVSNYVAASPQEERFIQIIQAKELKIQEMQRALQFKDNEIAELKSHLDKFQSVFPFSRGSAAGCAGTGGASGSGAGGSGGSGPGTATGATRKSGQNFQRQRALGISAEPQSESSLLLEHVSFPKYDKDERSRELIKAAILDNDFMKNLDLTQIREIVDCMYPVKYPAKNLIIKEGDVGSIVYVMEDGRVEVSREGKYLSTLSGAKVLGELAILYNCQRTATITAITECNLWAIERQCFQTIMMRTGLIRQAEYSDFLKSVPIFKDLAEDTLIKISDVLEETHYQRGDYIVRQGARGDTFFIISKGKVRVTIKQQDTQEEKFIRMLGKGDFFGEKALQGDDLRTANIICESADGVSCLVIDRETFNQLISNLDEIKHRYDDEGAMERRKINEEFRDINLTDLRVIATLGVGGFGRVELVQTNGDSSRSFALKQMKKSQIVETRQQQHIMSEKEIMGEANCQFIVKLFKTFKDKKYLYMLMESCLGGELWTILRDKGNFDDSTTRFYTACVVEAFDYLHSRNIIYRDLKPENLLLNERGYVKLVDFGFAKKLQTGRKTWTFCGTPEYVAPEVILNRGHDISADYWSLGVLMFELLTGTPPFTGSDPMRTYNIILKGIDAIEFPRNITRNASNLIKKLCRDNPAERLGYQRGGISEIQKHKWFDGFYWWGLQNCTLEPPIKPAVKSVVDTTNFDDYPPDPEGPPPDDVTGWDKDF

SEQ ID NO: 28117 - DNA, 14899 bp, DROSOPHILA
tcagtccaatcaattcaattagcacccgggggtgcccattaaagacaagcaataaacagtgcgaattttatgtccattatggacagatatatagccgagtaccaggcgaagcatataaatgctgactacaacgtcagcaacgaaaatagtctaggctggtaagaattattgctttccctaatcgaaaatcgaatccacaatattgtaatttgtttatcaaccggatagaaagcaacaaaagtcaagaacacacaactgcggaggtgggacagcaacagacacatgtgtcaaggccagcaaactgacactgaccttgacacgaggtctggttggttggttgggtgtttgggtgattgggtggctctgggtgggtggattccgcacgaaggtcgccgtcaccttgaaaagatgcgaacacttttccaccatcccacctcctgttcttgcttgctttagctggttgtttcgtttgttttttggtcgtgttttaatgtgtaattattaaaattttatttacaaaaacaaattacaatattgtgggtcattttcataaatgattttaaatttaaaaagtacctataaacttagcctacaaaaagagcatagaaaagttcaacaagtcgggggggtttagggtcaggctcaggggcagggacaggggcgttcaaaaagaccatcatagagggctgcttttcagggactcgcgactcatgttcacaccagcggcacctgccccccaaacggagcgggccagctggaaaagggttgggaaagggttatgctgctgctgctgctgctgctgcgcctgccactgatgttgctgttgttcatgctgtgctgtgttgctcctagacccgcaacgaaaatagccaagacgaacggcgggcagctgttttggccgcgagttctcctcctcatgacgctggtaataaaaaagtggcacgcagctagataccaaaatgtatctgaagccactgccgccgggtgctattttcgtttggctgctgaacttcagcaacaagtttgctgatgctgttgcttgtgaatctctcctactcctcctcgtcgacgcccacgcactgtggacagacgggcttgccctccatggcgtagaaggacttgccgcgaacggccttcttgcaatcctaaggggtatacgtgatcaggatgaacgattaaaatgggcaattatggtcagaaatagcgaggggaaaaggcaaggctcagatcttaaggctttgctgtcacatttagattccgaatgctaaatgaatgctagatgtctagtcaagatgtgtaaaattcatatagaggaatcaaatgtgtcagtggcaaagcccttgctactctactcctttcttcagtaaatgaaacgtaaatggcattaattctggttagcatatctatgtaagaggataacaacgtaccctgcagacgaagcaatccggatgccactgcgagttcagcgccgagatgtagttctccataatggcgcggttgcagccattgcacttcggggcaaacatctcgaagtagtcgttgcgacagtacggcttgccgtcacgctcatggaatccctcctcgccgaactgctggccgcactgggcgcagaagaagtgctccgtgtgccaggtcttgtccagcgccgttacgcacttgtccagaatggcgccgttgcagtaggcgcagcgcgggctgaacagattgtggtagtccggctcgcagtacgggaagccgtcgcgctcgaagaaattgcgggtgcccaactcctggctgcagtggttgcacgtgaagtgctccggatgccatgtcttgcccagggctgtgatcacctggcccacaatgggcttctcgcaggcattgcagcagcccttctgcacggtattgactccttggcgactcatattggcctgtagattgcctagcatagaatccaactgatcctcgcgactgtcctcgacgatggtcgtctcctcgatcgtctgggtgagatgtgcctgctggctacccttgtttggtctggcgtagtcggttaccgtctggtgctgcactgtcgacgagtgctgttgcggatgactgccgtttccgatgccgtttgttccgttgctaacctggaatgagggataacgattccaattagcatgctatatccttcggattctgttgcggtgggcttacgtcgatgtgcttgcctcgactgaatcaaaagttgtgtgagcgctagcacaaaaacttttgcttttagccgccactgccgacgaaaacgaacaaaaaaaaagaatcaaaatatcaaaaataatgtttctcttcctcttcgcacagattctcctcctgactgaactatatagctatatgtatgtgtgtgtgtgtgtatgtggacctcgttgcgcacgacgctctcctcatatgcaaagcatttttcttctacgttgacgtagttttcgttcattgccaaaaatacgaaagaacgttttccgatgaacgaacaacgaaaggagtgggcggccaagggggtttctctactgcctctgtgcggatcttgtctgtcgagtctccatttcaatatttaatttttcttttataaactctgcattttcattgggcgtgctcgggttctgcctgcttcggcctaactaagtagacgcctaattgagcgtcctctgaattgggaaaggggaggattcgcattgaaaaggtacgtatctactttaatgattagcaagctttacttaatgcaaccgtttatctactgctacctagttttatatttctcaatatgtttggataagcacagcagattataatttctttataattagtagacgctctggctcgttttctttgtgcgtttcgtcactacgtgaataatcactaaccctttcttattttgtatacatggataggaattctcaaacgaaattgaaagacagttaatttctctaaacacataaaatattcaagattcatttcgtgaaaacttcttaagccttaaacctttataaaaatagcatttattaaatagtgccgatcaatatttaaggcattgcattaaagacttgcaattgatgtggtgggtaatatttttacattccatttttttacattttacattccattttttttacaattccatttccatcgtactacttattaaaatgttgtatccacatggaatgactctatcgctgtggacagcagtctgcgtagtgacgaatcgcaccatttattagaatattgttattattccaaattaaatcgacccttcccgaaatgttatagtcagagattccattttggttgaatcaaggaagcctcaatgttatcaagatttatattcacgcccgcccctttcgaacgaaactccgctcctgtttcgcctgccgcacaaattttcattggcttcagcgtcgccgaggttttcttattctaatattttcattgcctattttaagacccaaatcgtacacagcgcagtcgaaccaccgaaatcgtcgtttggcatggagtataaaatgaacatcgaccggctggtcaacaggatttccccataaaaagcgcagccgaatgttcgttcggcacacgtttccagtcgtggccagtggacgggagaaaatctgggaaaaggtggggaattgagggattatgaaatgggggacaggaagctggcactgaggaaatctcgatcaatgaatgggacgggcaggaggtgaaatgaaaatgggcggaaaatggggatacgaatgcggttttgaacgccagatgattgtggcaatgaaagcgcaagcaatgaaatatacagaatataccagagacacattgaaacacccacagctaaatggatcgcttgggttatagaaatgaaagaaaatataataaaaaagcgctttcgaaaatagccatgcaaatgatttgcaatgaaaaactatagcaaaagcggtgtgcgctgtggaaaacgcgttgacaagtgggtgagggggtgggggggtggatgggggtgggtgggcgactaactgtgcgttttgggtgtgtttgtgtgggtaggaaaagcgccgggaaaatccgacgggccgtgtgcaatattgtttatatccgaatatatttgtattttattttttcccccgctcttctccacgcgtacagaaaaagaacgagggaccaagaggcttttctattttattttcatatttatcatatcaacaaaagtcacggacacgccttgtccccccgccctctgcccccttcaccgaccaccctcgcagttggcagaaaattgaaaatgatattaaataattaacaggcccgaccgagtatactttacttttcaacttttcgcatgcacgcctgccattcgtcaatgacattgaattgcaatttactcgaagtctaaagaatccattcaaccccgccccgcacgaatgtctgctaatttgactgcaatggccatcgaatcgattgccaacaaaatgaaagaagtgtgcaaaaatatttttcacttagtaattaattaataattaatgcaatccgaatgcctcggcgacaaactgacaattcgcggcattccctgccgacatcttgcaatttcaaggcatttcaagggtcaaatctcagatggggatattttctaaacatttagaaaatgttagaaaacatttgaaaagaatcgctactaactgtcacattaagtatgggaataaagcaataaattgctttgagttaagccacaagaatttagatgctatctagctattgtataatagtaactattcaagtggtatatcaacagagaaatataggaataagtagcattcatttgcctttactgacatttttcagttactttccaaagatcgatgcatttcattaacgaactaagtcttgacccaaattcattcgtatgaaagaaaggagcagacgcaccgcaaaatatttaactagatcataaaaaacaaaacgaaaaagtggcgtaaaaaggccaaataaatgcgaacgacatctgctgaaatacatcatccgtataggcgtttcgttcggagatgtcagaaagttctaaaaacaaatgtcggacatatgaaggaaggcgaatggccacatcgccataaaagaaaagcaggctaatccaatccaatccaattgaacggaaacaatattttcttgcttgtatatcctgagaagatgtgcagtgcatgaaagcatgaaaaaataccttttttgtttactcgattgccacccaaaaattgattgatgccctaatgaggcaccgatatagaatataaaataaacgtggccatgtgtaaatgctaatctggggaaaaacttaaacttaaaatgtcttggcgccgtgtgcaataaatcgtgtgacagtccctcgccatcataatcagacttcattagcccaatcaatttatgtggcccattaaagtatgccccgaaatatccaccttcgcattgcgttggcagatgtcaaagtcaagatctttctccgctgctcttcgacttctcgaagggatcgtcctcaatggatagcatggggatctatggatcggcggtgtcattagattcgctcggttgccttgcgtcagacgatttgcgatgacaaatagattcattttatggtctttattacaattcacaaccaaaccgagcatttggggcgtctcttgctaaaaatagcaaaatacatagtagaaaatcagaaggatcgggtgggtggtggcacgggggtcgaaagacttcgaccatatgcaatttgtttaggcgcttttatagtatccctacgacaggtgaagacagtgaaaacatttgcgctctttacaaaatacttttcataaaaatctacattcaaagaggcttggtatgcgaatgttaataaacactatagattggaattataatttttttggaaactgttttcatttttaattgaaagaataccgctttgaaaacaattgacggtgatgcctagtcaaatataaaaatctttctgccaatacacaattataaaccaataataaaatatttacatatcgatattacaaaaccttccaaatagtcttaaaaacaaagaagttaaaggtttgaatagactgaaaatcgagcatcttaacccagtgcccaagagatatactatatttattaaaaattatttatcagaaggaagatccctatagagtataaagtatattcttgattatgatcactagctaagacgatctagctgtccgtccgtatgaactttaagatcttcggaactataagagctggaaaactgagatacagactctatcacactctatcactgttactgttggtgtttctttagcttatttatctacgttccaaagatgtttcaaatggcgttatctgcttgctaaagcaatcggtttgctgcttgcagatatttatataatagttgaggaatactttctttcttacttttaaaatataatattgctaatgctttggaaaacaaaaagcacaatccattttaatttttttaatttaagctgtagaagcgatatgttttacagattaacaatgtatagtcatatcataaaccaagttgaattatttcattgtaataactcaatacagcaagtatagcatatttctgtgttttgtaaaataaatatatagcatatattcgttcaaattttagtgcaatatttgttcattcattgaatacgagatatatcctcgtagatcatgtcatacagaagatattgtgggatatatatcacatatctttcatatgagaaattgtggaggaattacagtttatacagaattttatcaatatctaagctaacagttctcaatgatgaaaaggacttaccttgaagtcggaaagtgaagccatcagatcatccagttccttggtggcctgcgacgtataggcctgatgcacctgttgtcccggaacagcatgattgggcgtataagaatccttctgctgcacaatttgctcctcgacagtgccaactgaaatgggacaaacattttagttcacaatcaaataattgagttagctggtatttacatacctggtccatccggacccgtcaacttctccgtcttcgtttcccgaacggtgatggtgacatgtcgtcccggcgtcggagatttatgcgcagatctaaataaatataaggtcagagttaataccttcataatcaattatttctcttttgagctgcttacccgttaggaacagcatagatgtgagcattgtccagttctttcagcaggctgtccactgaaggacgctcctccacggtggcataactattcatcgtattgtatttcgagactggagtactgtagttgaccggtacatcgatttctaaggagtcaataaaaacccaattaatgccatacagaaacattttgaacaaagcgaattcgattaacaagtcgttactaaagcaaaacaaagtatgttcgtttctgtgttcataattctgtttaaaaggtagtataggattttgtggctaattaaagagtgcaataaattactcaagctaatgtacaaaccaattttacaaagaaaccggtagctatgtacatatatacagacagactaattaactttttaaacttagctcaactgaatagttatataaaattaaaatgcagtaatccgatcactatatccccaataagattggatttttccttactctgcagatcctgcagcaaggagtccagttctgagagtcctgtgcttgcacccgccgcctgacgtggcaacgatccctggttagcgtatcccggagtcgttgaggagccattaaaatcatgtccagccgttggggagcgtgtctctacgctgtagtgctcttgatactacaagaaagtggaaatattcgaatcagtattgatttcaagcaaactattatagtatacactcaccacctggggctgggctttgcccctgagacttccataacctggagtgttgtccacaaactgctgttgctgcagagcttgatgtttgggctggacagttccatattgcggctgaggttgctgcggctggcctggcacactgttttgcaggtcggctaatagagcatctaaaacgaaaaaagattgaaacattaatatatatcacgaacgaacttctaataggtttcgctattccaccaatgagtctatcttttgttctgtttttaagatatgacgctttctttttgataacacggcacttaagtcttaaatcgttttattttgtgactcttgtttgtattacacattaaattttgagaaaccaatacccagattatcgtagtccccatagttggccatggcacttcttcttccggtatttcgcaggtattttctatttaaattccaaacttgaagcacctgtcactgcacctctgacgcatagcccgttgttaactaaacggagatccattcgttgccttcgtttgctggcacatatctccagcaaaagtttctgataacattttgtttgttttcttttgtcttgagcgcgatatcgcgcaatacctataattgctatatgggtcttctttctggtttgtgtctagggtaaattgaaattgagcaaaggaaaaagcttgttttgagtttaaagaaagacccatttttatccactttttacgtataataggggtggaaaccttttaggaccaactgttacggcacagtcctaattagattctgtgtgcttaatttcgaagtccatgcagtgaatttatatacttttgtaggttcgaaaacacttcattctacatgtcatgtcaggagactttattaagttatatcaaaacattttgataattttttgaagatcgacaatgactctgattttgtaacacctgcccaatgagcagctgtgcttgaacttgacccgtggcccccgtcgaattacacttttcagcgactacattattaaccctttatcgcccacactccatttactcccattgaacaaacttacccagacgtcgctcgaactcgcccactttgaaacagtcgctgaggggcgaactgtggaacgacgatgatatcagttttgaagacatttcacgcactaaatttggccagaatcgatggaatcgaaatgtattgcttgattgtcactcgtatgccgatatgcaaaattgtcggtttgtctggaccactataaacggtagtttagtgaaatatttttaccggcacagcagcaacaacaacagccaaaccgaaagttcagttgccaactgaccaaattaaagcaccgaaaactcaatcaattcggggccaaacaaagtcaggccaaaagacacccacactgcagcccaaaactagcgaaacaccgagtatgagggtgattatatacatacatatatatatatatatatatctttatatacaaatatatcacatacatagttggagagcgggggacctacatctacacacaatttttgattcagtttaggtgggacgaacttgtcgaacgggctaaaaatcgcaccaagtcaagaaatatcgcatctacacgatgccataatatcttttagtgtgttagtatttctttaatgtaccgtcccatgaaaacatatttgatcaaaataatgttgtttgcattcctctcgcctctaatttagccaagatcaatagcggggaagggaagtagctaagtaaacataataatagcgcatgaaaaatcgagaaaaacgtcaataatttgtagatgggatacatccacagagaaaaataatagcattaattacaacagcccttccataatttgtagccacatttagccaaacaaataactgttttaatataattggttatgtttaaaatatactaaaaagggataaaattaaaatcaagataaacgaacttgggaatagttctaatactatcataaaatctatcttctaagcgtaaaacaaagaataagaatttgattagtataaaaacatggagtgcagatcttgaaatggtttatttatgtatatacctagtaacaaatgatttggaagttgtttttttttttgttgttcgtgcagaaagcattagattgagggtgcttaagctgtctttgaggcgtgccgaaagtatctgttggatgtctcgtatcatccgctgtcatacaatcgcacttaacgccatttacttgacccacccacagcaacaaaaacaagccaaaaagaacactaaaacagcaggaagacatgacagcaggcgattaagctataaggccaccgcaataaatcaaacaaatttcgaacatttcgcccgagagttcaaaagtcggggggaagagtcggaaaaggcacacctgtaactgggccaatgccaaaagctagaacaagaaaatcgagtgaaaactcagccacagtctgcctgcctaccgctcaaattatgagcttttcttttctatatatgtatgtatgaacaatatatgaaaaggaaaataaggtgtgacgcgattcgttcgttttggcaagcgaattcataacacgttcgtatgaaagtgatcaagaggcgatatgctcgaatttatattcgaaaacatttgcattattgggctagaatcagccaaattatttcgcaatatctttaaaaatagtcccaaaccgagagatcgaacatgtggttgacgagcaaatcactcgaggcacaggcaccaggcaccaggcaccatatgtgggcctccgtactcccacttccatggctttcccgctcggatcagacggcggggatcatctatatataggacagggcagggttatcagaacgtcacgctccactgggtcaacgggtaaggagagccgacaaagaagacgaatgggattttcaaatttatggtgcccgaaacggaaatgattctttttaaatcgcatgaagacacaaacaaatatttaagatcgctgatttatggtgataacactgtgatgcactttaggcaagaaaatattttgaattactcaataatctaaatgaaaataaaagccaatattgcaatcaattgcaagaactggttaaatgaatatgagaacataaatatttgttggaaaaaatcctttttaaaagttttgttctatttcttaaaactcaaaattaagttaattttatctatacagaaacatttgaaatatttgtattaattgaaacagcttgtgactatttaagaatcgagtgtttggtagcactgttcgctttaattagttgcctttatcgagagggcactgtagtgttccctctgggtgccagaaaatatgcgcccaataagccacttgattgcttcacgaggagatatttcatcaagagcacatttcacacattagtttcgaggaatgcaattggcagaagctactggcttgattaaaatgcaattaaaatcaattaacaagcagtagttgactgcaagaggtttttatagaggagttgcactcaaactcggttttcagttaagtgggaggggaggggcaggaaggcagctgcacatgacagctgttgaaattttgcaattgacaacttgatgcagcaaaggagcgagcgggagagaagatgcagagagcgtgggtgagagaggcggataaatcacgcgaattcgaattgttgctgttgttgcgctccgccgtctgctgttgttgttttattgttgacattgttacatatccacggatgtatgtgtgtttagttttgtttagctcgttttgggagcactttcgattttcattttggcggcttgtttgcggtttttggtttgttgttgtattgctgatattgctgatcgattgcggctgccttaattaaattcccgcacacacagacacacacacacccgcacatccgcgcaaagacttcacacatacgaggcgcagcagcagcagcagcacacaaaatattttcgctcggcaaaatcttaaaatcaactgaacaagaagatcgacaacaaattccgtcgaagctgaagctgcgcgcaagcggtggaaaaaagcttttgcgacgaagatttgagattttctctcttgagtgtttttctttgagttgtgttctctcaaaagagagggaaagagttaaagaactgcattatttgaacagctgattcttgattgttgtaatagaatcacataaaaaacatgaagctgcctttcaattataattatattacataatttaatgtttttggatatgtaaaaacattaaatcaatacaaattattaaaaaatatttctaaaaatattaaaataccacagcacttcttgaaaagggatctgatttacacattgtaataaaatcccaaatgtagaaacattaaatcaataaaaatatacaagatctaccatcaaacgcaacaacaaatataaagtttaaaagatttgtttttgttttttcaatcttcttttttccacaagtgcacattgaagtgcaaaatgccagtttctttctttactaatttaaaatttaataagtataattcactaatttggtgaactcaataaaggttctacagttagacgagtccggagtcagaagcgtatattcaaatgcagcttacatacaatggagtctgtgccccaaacatactttgaaaataatagattatatcattcaatttgaattgtaatcatacctttgttgataaaggtaattataatcggatcgtcgaatgaacctatatgcaccatactattaatatcttcttaaaagttaaaaaaatgtcttggaatttctgaaaatatatttttccaatcacaggtgttgagtaattattgccgtttgttgttgttgttgcgtgggttagtgtgtcacacaagtggtggcgccacctggcgtctgcctttcgctcttgcctttttactcattttccgagtgttctgccggtttttttgtttcaccaaatgaatgaatcacttgactttgaaaagaaaactaaaattagtatttgtataacaacagcaacacatagtcacaaattgttatagcttttgttcagaattaagtgttttgttttattctcttttatttggttcgctttgatggcgatgcttttgcacaattgattgttttggttcaaagatatgaaaaggttaacaatataagagtttcccttttggtaaaatcaataatattaaaaataaaaattaggtggccccgacctgtgacaactcaaaggcataaaaacgggttttgctttatcgataagctctcaacagcgttgttatttgtttttgttatttgaccaacccagcttcctcggtgtccgtaaggcccactttataagataaactgccaatgtaatcaatcaatccgatctcagatgccctgaggttacagccacggcaattagaatatcttgcgtaatgccaacctaaacaggtgtatactgtcatattgaacactacgagacgaaactgtaattccaaattatatgggatcaaagaatacgaatatcaccgtagaagttgataataaatactatagtttacattaacttacatttaatacgaaacataataaaatagctattcgaaaataagctaaaataaatggtaaattgaataaattgatctttgtatcttttcttccatatgtgccaccatatcattgcgaaacgcacgttatcctcacggattgtgcttgtatctgttgccaaagtgtcgtgtctggcaataaatagaacacgagtcgattggaaaccactgacgcccaccgacgctacttggatcggctgccgactcaatgggaacaatgatctaatgatctaatgatccaatgatccaatgaatgaaacgcgtagtaaggtcagcgactaccagtctacagattgtagaatgaaacccacgccgcaaaactcgaaagactgaggcttaccgattttcatgtcaatcgactctgactgtttgcactcagctcacttgctaaacaaatccgatgaagaccgcacaacgttgcaattcaaactgaatggggaatattcaaatcgtgtgctgacaactggagaatacgatgcgagtgcaatagaaggtgttagtctgggtgcaattaacattactccagccagatgtaaacagacatgctaagtaagtacactgcccgaaaatatggggaggtatttcggcgtgcattatgaataaaaaatagaagctcatacggtgttcatagatcatcatagatttattaagcaattacgtgctaaactttagactttgcaagttacaattttcttggtaacctaagacaacaaatttttctgagtgcataaatatgtagacagtgcgaggggcaatactctcggaaatgtaaaagttagcaataaaaagctaaatttgtttaccttacatgctatgcacttgtatacactgtctacttgattacgtcatctgctgggtgtttgaagagcaattgcttacatttactttaatggcgatttcctatgatgcctcatgttttgaaatgctcgggtattcgatgaaatgttccatttttggagttggaacatttttattgatcaatgccgagaagacaacttctcctaaaagtactcgtttagtttgttaatgagatcccaaaagtatgctacactttcacaacgtgactgtttacgattgattgatcaaattataagcatggatttactttataattagtcagatgtcttaaaagtactattacgaagaagggaattataatttggtatatggtaacacgttctgtatttatttcaatgctgaacaagaacacagcaaacactcttgtgctgaaattgtacgccagccttttcagtgtcaacggaaaacaaatagagcaagcggaataaaatgaatgcctccaaaaattagcaattttaatcagaattctaggggatatcaagtcccataaagcccagagcctctgtgcgaaaaccagagaccactgaaatgctgaagct

SEQ ID NO: 28118 - DNA, 1593 bp, DROSOPHILA
atttgtttagcaagtgagctgagtgcaaacagtcagagtcgattgacatgaaaatcgatgctctattagccgacctgcaaaacagtgtgccaggccagccgcagcaacctcagccgcaatatggaactgtccagcccaaacatcaagctctgcagcaacagcagtttgtggacaacactccaggttatggaagtctcaggggcaaagcccagccccaggtgtatcaagagcactacagcgtagagacacgctccccaacggctggacatgattttaatggctcctcaacgactccgggatacgctaaccagggatcgttgccacgtcaggcggcgggtgcaagcacaggactctcagaactggactccttgctgcaggatctgcagaaaatcgatgtaccggtcaactacagtactccagtctcgaaatacaatacgatgaatagttatgccaccgtggaggagcgtccttcagtggacagcctgctgaaagaactggacaatgctcacatctatgctgttcctaacggatctgcgcataaatctccgacgccgggacgacatgtcaccatcaccgttcgggaaacgaagacggagaagttgacgggtccggatggacttggcactgtcgaggagcaaattgtgcagcagaaggattcttatacgcccaatcatgctgttccgggacaacaggtgcatcaggcctatacgtcgcaggccaccaaggaactggatgatctgatggcttcactttccgacttcaaggttagcaacggaacaaacggcatcggaaacggcagtcatccgcaacagcactcgtcgacagtgcagcaccagacggtaaccgactacgccagaccaaacaagggtagccagcaggcacatctcacccagacgatcgaggagacgaccatcgtcgaggacagtcgcgaggatcagttggattctatgctaggcaatctacaggccaatatgagtcgccaaggagtcaataccgtgcagaagggctgctgcaatgcctgcgagaagcccattgtgggccaggtgatcacagccctgggcaagacatggcatccggagcacttcacgtgcaaccactgcagccaggagttgggcacccgcaatttcttcgagcgcgacggcttcccgtactgcgagccggactaccacaatctgttcagcccgcgctgcgcctactgcaacggcgccattctggacaagtgcgtaacggcgctggacaagacctggcacacggagcacttcttctgcgcccagtgcggccagcagttcggcgaggagggattccatgagcgtgacggcaagccgtactgtcgcaacgactacttcgagatgtttgccccgaagtgcaatggctgcaaccgcgccattatggagaactacatctcggcgctgaactcgcagtggcatccggattgcttcgtctgcagggattgcaagaaggccgttcgcggcaagtccttctacgccatggagggcaagcccgtctgtccacagtgcgtgggcgtcgacgaggaggagtaggagagattcacaagcaacagcatcagcaaacttgttgctgaagttcagcagc

SEQ ID NO: 28119 - protein, 497 aa, DROSOPHILA
MKIDALLADLQNSVPGQPQQPQPQYGTVQPKHQALQQQQFVDNTPGYGSLRGKAQPQVYQEHYSVETRSPTAGHDFNGSSTTPGYANQGSLPRQAAGASTGLSELDSLLQDLQKIDVPVNYSTPVSKYNTMNSYATVEERPSVDSLLKELDNAHIYAVPNGSAHKSPTPGRHVTITVRETKTEKLTGPDGLGTVEEQIVQQKDSYTPNHAVPGQQVHQAYTSQATKELDDLMASLSDFKVSNGTNGIGNGSHPQQHSSTVQHQTVTDYARPNKGSQQAHLTQTIEETTIVEDSREDQLDSMLGNLQANMSRQGVNTVQKGCCNACEKPIVGQVITALGKTWHPEHFTCNHCSQELGTRNFFERDGFPYCEPDYHNLFSPRCAYCNGAILDKCVTALDKTWHTEHFFCAQCGQQFGEEGFHERDGKPYCRNDYFEMFAPKCNGCNRAIMENYISALNSQWHPDCFVCRDCKKAVRGKSFYAMEGKPVCPQCVGVDEEE

SEQ ID NO: 28120 - DNA, 4145 bp, DROSOPHILA
acatctttttaatatcgttgctttaaaaaaaatcaattgaatttaaaacggaaatgaaaataagaattcagcaaaagatttcgaggtaactaacaacaacttcataaattgctgggtcatatgaaaaaatatcacaaaggagaatctcctttcaaaacactgtgatacctctgtcaaacatttcgtgtacgttttttgaaaataaattcgctgaaccgctaaaaaaagtgatggtatgtttcggtatattgaataccgcttgcacattttttggcgttccgtctgcgttcacactgacctccgtaaggttatcggcataattttgtaaattttcgactttgccgtttttcgactcgattcgttagtcaaaattccgaaagacgcgccgccgttagatccacttcatcaacgcgcgttgccacaacaggacttggattaggattccccaggcagaccaacgataaaggacgaatatgctgcgctcccttgcaacaacacgaaacgaacttggggcccttcgctccgtgctcctgcgatcgaataacgccacctatgtccgccgatcgacgggaaatgtggttgtgcgcgccctcagcagccagctgatcaactcccggaaactccagagcatcaggtaaaaatctcccaatttccccaattctccccgctttcgttgaggttagaaatggttgtgtaatattgcaaaatgcgtatactgcagcgggattatgtgggacctgtggggggcgatgattgacagtcccgtgtccaactatttagcatatatgtcgtattccccaaaaacactctcacacatacccatgcgatttgcgtgtgttgtgcgtgctccactgctgatttggtttatggccaaggtcgaatacacgctctcctatatcgcatgatgcgtgatagtgtttcggctggctgataagctagaaaattccgtctaatgatttaatgggtcactctttttgggttccattgtttacatctgacgagtgggcgattgaacgcctaaatgtgtagatagtacaggagtgtgggtacgtaaacaacaacaaactaacagctgatcgagcgtccataaattaacccatccaaaatgctttcattaacatggtcattttgtaattataacaggtcatacaaaatgtacaccgttacgaatcagaaggaaaaatagtttccaaggattctgtatacccatattgcaagtaatacacctatactatttattcaatattatgttttctaatagtggatacaacccaatgcaaccaactttaataaactagttttgtttgaatatcgcgcaggtcgaaacttaacactagccagtcaccggtcacatggagctacaacttcgcccgtgcctatgccaaccttccggaacacatcagggtgccactgcccgcactttccccgactatggagcgcggatcgattgtcagctgggagaagaaggagggcgataagctcaacgaaggtacgtgtgatagttaccaaaatatccgagtttcaggatcaaatttatgacaccctgattgcaggtgacttgctgtgcgagattgagacggataaggccaccatgggctttgagacgcccgaggagggctttctggctaagattctcatccagggcggcaccaaggacgttcccgttggccagctgctgtgcattatcgtgccggaccaaggcagcgtagctgctttcgcgaacttcaaggacgacggtgccgccgcagcaccagctgctccggcagcagctccagctccagcaccggcagcagcagcagctccgccaccaccaccaccacccgccgcagctccagcagccgctgcgcctccaccagctcccgccgctgctccagctgcagcaggtacgggccgtgtatatgccagtcccatggccaagcgactagccgaggcacaacagctgcgtctacaaggttgtttaatcctaactaatgcctctcttacacacatcctgttccatttcgcaatgcatgcatcacctgactaacatccatcataatcattcgttacagataacaaaacctcccatatacactatccaaccgtacagcttttcatatagcgccctttgtccaattgttccgttactaatccgcggcttttgtgtgcaggcaagggcagtggagtccatggctcaattaaatctggtgatcttgcaggccagaaagcagcagccaagccagctgctgcggcacctgccaaggcccccagggcagctggagcgcgctacgaggacattccggtgaccaacatgcgcgcagtgattgccaaacgtctgctggagtccaagacacaactgcctcactactacgtcaccgtgcaatgccaagtggataaggtgggttatcacgaacagatatacttcttaattcaaatttaatttaaatgaaatttttacagctgctgaagttccgcgcgaaggtgaacaagaagtacgagaagcagggtgcccgcgtctctgtaaacgacttcattatcaaggccgtggccattgccagtcttaaggttcccgaagcgaactccgcctggatggacacagtaattcgcaagtacgacgacgtcgatgtttcggttgctgtctccacagacaagggtctgattaccccgattgttttcaatgccgaccgcaagggtgtcctggagatctctaaggatgtcaaggcgctggcagccaaggcgcgcgacaacaaacttcagccccacgaattccagggtggcaccatctcggtttctaatctgggcatgttcggtatgggaaatacagttatataaagcctggtccaaatttggtaattaatatgttatcctaccacaggtgtgaaccagtttgccgctgtcatcaaccctcctcaatcgtgcatccttgccattggcaccacaacgaaacagttggttgctgatcccgacagtctcaaggggtaagtttcaaataaggagaatagtacactaactaatataatctttttttctatgcagcttcaaggaggtcaacatgctgacggtcaccctgagtgctgatcatcgtgttgtggatggtgctgttgctgccaggtggctgcagcacttccgcgactacatggaggatccttccaatatggtattgtaagcggacagaaacgacccatcacatttagagactccaacgaaaacaaaaaaaggataacaaatttagcatcctctctttaagcgaggagtttcaatcgacatgcaatatgtggatatgtggtttctaatcggtgtcacatatgtaaagttttaaattggatttaactcatcggtcgcctatatatatatatatatagaaattaaattgtgtaattattgatgtagttattgatggtcaccgtcgttgccatgattgtagaagagtacacaaaatacttgaatgatattcgaattaacccactcaccgagctgtaaatttccgtttgatatgcaaaacgttttttatgctttgttcgcatatgttgatcatgatcgagtatgaaaatggaagtagttgaaagtccaaagacgcgttaaataaacccaaaacactcacatgaactagccaattcttaaataaaattgacttttattttaattatagtgtgtttcagcctaaattcaaaccacgatgcctccaaatttaaaacattatctgatgggtgttgcatatatcaacttttaagctttctagacagtagctagagtaacaaaactctattcagctcaaatttaatgctctcaacacccagtcgaaaaataatatacattgcttttccgtggtttatagtattatgtaactagtttattgccaaaatgttacgaactaagcaaacacatattgaaagtatttacaagcataaagttaagctaatgtcaatgtaggatgcgaatgtcagtgtagtattgaaatggggccaatcaccactgggcagggccaagctggctccactcctccacatactgggcctgctgctccagagcggggaaccactcgacgccaccgtagtcgatcgcgggcagagtacccttgtagttggcgggcaggacggaggggtcgaggaacttctgcaacgacttcatgtcactgccgtggaagtgcatctgttggaagaaaatta

SEQ ID NO: 28121 - DNA, 1502 bp, DROSOPHILA
agtgggcgattgaacgcctaaatgtgtagatagtacaggagtgtggggtcatacaaaatgtacaccgttacgaatcagaaggaaaaatagtttccaaggattctgtatacccatattgcaagtagtcgaaacttaacactagccagtcaccggtcacatggagctacaacttcgcccgtgcctatgccaaccttccggaacacatcagggtgccactgcccgcactttccccgactatggagcgcggatcgattgtcagctgggagaagaaggagggcgataagctcaacgaaggtgacttgctgtgcgagattgagacggataaggccaccatgggctttgagacgcccgaggagggctttctggctaagattctcatccagggcggcaccaaggacgttcccgttggccagctgctgtgcattatcgtgccggaccaaggcagcgtagctgctttcgcgaacttcaaggacgacggtgccgccgcagcaccagctgctccggcagcagctccagctccagcaccggcagcagcagcagctccgccaccaccaccaccacccgccgcagctccagcagccgctgcgcctccaccagctcccgccgctgctccagctgcagcaggtacgggccgtgtatatgccagtcccatggccaagcgactagccgaggcacaacagctgcgtctacaaggcaagggcagtggagtccatggctcaattaaatctggtgatcttgcaggccagaaagcagcagccaagccagctgctgcggcacctgccaaggcccccagggcagctggagcgcgctacgaggacattccggtgaccaacatgcgcgcagtgattgccaaacgtctgctggagtccaagacacaactgcctcactactacgtcaccgtgcaatgccaagtggataagctgctgaagttccgcgcgaaggtgaacaagaagtacgagaagcagggtgcccgcgtctctgtaaacgacttcattatcaaggccgtggccattgccagtcttaaggttcccgaagcgaactccgcctggatggacacagtaattcgcaagtacgacgacgtcgatgtttcggttgctgtctccacagacaagggtctgattaccccgattgttttcaatgccgaccgcaagggtgtcctggagatctctaaggatgtcaaggcgctggcagccaaggcgcgcgacaacaaacttcagccccacgaattccagggtggcaccatctcggtttctaatctgggcatgttcggtgtgaaccagtttgccgctgtcatcaaccctcctcaatcgtgcatccttgccattggcaccacaacgaaacagttggttgctgatcccgacagtctcaagggcttcaaggaggtcaacatgctgacggtcaccctgagtgctgatcatcgtgttgtggatggtgctgttgctgccaggtggctgcagcacttccgcgactacatggaggatccttccaatatggtattgtaa

SEQ ID NO: 28122 - protein, 421 aa, DROSOPHILA
MERGSIVSWEKKEGDKLNEGDLLCEIETDKATMGFETPEEGFLAKILIQGGTKDVPVGQLLCIIVPDQGSVAAFANFKDDGAAAAPAAPAAAPAPAPAAAAAPPPPPPPAAAPAAAAPPPAPAAAPAAAGTGRVYASPMAKRLAEAQQLRLQGKGSGVHGSIKSGDLAGQKAAAKPAAAAPAKAPRAAGARYEDIPVTNMRAVIAKRLLESKTQLPHYYVTVQCQVDKLLKFRAKVNKKYEKQGARVSVNDFIIKAVAIASLKVPEANSAWMDTVIRKYDDVDVSVAVSTDKGLITPIVFNADRKGVLEISKDVKALAAKARDNKLQPHEFQGGTISVSNLGMFGVNQFAAVINPPQSCILAIGTTTKQLVADPDSLKGFKEVNMLTVTLSADHRVVDGAVAARWLQHFRDYMEDPSNMVL

SEQ ID NO: 28123 - DNA, 2729 bp, DROSOPHILA
tgtatggctttgtttatcaatttttaaaatagttttagaggcgaaacgttaagaatcagagaacaggcaaatcagcttggttgttgcaaaaacaaaatcgcaacaatatggcaataaacgaatttcgcttttaacaatacactgaacctacgccgatttgttgccaaaaaattcccatccatacaaacatcatgcaattttggtggcatacagatacccaaggtctagccaagagttccatggataaaatgggcgtagcagggggggaggcttaaattggggtatggcgcctcctaattgggaatggggggcggtccaaaaatgtccctaggtgttggccacatgggagccggacgaacgcatctatttgtattttgttacaggacatgctcgcaatgggcatatcctttactcgcccaaagaggctggctattgggctgttggacatcagacagagacttttattgaaaatgttcaatggccaaaaattcataactgcagaaagtacacggagagaaatttagacaatttttacattattatcatgtccactattgtataactttagatgaaataattgcatgattaaaagtgcaaaaaatttcaaagtgaaacagaatagaatagaatattatggaaaataaaatgaagtggctctttttcagtgcattgcatttggattttcatttcgaaatcaaaactgccgaatcctgtccctcgggcaggaaactaggctccgtctgctttcatggcaaaggaaattattctggtttttgcgaaatgttctgtaatactaaatgcggtgctaattcagctgcaatctgcaatctgctgcactgcttcagttttagtctttttgtctcccatatccggcacttggttagtgacgacggcatatcactaaatcgcttcgattgccaactgggaatcttatcaattggccggccaagtggccgttggcgtttgtcaaaggggctccgcaaagtcagtcagtgtcaaaatgtcgtcgtgggttgtctccaccaccgagctgcgcgattgtggtaccaaaggctccaaagcctcatccacctcgtcgcggcacacgcgtctgatcctgctggtgtggcagaatctcgccgagaagtgccacaaattcggaagttttctccggcgtgaaacgaataaaccgctgcccaaagaactgaggcgatcgttacgtcttaacaaatcggcccgccggaaaggctatcggagttgcgagagcgaagcagaaaaacggtacgccttatgaacatatagtataatcaagtggtctagataagcccattgttattgtttatgccaaggtttgccaacaccagctagattgggccttctaagctgaaacatattcaatttaagttttttaattggaaatgccagtttctttagcaatgaattaggaaataaaactctagcatatgaaccatttttataaattaaacgtttcgatttcagtttgaaatgagaatgtgttatttaagcagacaatttaaacgaatcaccatgagcctacaaaaagttaatgcaaactgttagtgctttaatttagatacaatgtatgagataatctaagtacttaacgtgatataagcaaaattgttgaaaattttccactttcaggctgatgacagagcgtttaaacgaacccatcaacatctccattcgcatgggacctgcctatgactataggccatcgaatttctgatcgttcgggattattatataaggataaagttcttcgaatttcttagctctgctaactgctaacttagcttaagatgtaatgttactgctaagttgccaatgtaaactgttattaaaagtttttacgcagccttacacgaatgtcgtaagctctgcgacagctgatgaaatcaaagagctttacaagcaacgaaagctctggttcgctcttaacgacacacatgagttctcttaagctctgctcttactacgcccactcaaaagtttattgccacaacaagtggacgtgactttgtgcatcacaaacagagtatattagcttttttaaaaagtataagttacatgtaattataaaaattggttttgctaagcactacaaacttaccgcattaatttttgcatataatgcatataataaaaaaaaaaacaaaataaacattttaaaacacaaatatatgttatgtttgattctattatatttgaacagatttttatgcacatattttttattttaaattaggtctttattttagtgttagaaaagggcatacggtcgtcggtgcaggattgcaaacaactctcatttcagttggcttttactttcttccgccgtccaccaatactaatactaattcgcgccaactgcaatctcgctctctctcttaccttcccaatttctcttctcctacgtcacagaaagcgttatcttccaagttttttttcgtggtgcccgcttagtgtggaaaacgtgttcgacgcggaaatgacattgatagtgaaattttaaccaaattttcggcatctgttttttttccaaattttcgacaaaccaaccaaaccatttacgaaagtctcaaaattcgatttgatgaaagtgaactttgatttacggcacgtacaaaatagttttcatcaagttaaattaatttaaacaaacggctgagtgcaaaatgaagctaatttccacagttgtttacctgctggtggcattctacaaattc

SEQ ID NO: 28124 - DNA, 345 bp, DROSOPHILA
atgtcgtcgtgggttgtctccaccaccgagctgcgcgattgtggtaccaaaggctccaaagcctcatccacctcgtcgcggcacacgcgtctgatcctgctggtgtggcagaatctcgccgagaagtgccacaaattcggaagttttctccggcgtgaaacgaataaaccgctgcccaaagaactgaggcgatcgttacgtcttaacaaatcggcccgccggaaaggctatcggagttgcgagagcgaagcagaaaaacggctgatgacagagcgtttaaacgaacccatcaacatctccattcgcatgggacctgcctatgactataggccatcgaatttctga

SEQ ID NO: 28125 - protein, 114 aa, DROSOPHILA
MSSWVVSTTELRDCGTKGSKASSTSSRHTRLILLVWQNLAEKCHKFGSFLRRETNKPLPKELRRSLRLNKSARRKGYRSCESEAEKRLMTERLNEPINISIRMGPAYDYRPSNF

SEQ ID NO: 28126 - DNA, 48718 bp, DROSOPHILA
actgctgaggatgacgtactaccgacgactttggttggaagcactgtgtgagttggggctaccacaacaaaatttcaaatgagagagggaaaactgaagccggtattgtataatataccatctctttttgggcttagctttatatgttttgtaagccttggagtaagagatcacaattcgagcggaagtattcaattagcttattaaagcatttaaattacttgggcttttagggcaattatttaacaggtaaaagtaatggtcaagttgaagtgtatacatttattccctttatcaaactttataccttttagtaagtagtttagaactagatgatcttaaagatacgcatttatttggaaggattaaaataccttaattaactcatttccgattgtaggcctttggttgaaagtgggcatctctataaatgacatatgtgtctccattaacaattatccagtttgtaagggtatttcaagcatcgctgcccttgtgttgttgttgttgctgccggcgtatgtgtgtgtgtgtgtgtgcgttagcgtgggcgtcgctgccagcgtcggcgtccgcgttgccatggcagcagcgtcaaacacacaggtgttggttgcaaatacgtcatcaaagagttaccgcgcagcggtggcagaaacaggtggaatggcagcagaggttgtggtcgaggcagtggagtgttgccaccaacacacgtacacacgcacagctgtcagcacgatcgcgattccatatccatatattccatattccactcgtgacgccgacgttgacgttaacgtcaacgacaacgccaacgcaggcagcgatcgccatgtgccaattccactttgtttcagcttcgcttctattctggcctgtaaacaaaaaaagcgaagcagcgccgcaacggcgacgtcgacgccgacagaagcgtcaacacctggccaaagccacactttaagcgttttaacttggcccgatcgcttttagttgttgtcgagacgccgccgcacacatttcacgatacctctccataaatatttgcaaaaattgtatagaaataaataaaacgcatgcgttcctcgggaaccgcggaattacaaaactgaacgaaaacaacgggaacgctttttcgtaaacccggaaaatctttataaagtgtgtgtgtgaactagaaagatccaaaacccaaagccaaagtgatttcaatcaattaatgcgacttcgcatgatgtcagaatcttgcgttataatcgctcagcctctctgatttattaaatgccgccaatttcaattgatttcaatctcttgcaatttagttccatttcaattatttttttatgacaagtttattaccgaaatgcggggcacggtttgtttcaattcgttcgtttgtttgcaaacaaaatgccccgcgaacggagtcaagtagctgtaaaataatgacgtacaccccactgttgaactcgaagccacccccccctccaccaccacctaccccctttcccgtttccatctcgtttcggttttggtttcggtctcggatttttcgccgctgttccagttcgtagctttgaaaaaccattttttttgtgcgttgtttgtgtctcgtattttattttgcaattttcaacgctctcctcaagtggtttattgtttgtctcgttggttctgaggatggtttattaattttaatttatatgcccacaaatcgtctaaatctgaaaatgctagtgaagatcacccatatctaaattaacagcttgtttgcttttcttcctttctttaatgagctttaatttatgaatctcccatctgaaagcgctttcaaatgatttagtgtttgattcactgcattttatatgttttcttaattgtctccaaaaccggaattttgtacatttcttttaaattaataaaatgccaaattagttgtcatagccattagtcttccaccctgccaagcttaactactgaaggtatttcgaaattttgattagcttcagatgcattatccatttaatttataacctcgagctgcaataattttctgaattaacgctccttgtcgtcgagcaatgcaaattggcaggcaccattgaaaatcgcacatctccaaactttgaacagtagccaaaaagccaaaataggcaaagaccagattcagttttttttttgccgcctttcaaaagactcattgagaatgtcaagccattaacgcctcttagagacgcctccacagacactttttcgagctgttcgttcgctcgccgccccaggtatttttcttatttctctatcatttttgtttttagtcataatcacataaaaaacatcgcggatcgtttatagtgtgcttaaaacgctgcaattagcatttttggtggaatggttgtgatatgtgtgtgtttgtttgtttgtttgtttgtcacggtgctgcgcaggcgttaaacgcagccgcaacctccatttaaaaagtccgttctccattaccaatgcaaaacaaacatttgtcgtgcctttttatgctgggtgggcgatctttttggcctggccaactgttttattgatcttgagctatatagattaatctggaggtttccattagaagcagaggttgtaacaaggcggtgcgaatatgtttacaagctaaccagctgttagctgtgattataaagacccttaacaattcgttcacttcctgtttattttatttttattagtgtaacgccaaaaaagagtcactctctgctgcattgtttttatacaattttgtcacacttgcgaattatttgccccttcacctgaacaattactgttgtttgttttgattaatattgaacctaaatatttgtttaaaaattttgtagtaagcacagaacgtaagtggaatatgtgtaattctgctattttagatttgagtaatgtcttggaatcttgatattctgtatactatgtatttacccctcaacatatgcaagttcaacattaaaaaagaggaaatttattcaaactttttcctacacttcctatagtgcaaatatgccgtaaggccagcggtgaatatgcccatattccctgttccactaccatatcgttcctctccccattttcctatgcaaaataggcttgcgtgttccgaaactaatgaatctctgcccatgaatcagcggtgtacattaactttttgcggtacgtatgtgtgtatttttgcaaaaaaaaaaatacaacaaaaaatgtcggcagcaaaagaagcaacaaaatagcgccaagagcaagacagacagacagttgggataattatgtgtacgtacaacacaataaataattcgcaacaacaatggggttgcccttactcccctcggcatacccacccccctcgctccactttggctcggttcggttaaatttacttcacttcagttctcgatggggtttctgaaaaaaaactccagggcaatgccacatagaaccagacatccggtgctggtttggggatttgactttggctttaggtttggcttaattaaactgaaattgtaaggaccggcaaataattaaacttattttggcaatcacgtagaattacgaaaatcggcgcaaaagaaacgcggcaatacgaaacgatcttctaacgaaccttagaacgaaacgacacaaagtgaaacaaacgaaagcatcgataactgcgtaagcagttcgattataacgataacatgcactccagctcacaatcgacgctgaagcgcacacaacaactggtgcggcagacaaatggtggcaggggcgatgttctgagcagcggatccgaagtggttcactcctcccgaggaccggcaataaccaccaatatcgatgactcgaacttgcgctatcgtcatgagacaaaaagggagcgcactgtggaagcggtgattacggattatccaggtgtatcaccccttggtagcgttccccatgaacgaaccaactttgagcgcactgtgaccttccaggatcccacgggaaattcacgtcgcctctcggagactggagctttggtaccggccggtgcaattccaacgtcgtcgactcattaccaacaggtgacgcgaaataaacgcatctccacagaggtattgggctccagcgtggaaagcaccaagacatcgcaaagagcgccaaatggccatcgccgtgtaaccacgcacattgtccggaaagtgaccactttgagcagggcggaggagaatgctcagcctgccgaggatttgttgcctccggctaaaatgattcgcagctcggagttggagtatcgtcgcgccctgccgccggctatagagtcgtcgtccacgcagcgcagagaggtaaaaactgatcctttttttttttttttttttttttttttattattattatatacggcaggaaaatgaaatcttctaaagataccatctaatgtccttggatggcatgcacgattcataaccctcagctgagggcttatgcctacgtactaaacaaaaacctccgctctctctcctgtccttgtcaagctcaccggggctgccagtcaaggtatttcatcggtgagcaggatgtggtgccaagttgcacaccatcttcttttgcggtgcacagcagcgcctttttacgaccaactgagcgtaccagtcgtagagttcttgccccgccaacatacgggggtactccttatctatagttccgattggccatctcgtccttacggacacgcttcatcatggtgacgatgatcacgtgagccccatcccaaacgattttgtccgccatcatagcagcaaccaagcctctcgggctgagaggtgacccagcgagcgccacgagttgcgccctctcctcggcgaacctggagcagtgcagtaggatgtgctctgcggtttccactgcgtctgtgcaataaaggcactggggctgtatccacgtggcggaacctacataggtaccctcgaaaacagccattggtccgtgaggaactgggtcatgtgggtagtccaccgttttgtgctcgcaatcagcccactccgttagttgcggaatgagtttgtaagtccagcgtccccgttgtgactcttgccacctggtctgccatactcctcgaatccactctttgatctctaattgagtgtatccctcactcgcaaggtatttgccctttatgtccaggtcaatgggtgtaatgcctgacagagcgtgcgttgcgtcgtccgatatggttctaaagcctctgattagcctgagagccattgtccgtgatactgcgccgggcactatctagataggttttctttgtggaaacgcagctccagataggcgcagcataaagcagcgttgcctttgaaaccgccactaacagtctcctagccggcagtctgggtcctcccacgttgggcatgattctcgccaaggctgctgctgtcattgccgcttttttgctggcataccttgcgtgagccttgaacgagagccttcggtctattagaacaccaaggtatttcaacgtttctgctgaggcgatttcaactcctttgacttctacacgcatgcactcaacggactttctgctgctcagcaggactacttcggtcttatgcgcagctattttaagtccgactttctcgagccattctatggccgccgtgattgccacgttacttatgtcctggagctccggtattgtcttggcgaccgctgttatcgcaacgtcgtcggcgaagcagtgcagctccacacctctgggcttgctaatgctcagtattccatcatacataatgttccacaagatcggtcctagtaccgacccttggggaacgcctgcagagacttggtggcttcttggaccatcttctgttacgtaccataacacacggtccctgaagtagttgccaattacgcctcgtatgtagtcgggaacgcccaagttgcgcatagccccgaggataatgggccatctcgctgtattgaatgcgttcttgacgtctagcgtgatgatggcacagtacttcttactgccgcctaaccatcggttaccgtcgagtgctttcctggcagcgtctgttacggatttgagagcgtcgagcgtacttttaccctttcggaagccatactgttggccctgaaggcctgtaggactttcagtgattagctcaatgcgcgcgtacagtatgcgctcaaagagcttgccaacaatgtccaacagacacaacggtcggtaactgcgtggaacatttgcgggccccttgcctttcggcagaaggacaaggtaaaaactgatcttgggaataaaataaaggatgtcgaaccattttatcggagaatttaaattaggcaaccacagtttagctctgctccagttaatcaatgaatttcctatcgtatagaatttgaaccttacttattacttaactttatcctgctcagatctccgatattgttgtgggcaaagaggacaacgtatccgctcgggaggctctgctgcgctgggcacgtcgctccactgctcggtatccgggcgtacgtgtcaacgactttacgtcgtcgtggcgagatggattggctttctcggcgttggtgcaccgcaaccgaccggacttgcttgactggcgaaaggcaaggaacgatcggccacgggagcgcctggagacggccttccacattgtggagaaggagtacggagttacgcgtctgttggatcctgagggtaagttaatccatgataatgcgtatagtgatccatctaactgcaattcctcgaatttagatgtggataccaacgagccggatgagaagtcccttatcacgtacatttcatcgctgtacgatgtgttcccggagccaccctctatccatccactctttgacatggagtcacaacgtcgcgttcatgaataccgcgacctggcccaacagttcatctactggtgccgcgagaagaccgcctacctgcaggagcgttccttcccgcccacgctaattgagatgaagcgtctgttgagcgatctgcagcgtttccgcagcgacgaggtaagcgcccgcaagcgcgagaaatccaagctcatccagatctacaaggagctggagcgctacttcgaaacagtgggtgaagtcgacgtagaggctgaactgcggccggatgccatcgagaaggcctggtatcgcatgaacacggcgctgcaggatcgcgaggttatccttcagcaggaaattgagcgactagaacggctgcaacgactggccgataaggttcagcgcgagatcaagcatgtagatcagaagcttaccgatcttgagggccgaattggcgaggaaggtcgccgcatcgagcgactacatcccgtggacgctaagagcattgtcgaggcgcttgaaaccgagatccggcacctggaggaacccatccaggacatgaaccaggactgccacgtgctcaacgagggtcgctatcctcatgtcagtgagctgcacaagaaggtcaacaaattgcaccagcgttgggctcaactgcgcaccaatttccacacgaacctggtacagaagctgtccggtttgaagtatcccgtccacgagaccacggtgacgcgtcaaacgcgcatggtggtcgagtcccgtcagatcgacacgaatccccatttccgcgatctgcaggagcacattgagtggtgccaaaacaagttggtaagtacaaataaataatatatgccgtcttttatatcaattaatcgattgttttcgtgttgcagaaacaattgcttgccgctgactatggcagtgacctgccgtcggtcaaggaggaactggatcgccaacagcacgagcacaagatcattgatcagttccacacgaaaatactcaacgacgaacgtcagcagaccaagttctctggagatgagctggctttgtaccaacagcgtctcaatcagctgcagaaggtgtatgccgagttgcttagcacctcgacgaagcgtctgtccgatttggattcgctgcagcacttcctgggacaggcctcggcggaactgcaatggcttaacgaaaaggagcaggtggagattacgcgcgactgggcggacaaacaactcgatcttccctccgtgcacagatactacgaggtaagtggtggcctatgccccgaatgaatccccccccttagagctagtgttatatatgtgttgttgtgcttctatccgtttacaagcgtgcatttggtaatggcgacgaggtaagaccccagattggttcataaataccatgagaaattttctattgcaaaaaaagagcaaccaaccaagtgcacttataaaaaaatttttaatatcgttacttataaaacgtttttaataaccactacagaaccttatgtccgaactggagaagcgtgagatgcactttgccaccatcctggatcgtggagaggcactgctgaaccagcagcatccggcctccaagtgcatcgaagcccatctgacagccctgcaacagcaatgggcgtggctgctgcagctaacactctgcttggaggttcatttgaaacacgccacggagtaccatcagttctttggcgagatcaaggatgccgagcagtggctggccaagcgtgacgaaatactcaacagcaagttctcacagtcagactttggcttggaccagggtgaaactctactcaggggaatgcaggatttgcgcgaggaactgaatgcctttggcgagacagtggccacactgcagcgaagagcccagacagtggtgcctctaaacaagcgacgacagccggtaaatcgacaaggacccgtgcaggccatttgtgcctacaaacaacagggtcaactgcagatcgaaaagggcgagactgttacgctgctggacaactcgggacgtgtgaagtggcgcgtgcgcactgctaaggggcaggaaggacccataccgggcgcttgcctgctattgccacctcctgaccaggaggctatcgatgccgccgaacgtctgaagcgtctgttcgatcgatcagtagctctttggcagaagaagcatctgcgactgcgccagaacatgatcttcgccaccattcgtgtggttaagggctgggactttgaccagttcttggccatgggtcctgagcagcgcacggccatccggcgtgccctcaacgacgatgccgacaaattgctgagcgagggtgatccaaacgatccgcagctgcgacgcctgcgccgtgaaatggacgaggtcaatcgcttgttcgatgagttcgagaagcgtgcgcgcgccgaaggtgagtgtgggagtactcgtatgggtatcggtattaataggggcctttgaagggtaggagatagttttcgcctcgcttttcaattgtcggcgctcgccagctgtccaaaacgtttaattgatggaggctaattgaatttaatgcctgtgtgttttctctgaggcaagtggcaagcaggaagccagaatgcgacttagtcttgtcaagtctagtcaacaatgaagaagctgttcgcaagtgccaaaacaaggggtaatcttgtgcgcttcggggatatctaatcttagcgatctaaacttttttgttaccatatttatcgttgttaatcccttgcagaggagagcaaacaggccagtcgcatcttcaccgaggaatgccttgccatcaagagcaaactggaggacatggcccgtgagctggatcagattatactggctccgttgccacgtgatttggactctttggagcatgtgctggaaattcattcggactacgagcgcaggttgcacctgttggagcctgagttgaaacacctgcaggaaacattccgcacgattgcgttgaagacgccagtgctgaagaagagcctggacaatctaatggagctgtggaaggagctgaacactcaaagtggcctgcacaaggaccgtctgaagttgcttgaggcttcgctggctggtctggaggacaatgagcatgtgatttccgaactcgagaacgagctggccaggcaccaggatctgccatcgaccgctgagggcctgcagcaagtgtttaagcaactgaaccacatgcaggacatcattacacaacagcagccgcaaatggataagatgaacgatgcggccgatcagctgggacgcatgggagtgcccaccaaggtgctcggcgacctcaagagactgcactcgaacgtggagcgcctgaacacgcgctggagtgcggtgtgcaaccaattgggtgaaaggtaggtccgctggcgccacctgctctctttttttttgtgtgggtgtcgcctcattggcgaccacagatggagatgaacctgcctctctaacaacgtgttactttgctttttcagaatgcgctcatgcgagacggctatcgggcttatgaagaatctccagtcgagcgtgcaagtggaggaatcatgggtggatggcaccacggagcgactgtctgccatgcccaccgccacttcggcatacgaactagatgtgagtacaaagacgctgcccctgtaaaaacgagtttagcatttcgataagcgatagtctctagctctagatttacatacatagatccttgtacagtttttccgaattttagctatcccttagggtctctgccagagatctcacttcgcaggccaaacacaaagtatatatacatagcctataaatggaaaccgtagtagccattgacccgcgtccaaagtagtttgctcccacagttgttgctcctatttttgttgttgggataaaacctgccggtgttggacatgtctccgtactcctatatatatatctatatattttatatatgtgtttatcttttttgtattttttgtttttgtactacatttccatttgttaactgtccccaaaagcagagagcaaatctccagtcccttgtccgtattccagcagtagttcttgtctaatctaacagcagtctttgacatgtagtgctggccaccacccacataagcataccacatgtacatatatatacacacagcagacgatcctccaaatgtggccaaatcgaccacctacacaacaatagccatattagtaatctgtagcgatattcccccgtcccacaacactgtaaattgataccaaatttgtgttgtagtttttaaacttacctacttttatgtttgtagtcttgtccccttagtattataagctgcacctatacatagaccgatatcgaatgatatcggttcctacattatatatttcttcacccagtattatcgtatttgtagttgaaaactaattgtatatgtatttttgtctaatttttgtattttcaccaaaatcaaaacaaaaattttaaactttttcacacaacaatcaaatattatcacacactataaaacgacacaaaacgatcaaattataaaaaaaaaaacaaatcgatttaaaaatcctgaaaatattcgaacaccaaaaatacccctcgaaaacccatagaaactgctcggagctgcaatcgaacgaaaaccaaaaatcgaaaatgtcaacgtggctggaggacgacttatacgcgaagctaaggtaaaaatttgaatgcctgttgtggtatgattggtctgattctaatgactgctgatccatcgtaacccatcgacttcagacatgtgcaattcgatcgcttgacatacgattcgatggactgactgggtctagtcaatgttgggttgcgataggtcagttggtggccgagtgccagcactttacgtatgactgtgtcgaatgattgtggatatttcgaacgaacaccgaaatccctccttttccgcaaggaaaacactttgtagccctataaacacctcttagctgtttctctaccgaatctcaaatatatttaatgctttttaaaccaattaccggactgtaagctccaattcttagttatcttgcgggttaaaggtgcgtgaataacacttgggtggaacagaaacagcctgacaaacaaactcttaaacacacaaacaaccaaaacaagaaatcaaccaaacaaacaaactaattaaaaagcaattttaccaaaacgtaatttcgtattgattaatcaataaaataaaaagcactaaatatatcaacaagcgccccccttctttccttgcctcctgaaaaataaactaaatttgtttaacacacaaaattactaacatttaaccgaaattaaccaaccaaccaaccaatcgaacaacaatgtcaccgtgggaccctgaattccgggagttagatctacgatagcaaatgcctacgcttcgtggactggctggtcgaggcccgtccgtcgttctcgccaccgcgccgggatctccggccggcggatagcgatccgggcgccacacagtattacagccaacgtttggacaacctgaacacgaagaacgacagattgctggaacaactgtcgcagcgtctgaaaacagcaatcgaagtcaatggcagcgatggtctggtgagtaatccaggtgaccctttcccctttttggaaggatctttgcgaggtggtgacgtcagggtatatttttcgcttcgtttgtctacctcgttagctggggttaggctcgaagtattcaattgtttcgtaatcgcaaagcggggttcaagttcagcaaacgagtttttacgctttcgttttctacaagtcaaaccgagttttcaaatgcaaatacgtacgtctacttctctgtggtatcattgtatctccccctccatcatctgtgcctgtgtctatctgtatctgtattattgtatctgttaccgctccgaatgcccggcagttggtatattattgaattaaccttcagaatcggtgcacactgacggcagaagcagccacataatgacatcacatcaaattgaccaaacattccgtcaatggcttgccgctataaatcacaacttgattaatttataaaaatttaaactatttttattttctgtcatcgtgaccgtcgttgatcgccgctgtcaactgatgcagcaatttgtttaatgtatcaaatttatttataaatattgcattatgtcaggggagtttcaatagaaagagtaacaaaaacgatagacattgtcatgcgcctgaccaattaggcaaattggagacagattcgaaattaataatgacgacgccgaattctataaatattaatgaggcccagcattcgtatggattcgtatatatactcgaaattcaatgccagggaacgtcatcaacgtctttgtcgccatctgtcaacttttcttttatttttttgaattccagttcccctcttattttgactatttttgctcaactggtttggaatttgtttatttcctagcagctccatcttcagaaattcaattaagaatattattaagcaaccagcttgtgcctgctacgaaaatatttgtttgcaaatatttaggaggcaattaccatattgtttaaatggagttcagatcgccggacatggtgtaaacataagttcaataaactttttaggctaatgctgtaataaatagcatcattaatactacagtgagaaaaaccaatttttctaaatttaatgataaataatataatatatatatatctgcttaaaaaacaaactataaatgccataaaattgaacatctttagcctcaatttctttctatgtagttgatccatttcaaagtaatccgaatttgttgttttgggatctattgaggcttttcgaaggtgttgccttcgcctcgagcgttggagtgacatcataactgctccattaccacttcgccttcaagccaacttgatatgcatagcaggggcgggcgctgaagctccgctggcttaactagactgaaaagcgaaataagttatttagaaggttagatggcggcacaaactggtttgatctgttcttctgatactttgttctcgacttccgtgtattgttttcgactttaatttggagccaactccagcagcgtatactcccttcccttccctttccttcccatcgccaatctccaccatttcatgccatgccattgtaaatggattgtttataatgttttggcgcaacagctggggaatgctcaccgaaaactagccggcatttgtaagctctccctctctctctctctcagtggcaattgctttctctcaatctcaacaaaagctcgctctcgctctccacttaaccatttgattctcggagtggcgctgctccattcagtaccgaaagcgacgtggttgtgtaacgtcgcgtatccgctgtgtgtgccgacttgctgccggtgaacgaaatttaacaaaggccaaaacctttaaaacctccggtttttgttggcaaccaaagtctatggaatttgaattcgaatcgagcgtgtaattattagtgaatagttgtgataactaaacgggcaaataacttcccaaaactcaaatagagaacattgctcatacgccgcatgggcagacatgatgtcacatatacggccggatagaaagtgtgtccgtgtcgttgtcttagtgccttaaatttcaattaaatgcgaaccgtgtcgcattggttcgcttttattttgttagaagaaatttaaattcgctgccatttgaatttgtgccgcaaagagttctattatagcccgaaatgaagtcactcgtcgagtgctttgcaacaacttaaatataaccgaaacgcaaacagaagagtgtgaaaacgaaaataaaagaaatacattattaatatagccttgaacatgtcgcaagaatcggaatgttgatattttcggccgtctgttttggtgttaatgaaagcgcacacacaaaaaaaaaaaaaaagaaaaaaggagaaaatgaaaatctatggctgaaatttcgtagtgagtcagcgagttttagggtcattataagttgcataaaaccataaaatgctgcacttaaaatgagaaacccgaaaaactgtggaaattattctcccgctcgattactagctgactagcgtgaattatgacttgctatcaacaggaggatcgcgggagtgtcagggctggcgcttatctaatctatgaggtgcaatccatcagaactaaatgtgatgcttggaattgagcgatcggtttaccaggaaatgccacccggaatgccgatggaagagtatttgtttgttcgcctagcatccatgcactttccctttgattttatcgattaaactagatgccttggtataccttctatatatacttcgttgcatatatatatatatatatttttagcggcattctaacgataaatcaggaatgaaagcgagcgttttggggtctatgcctccactgaagcaaaagggaggcgcctattttcatagtgccacaaaggcgaggtccaattgcaggctgtggtgcatgctgcacgctctcgttagagcttttcctctctcgtttgttcgctcttacccccatttaaagccggtacaacgtggcgtattagtcatgttatcaatgtcaagcgcatctcagccgattagggccaagaatctgtttaatctgcttgcggactcataggccattattttgtgctttagttcagctttagttactcgttgtgcgggcgctcgacaaacttgtttcggtttcatttataatcaaatattcgccactctgatgacatcattgttctcgtacttgtatattaactgtctaaatgtgtgtcggtgtgtgtttcgttaattataatttatttgttgcttttaccaactctagggcaaccttgaaaatcagcagcagcaacagcagattagttgtttattttgaaaatgcaaatcataaacgttgatcactttgtagattcgccattcaatgacttcatttgcagccctcttttgcaaagttgtatgtatgacgtcaatgcaattttaagttggggctacgacctgcagccatatgtcagtcatttgccattgaatcactgtctctggcaaatggtaaataaagataaaaattaaattaccagatcccgtcgataagacgcactccggatccccaactctttccgggtaatcacccatttattatggttgggacctcttgagagagtttgcactacatatttgcaggccgattgattgaggacttctccgtcatatagcgtcatttctattttcataaagcctttgggttcgctttttgtttgcgttttttccttattttttttttttttgttttcacttaactatacatatgtgcttcgtgtgatttgtgtgcgtcggtgcggggctgataaaaatgtatccttgtgtgtgactgaaagaactgaatctagtgaatgaattaagtgaatcaacaaacagagtagtataggacggtttaagggccgattaataatgaaagtccagcgatggctaccgtaaaattgtagagttcatgtcttttgacaatcttggaagtatttttagttactttatcgccggtgactttatcacgcggccatatcaaatcacgctcacgcatgccataaacattccacaaaaatggtttgagactctagggcaacttcaaagtgacgcgtctgccaagaaatctcgactcgtaaatttctaattgcttttgtcacaattaaatctcgcgcagtgtattcaagaagcccctaagccaacgaaacaaataccaattgctgactatgactttgtcgaactgaaccaaacgaaagccttagacatgcctcagcatagatcgggtcgcaaggcgactaaaaccaaatccaaaacccaaaccacgactgtccaagtggcagaggaaagtgactacgactttgcgttcgagtttcaggtaatacttcatctatcctccccattccctgctgccctgttttttttcccctcgcaaagatttcaacgaaccgagtttaatttgcctgttgcccagttgttaacttttactaaccgaaattgctttcatttggcatttagcaatacgctgagagtctacagaaaccgctcaagacctttagggttgacttcagtgcgggcagcgtgccaactggcgatggttacgctgcgcgccaggaggatctctacaccactacctacagcaccacacagtaagtacaatttatacaaaatttataatatatattaagtggatattattctccagaaagaaagaattttactgcattctgaaatcaacaaaatgattcatttaaatctacaatctacaatattatgcgaaagaaacgataacaacttttgacaaagttgtagaactatgaataatcttatatgtagatttgtagtcatacattcttttattatatactaataaagttctaatcgaatcctttcagaatcagctcaacgaagacaacgaaaagctctacgaagagcgtctatagtagcgatggcttggacgccgctagtcaggaggttagcactgctggcctgcctcaatcgcagatccaattcaacgaaatccgtacgctcaaacgctctcaacagctgggtggccattccgtgctggatatagccggaatacgcgatcctcgtacgggtcgcgttctaaccatcggtgaagccatccagcttcgcattctggacgtgcgcaccggcgagatgctagtgggtgatcgccgtatcacgctggaacaagctgccgaccaaggactgatcgatttgcaactggcaaagcaattgcttgagcctggtgccggccgagatgccagcggacgggagctgtcgctcctggaggttattcagcgcgagattagcgaagcggaatccggttacgagacggccgagaagcggatcaaggtaaacaacacagtcaccgtagagcaaacttccggagagctgggctctcccgagaatccacgcaacattgccgacgccattactgcggggagtgtggacaccaaaaccggcctgtatcgcgtcaaatccggacagacaatcagcctggcggaggcctacgagcgcggctacctcatccggcacgagtcggtgacaatcaaatcgaatgcgctgtgcctgagcgatgcgattgcgcatggcctggtcgatggcgccggctggatagcggatcgcaactccggcgacaagttccgactggattcggccattgccaatcaactaatagacgcgagtgtgcgcgaagtggtggacgcgaaacgcgatacgaagatcacactgcaggaggcactgcagtcgggcgtactgaatgcaaaaacgggtcgttatgtgaacgaggtgaccaaggagaagttaaccttcgcagaggcgcgaaaccgtcagttgatcgtgaaaccgtacacgctgaaggacatctgtgatctgaatctgctcgataaacaggctcagatcacgagtcccatgcgccgcgaaaagttaagcattatgcaggccatcgaggccggtgtactcgacggtaatttgctcaagtgtatcaccaaacgtaagggtgaattggtcacccttcaggaggccattgccgatggcatcgtgttgccggccgagtgcaagtaccgcgactttatgaccggtgagctaatcagcattccggaggcagtggaacgcggtctgattagctcggtggcgcagcgttcgatcttcgatattgacgggttcaaggatctgaggagcaatgactatgtaagctttaatgtggccctctcgcgcgatcttttgcgtcgcaagagcacgggctttgccttagagacgggtagggatagtctggtgccactagaggtggctgttagtgagggactggtgcgccaggaggtgtacgagatgtttagccgtggcattggcgttcagaatgccagtggtaaggagcttagcgtctttgatttggtctatcacaatctgattgacccgaagactggttatcttttggatcccaagaccggggagacagtgcccctggacaccgccatcgagcggaagtttatcactcccgagggtgctctactactaagtagtttgctcaatatcactttgacaacggaaacggtgacgcggacgatcaatcgttatgtgacaatcagggctggttcccaggagccagtcgacagcgtgttgctcaccttcacggaggcagtgcgtcaaggtttcattgacgaggagaggcaacttttcaaagatcccaaaacgggaaatatttactcagtacagcaggccctcaactatggcttgttggttcccgatagcaatcaaacagttccggagccaacaaataggaaaaagacaaaatccactattaccattgtgaccaagcaaatcataccggaagcagagcccatcaagctaaacacacagcacaccaagtacgtcgagaagtcggtggagattcctatttctcaggaactagtaaagccgcatcgtgtggtctccgaatttattaacttggaaaagtctagctatatcgaacaaaatgtaacggagcgtcagatcatggagttgcctccaggaggatggcgactaaaggacgccattgagcagcgcctgtttaatccagatacgggagtattccatgtccagggcacagatcgattggttaattttgaggagtgcatcaacaagcagataattaacaatctatcgctctccgtaattgatcccaacactggcgacaagatctccgtgcaatcagcctttgaacgtgatatcttggacagttatggcaactatacgaatagccggaaacaggtgcagggtatgcgtagcgctattgacgagagtaagatcattctggaaactgtcccggctacgagaggagccaaccaaaagacaattcttcgcatcactaaagtaaacaacattccagatgtgttagaggtttccacgcccctgaaagatgcaccgcccaagtttgtcgaggtgctcacctgccaacgagagctcgcctctccagagcccctgcaaattgcaccgggcgccatctatgatccgtccactgccctagtaatcttcacgcaaaccggagagactgaaaatatcttcgatgccgcccgtcagggtctggttgatgagcagctaattaaaatcgtggatccgacaaccaagcaacccatttccgttaccgaggcgatagcgcgttccatttacgatcccaagacagccactattcttgattctgagggacagccggtggatttgatcacagcaactaaacttggactattgagtgtggtaggtgctccattggttgccgccgagggagccctgcgaactgtgcgtttcgtcacagatccacgaactggtgagcaaattccagtggaggtggcctacgagcgaggcattgtctctcgggatcagttgcatcgcggaaggtcctttgacagtgaacccgcaacggtagaggacaaagttgtagtccttcagagaatgcgtaaggtcattctcaagccaaaggatgctttacgaaagggaatcatcgacgaagagacttgtgaaatacttgaaaacaccagtaacttcactaatcccaaaggagaggtggttaacataactgaggcactgaacaccggtctaattgatggacgacgtggtcaggtgatcgatccccaaaacaatagagtcttaaatttgaggcaagcagtggagcagaagattattgattccgagcagactaaccatattcttatgccgttggccaagagcttatcggtgccgcgtctggcagaccagggattaattgatccacaaactcagactattgtccatcctgagagtggttatccactgagcatccatgaggccatagtatgtgaggttctggatccgcattcaaaactgcataaacccgaaaaatgcacactagaggaagcgatcaccaagggcattatcaatgcagatgattccacattcaactataagaacaagacactcaacattactgaagccattgaagcgaagctctttgatcccagttacgatcagcaaaaatctaaggtggaaattccgccggtgggtatgatattccctgttgctgttgaaaagagccttgtggaaccgtccaagcgtgttgttctgcatccaagtacaaagaaagcacttccaattaagcaagccattgaggagaactttatcatgtccattccctattctcccaagccagatgctatcgaagtggttactgccatggagcaggatctcatcgatgtagctgcccaaacactaactgtaccgtccactggtgaacgtatacctctacgacaagctatggaaaatggtgttctggtggtaaagaatctctcagattttgtgattacccagaaacccattcccaaaacggagatcatggagacggtgcgtgcagtgcacacggtgactactaaaaccattgagcttatgcaaggctacgtcctcatttctaacaatgaagtgcagaacgttaacacaggcgaggtatgcagcttggaggaagctaaggagctgggaattctgcgcgaagaatccacaactcgggagacaaaagcagcggccggcgaaagtccggaatcggtgggcgacgttggtaccagtggcgatcaaactgttattgtagaagagcgcacccagacagttgtggtcagttcggatacccgcaagcaagagatgcaagtagttagcacgacgcaatccacgaaggatacatccgttccaagtgtaagtgaaatcgagacaaagggcagcaaggagccatcgaagacgttgcaaaatgtgaaagatgccgccaaattgggtgcattgggcgtaatcgcagctcctgtactggccggaggtgccatcgtaagtggcgttaaaagccttatcaaatctgtgaaatctcccacggaagatgccaagagcactgaaaaacctaaggaacctcaaaccagcttcattgaacaggagcgccgtaaagagctacagccgcaacaagtgccaagtgaggtggataatctcctcagtgaaacggagaattttatcagctctacgactgccaactttattgcaaacgaaaaacagcaggataagcccgatacgttgccacaggaaagcaatctgcccttggaagttgaatcaacaagcactctgaccacaacaacagtaacaacaattactacatcaagtacaacaacggagaccggaaatctggagccagttgtggtagaagatgtctcgaccacagttaaggaggataaagtggtggttaagccaagtacagttccagaagataaaacagaggtttccaaaataactgaaaccataaccacagtgacttctaatgaaacagatactgtaccagaaaagatatcacagaaatcagcttccgaggagtcagcaaagaaggatccagtggttacgaaagacacaagttccaggccagctgaaacggagacatctcctaagcctgttcaaaaggaaccaactcccgatccagctcaaaatacagaatttcctgaatctattaaaaaagatcctactcctgagccggattacaaggaaaccgctaccgaggcagcacaaatcacaccaaaggaagcttctcctgctccaaccaataagaacgaacaatcagctgaacctacctcaaagccagagccaatgccccgaactgctaaaaaggaggagatttctgaaattgagcccccgttcacagcaccactggctccatttgttgatcaattagcggaaaccaagatcactgaaattaaaacagaatttaaagaaccagttacaagttcccaaactatcacaaccatcaccacaacggttaaaacagtcgatgaacaccccatagtcgaggaagtagatgaggtcagcaaatctgagaaaattgtggatgtggaagaaccaacagttcaccaacaagaaccgattaaggtgaatgagacgagcgatgattccaccaggactgaacctaccaatgaaatagtgcatgaagaaagagttgtcactgtcgaagagccgacgatcacagaaactaccgtaacaacaacaactatcactacaacaacaacatcttcaagtgaggaaaccctgccccaagagaatacagccacagtaaaggaaacgcctttgaatgagcctgtgccttcatctccagctgaaactaaagagattgagcagacaactaatgatgatcaaaagaagccggaagaaattgtagataccgaaaagaaaacaacagagcagaagccggtggaaactatcccaaccgagccaataagcacatctgaaacaacaacagtgactcttaccaccaagacaacaattgttgatgaaggaaaactacatccaccaagtgatattgagcaaattattcaaccgcattctacttcggacaaacatcaatctcttgttgatttcattgaacaggagaagggcacacagccagcggaaggtggtagcaatattttgcagaatgtgaaggatgctgccaagctgggcgctctagccattgtaggagcaccagttcttgcgggcaaggctttggtagatgctctaaccacagaaaagacacttaagccagaacactccacatcacaagttgtaaccgagacagtggaagaactaccaacagagataattaccacaagcactgctacattagttaccaaagtcaccactacaactaccaccacaacgacatccaccagtgagggcactcccgatgatgaggctctggatgtagttaaactgcctgctgaattggttgaaagctctgtaaagcgagaagtgcccaggacactggccattggcgatgccatctcccaaaagttgattagccccgatgagtgccaggtgatcgtagatggagaacagcagtcgcagaccgtttccacgctactcaaggaggagcagcttagcccattggacgaagtacagatcatcgacgacaaactaattgttctgcagcaggtgtcttacctggtagacgcagacacagaactgacgccacagaatttgtatgaacttaacatctacgatcccgagaaccaatactttattgatcccagtactggccagaagatttccttccatacgctggtatttgacatgaatgtttttaacccagaaactattttggtaaagaactttagtaccggcaaatacgagactcttacagcagccttggagcgtccacttctggacaggcacacgggtcacatggtggatccgaagacaggcaagaaaatcccattctttgagtgcgttgaccgccaatggattatccgagccaatccggaagagcaaaagccatcgggcatcgagaacgtgacgatagacacacagactggacaggtggtgcttgacgatggtcgggtttgctccattgttgaggccatcaacagtggcaagctggacattcagtcgatatcggtgcgcgacccagtcagcggtgaggtgattccactgcgtatggcaattgagttgggggtggtagacatgcaggcgggcacagtgatagacattcagacgctcaaagagattcccatggagctagccttccagctgggtttcctagtgcccggtgcccgcaaacccatttccctggaggccgccgtacgcaaaggtctctacgacccggagacgggaaaactcttcgactcagagagtcaaaaccaggtcgatgttcagaagtcgattgaaattggtttagttgacccgaagatctcattgattgtggatactgtcactaagaaggaagtcaagctggattgcgctatcgaagacgatttggtgctgcccgccacgggtcaaatcaaagacaacaagaacaacactttggtgcccttcgatgtaggtgtacaacagtgtttgctgaaaaccgacaacgtcacctggagcctgccagagttgcttcagcgcgaatactacacgcccagcactggcaaggttcttaatcccgtcaccggcgaggagattcttcttcagcaagccattgaaatgggctttgtggagctagaaacgactttggtcaaagatgtcgatcatgataaaattttgccaggcaaggaggcggccaaggtgggtcttttggacactgttcgcggaacactaagctcgcccaacataagtctcgacgaggctttcgtaaagggctatcttataagcacgaaaaagccgctttccctggtcgattgtctgctgcgtggtctttacgatccttcgacagcaaaattcaccatcgacgacaagcagttggacctgaaggccgccattgcccaaaagctcattaatcccgaagagctggttttgcttgaccccaagacagagtctattatttccattacagaagctatcgcgaagggttatcttgatccgattgagggctatgtgattaacccatatgcctccaccaaactgtccctacacgaagccctggagaatcgtattctcatcccgcccaaacgaaagcgcagcttgcccgatgctgtctaccgcggtctttacgaccccaagactggtcaatttagcaatacggtgacccgcgaaaagctcacaactgaacgtgccattcgtaggggcatcctcgatcccgattcgacggtcgtcaatgtgggctcgggacagatcattccatttggggtagccaccgagactggaatcgtggacagtaaacatggtacggtgagggatgccgatgatcacccgattgactttaaggaagcattcgatcgtggtattttggttgaagccaagaagcctcttcgtcttattgaggctgtggtgaagaatgtctacgacgaggtggatggacactttgtcgatccgaagtcgggtgagaagctaaactttgccgaagccttaaacacgaatttactggacgagcatagtgtgcagatcagagacttcaagactggtctgtacaagcagctgaacctaacgcacgctaaagacaccggcattattgatgcccaaaattccaaactactgtataacaaccagacaatgacccttaagcacgcctttgatattggaatcctaatggatgtcaatgcgcccatcagcattcagcgagcaattcatcagggactattcgacgacaagaccggaaagctaagcgatcccagaactggtcgccagattacattacttgaaagcatgaggagtttcgttgttaatcctcacctgccctgttacttcgatgagcagaccgaacagatgtatactctgagcgagacctgtagaaatggcatcatcaatagaagggagggtgttttccgggagccgggaagcaattcgtttgttcctctgggcgaggccctaagcctgggtctcattgtggacattgagaatgccggttttggtttgtacgaactattgtcgatgggcttctatgaaacttccacacgtaaggttctgcatccagtcacaaatcgcaagcttaatctcaacgaagcttgcgtggaggatgtagttagcctatcatccagcttagtcaaacaccacgagaccggcaagtaccttcggcttgccaatgctattaaggagcagttagttgatgactctagaggttgttacaatctgggcaacgaacagttggatctccaggcggctagggccaggggtttaattgtttccaatcgtcgcctcctcagccttgaactcgtattgcgccaacaactttatcgccccgaaactggcaaattctgcgatccaacaacgggagaatatctagacctaatcgaagccatccattcgggtttcatagatcccgcgactaccgtatttaaaaaccagcttactggtaaggagttaccgctaacagaagctattgagaatggtgatattgatgtgtccaagggtagagtatttgatcccaagtctaagtcagcttataactacgacgtggcactctcgcgcggaatcctggtcaccattactcggccactaaccgatcgcaatgatgtggtacgtcgccaggatagcgttgaattactaaatcaaacacccgtgagtgttgtgattagcaaaccgcgtgaaatgtctctcgaagaggccattcgttacaacataatcgatcccaagaccgcgctcgttcgcgatttcgatagctttaagttcctgccttactcggtagccgtggaacgcggtctcgtggacaccaccaagcgcacactcgtggatccaaaggccctgtactttgccttcgatcccactttaatagtttacgtacgtgaaccggtcacctttgaccaggcggccgagtccaagtgtctggacttgcagaccggactgctgacctatgtgccagcaagtgtacctggatccgcaacagcggcaccagccagcgacgatagcgcaaacgattcgctgactgtcatcgagacgcccaaggtatacacgctcaaggaggccgccagtgccggtgtggtggatcccgactcggctctagtcaaggacttggccaaggctaagctggtccgtttgccagaggccttccgaaagggcctaatggatgccaacaaggcgaacgtgctcaacacccagacctcgaagctctgcaccctgcaagaggcctacgaaagtggcctgatctgcacgcctaagcgttcattcggtttgctagaagccatcacctttaacttgtacaacccaaccaatggctgcctagttgatcccttccaaatgcatccagatatcatccggcggcgcaagttcacgctggccgaggccattggctcaggtctggttgatccatcgtcgacagtggtgcgtgaccccagcactggagtcattgtcccactgacggctgccattagcagtggtctaatcgatgccaccgagggacgcctgaccgatgccaacgagccgaagaacaacatcgacctagtgaaggccgccgagaagggtctgctcctgccggcagaacagagggtaagtctcagaacactcgaggtgtactctttcaatttctatcaacaccgatctcgaaaacggaattgcgaatgcaagaaattactgaattattgcaagaaattacagcaaaattattctaattctaaattaaaagctttgttcgtggcatgtttggtattgtactatcgatattgatttcgatttttttttgagacattttgatcagcgcgctgtctttctatttctttctgtctatctctgtctctgccttaatctcaaattctatatcatcagactaaccaagatgtgagctttccacaatgaaaaaaaaataagaatcattctgcaaatttactttgcaaatcatatttattattattttgcaaatctcttatattgcagcgcatggcattcagttttatgttctatatatcgtatttttcgctgagatcgctttaagttctcaagcgacagcagccaaaaataatgcaatcaatcagagtcagcaagtacatcacagatcacatccaacagacatgcatccataaatatcgtactccatcgatcgcgctttatcaagccgaagagcaatgcgttatgtctcatactcctccgcataaatgacgtcggcaataggacaccatatgcaatactctatatactcaatattctatcgatttgtctataacactagcatacgaatcttttttcattcgaactcgcactcatctatttcttgttatttcttttccctatatccaattgtatcccaggcagtattttatgtaggatcagatcaatttttaactgactctaatatgcggttaaaaactgatctgactgagttagtgggattttccccgaaatatcccacaattcactagtctctatttagctcttagttttggagtaaggttacatatcctttttcagccccaatgcaatagcccaggctttagttattatttttgaaatcttgtttaaataccaattttctacctattttcagcaaccatatataaatattttttacatattatttcgtttgcagttttaatttgaaaaaataaacccaaaccacaattaacactaaccaatataaaaatccaacaaaacgaaaccaaaccaaaaacaaaaaaacaaaaccattaaaccgtagttagtgcatactaaaagtaaaacaactcgtagttgctagtccccagtagtgctcgttacccaaagtagtgaaccttggtgcttgtatgtctatattattgctttggtttatgttaactgcctatatacttcattgtatcttaatgcttgttataaaaccgctttgccctaagtctttgccttgcaatattttcaacaaacaaatgtgtttcttccagctatgtttgtgttttatatatattttgtgttccatttatctattgacacttatacgatatctatgaaatctctatatgaatccctttatagcgacccgtatcgagctaagaagtcatttcttttcttaccacttttctaataaattatttgctttgccctcccccacccataatatgtcacatatatagcaagcagtattcgagaagttcaacatgtgcgaagagaatgtcaacgatctgttgaaatgggttaccactgtggaacagaaaatctcaagtgtcggcggacctcgtgaaaagattgatgagttacgcaaccagattaatgcccttaaggttggtactattgatttatatacttgttacaaaattgaaaacaatgtattctttgtttaaatagcaaatcaaggatgagatcgagtctcagcaacggccagttgccacttgtttggagcaaatccgtcagatcgtgctcaccggtggtgatgttttgtctgcccccgaagtgaccactctggagaactctggccgggagttgcgttcgcgtgtggatcgtgtcaacgatcgcaccgtgcgtttgctccggcgcctggaagcaggtcgagatgagctcaccaaactgcgcagcgaattggatgtattctccgattggttgcaagtcgcccgacgcactttggaggacaaggaacgttccctgtccgatttgactcggctgccctctcaggccgattcggttcgtgagtttgtcagcgatgtgattgggcaccaggccgatctgcggttcatcacaatggccgcacagaagtttgtggacgagagcaaggagttcttggccatactgaacgacttccgtacttcactgcccgaacgcttgccacatgttgagccactgtccagtgccgagagtcccatacgccaagaggtatcgctggtctcggcacagtacaaggatctgttgaaccgtgtgaatgctctgcaagatcgcgtctccggtttgggtggacgccagcgtgagtaccaggatgcattggacaaggctaacgagtggctgaggagtgtacatccgcgtgtgtcgcgcattatctctgaaccgattgccggcgatcctaagggagtacaggatcagatgaacgaggccaaggctctacacaatgagctgctttctagtggtcgcttggtggacaatgcgcaacaggcacttgataatctgctgcgcagccttggtggccaactcagtcccatggagatcaatcagttggaactgcctattgccgatctgaagaacaactaccagcagcttctggataatcttggtgagcactgcaaaactctggacaaaactttggtgcaatcgcagggcgtacaggatgccttggacagtcttgtgggatgggttaaccaggccgaggataagttcaagatgaatctgcgacccgcctcgcttatcaaggagcgtctgcaggagcagatccgcgagcacaaggtcctgctagccgatcttcaatctcaccaggccagcatcgacagcgttcaagtttcggccaaacatctgcttgccagcgcatcgaatgcacgcattgccaagaaggtggaatcgaatctaaacgatgtgaccgtcaagtttgagaagctctacgagaaggccaacaaacgtggtgaattcttagatgacgtttacaaccgattaagccgctatctggatgaaatcagcaccgtggagcagcgtatggccagcttacaggaggctctagatagccgcgagacaagcctgctttcaactgaagagttggctcgccgcatgaacgaactgtcgcgtgacaaggaccaactggctccgcagtttgaggattgcgtgcgcagtggcaaggatctaattagcctgcgtgatgtcaccgatactggagttttgcgcgatcgcatcaaggcactggaatctcagtggcgcaacattaacatcagcatcgatgagcgcgccaagctgtccaagcaaaaggccgaacaacaactggcctacgagggactgaaggatcaggtcctctcctggctggccagcactgaagcgcgagttaacggccttccgccggtagcaatcgatctggacaggattaagcagcagcatgacgagctgaagcccatatgcaaggattaccgcgactatgcaccaactattgataaaattaacgatattggagcacagtacgatgcgctaatccgtccagagagtcctgcccgcaaacgctccacttatagtccgattaagcggaccagtccgttgcgccgcatgtccggagacgctagaagccccagccccaccaagggaggcatcctgtcgccactatcgactggttccagtggattcggtagccgcagatcctcccaggatggtttccagctgtctgagctatctccggtgcagcagcagctgagcgagatcaacaatcgctacgggctgattggcgtgcgtctcaatgaccgccaacacgagctggacaacctgaacgaggaacttcgcaagcagtacgagaatctgaagggactagctcagttcctggagcgcattcagcgccaattgcccaaggagtccgtatcaaacaaggatgaggccgagcgctgcattaagcaggcgcgcaagatcctcgaagacatgtacgagaagcagagtcttcttgacaccaccaaggctcaggtgaaggatatcctccgccgcaagtcagatgtgcccggtgccgaacaattgcgccaggagaacgatagcatccaagagaagtggaagaatctcaacgacatctgcaagaatcgcattgccttctccgagaagctgcgtgactttttggacacccatggaaatctgaagagctggctggacagtaaggaacgtatgttaaccgtgctgggacccatctcttccgatccccgtatggtccagagccaggtgcagcaggtgcaagtgcttcgcgaggaattccgcactcagcaaccacaactgaagcatttccaggagcttggacatgatgttgtcgaccatttggccggcacacccgatgctcaggcggtcgaaatcaaactgaaggacattctgggcaagtgggatgatctggttggaaagttagacgaccgggccaatagtttgggcggtgctgctgacagttccaaggagttcgatgctgctgtaaatcgcttgcgtgaggctctgcagaacataagcgataatctggatactttgcccacggatggcgatcaccaggagaatctccgcaaaatcgagaacctggagcgacagcttgagggtcaacgcccgctgttagccgatgtggaacaatccgccgccactctatgcaacattctgggtgatcccgcctcgcgcgctgatgtcaactctcgtgtcgcagctctggagaaacagtatttggcccttcagaagaaactggataccaagaaggcagaaacagaggcttcccttcgggatggccgccactttgccgagaattgctcaaagactcttggttggttgggcggagagctctccaacctgaccgacaggcttttggtctctgcacacaagccaacactgcagcaccagattgacacccatgagccgatctatcgtgaggtaatggcccgtgagcatgaggttattatgctaatcaacaagggcaaggatctaaccgatcgccagcaggatcgcggagttaaacgtgatttggatcgcatccagcagcagtgggagaaactgcgccgtgaagccgtcgatcgacacacacgactgcagacgtgcatggagcactgcaagaagtactcccaaacttcggagacattcctggcctggctgcgtaccgcggaggataagttggctgatcttacacccggcgtattgtcgaaggcaaagctggagacgcgtctgcgtgatctgcagaccttccgtagtgaggtttggaagcattccggtgaattcgaaaacaccaagggattgggagagacattcctcagcagctgcgacatcgataaggaacccattaaggcggaacttcaagacatccgcgatcgttgggagagactcaacaatgatctgattgcccgtgctcatgaaattgaaaactgctcgcgtcgtttggacgattttaatgatgagttgcgaaacctggatcattctttaggtcgttgcgaggatcgacttgctgcccacgatgctctcggtggagctgccaaggatcccaaacttttggagcgtgttaaggccatacgcgaagagctcactaacttgagcaagcctttgcagtcacttaaggctctggccaaggatatcagtgctgaggctagagctgctggcggagatgctgatcatttgaccagtgaagtcgatggcctggccgaccgcatgtccgagctacagggtcgcctggatgatcgctgcggagaactgcaatctgcagccaccgccgtatcccaattcaacgaacaaatgaagagtttgggcattgatctgaacgatctggagaccgagattgaaaagctttcaccgcccggtcgagaaatcaagattgtccaagtgcaaatcgacgatgttggcaagatccagaccaaattggatcgccttgtgggtcgtttggaggatgcagaacgtgccgctgatgttttggtagatgcaggattcgctgcagacaccacccagacccgtgagcaaatctccacgctgcgtaagacattgggtcgtttggacaacagagttcgcgatcacgaggataatcttcattccactttgaaagcacttcgcgaattctacgaccatcaatcgcaaactctggatgacattcaagacgtaagcgatgagttcaagcgcatgaagcccgttggctcggagttggatcagattcgccgccagcaagaggacttccgtaacttcagggagcgcaaggtggaaccactggccatcaatgtggacaaggtaaacgttgctggcagagacctagtgcgttcggctggcagtggtgtttctaccacggccattgagaaggatctggaaaagctaaacgaccgctggaacgatttgaaggagcgaatgaacgagcgcgatcgccgtttggatgtggctctgctgcaatctggaaagttccaggaggcgttggccggtttatccaagtggctcagcgacaccgaggagatggtggctaatcagaagccgcctagctccgattataaggtggtaaaggcacagcttcaggagcaaaagttcctcaagaaaatgcttttggatcgtcaaaactctatgggctctctagccaatctcggcaaggaagttgccaaccactgtgaacccggcgaacgtgcctccattgagaaacagttgaacgatttgatgaaacgctttgatgccctgaccgacggagccgagcaacgtgagttggatcttgaggaagccatggaagtggctaagcgattccatgacaagattagtcccttggaactttggctggacaacacggagcgatctgttaaggcaatggaactgatacctactgacgaagagaagatccagcagcgaatccgcgaacacgaccgtctacacgacgaaatcttgggaaagaagcccgacttttccgaccttgccgatgtcaccgcccagctgatgcatttggttagcgacgaggaagccgttaatctgggcgagaaggtgcgcggtgtgacagagcggtacacaggattggtggatgccagcgacaacattggggctctgctagccgaatcacgccagggattgcgtcacttggtcttgagctatcaggatctggtggcctggatggaaagtatggaagccgagttgaagcgctttaagtccgttcccgtttacgctgaaaagctgctggaacagatggatcatctgttggagctaaacgagaacattgccggtcacgcttcgaatgtggaatctactgtggaatccggagccgagctgatgaagcacatttccaacgatgaagctatccaactgaaggacaagttagactccctgcaacgtcgctatggcgatttgaccaaccgtggtggagatctgctgaagagtgcacagaatgcactaccattggtgcagcaattccatgaagctcacaaccgtttagtggaatggatgcaaagtgctgaagctgctcttgctcccagcgagccacgtcaagctgatgtgcttcggctggagggtgaattggctgatatgcgtcctattctggacagtatcaatcaagtgggaccccagctgtgtcagctttctccgggagaaggtgctgccaccattgagagcattgtgacccgggacaaccgtcgcttcgattccattgtggagcaaattcaacgcaaggcggagcgtctccacctgagcaaccagcgcgccaaggaagtgacaggtgacattgatgaactgcttgagtggttccgcgaaatggacaccactcttcgtgaagccgatctgcctgccatggagcccaagttggtgcgtgcccaattgcaggagcatcgttctatcaacgatgacatttccagccagaagggacgtgtacgagatgttactgcggcctccaagaaggtgctccgcgagtccccacagagcgagaacaccgccactcttcgtgagaaattggatgatctgaaggagatcgtcgacactgttgctcaattgtgcagcgagcgtctgggcatcctggaacaggctctgcccctgtctgaacatttcgccgattcccatcagggactcaccgcctggttggatgacatggagcagcagatttcgcgattgagcatgccggctttgcgtcctgaccagatcactctgcagcaggacaagaacgaacgtcttcttcaatccatagcggaacataaacctctgctagacaaactgaacaagactggtgaggctttgggtgcattggtggccgatgatgatggtgctaagatcaacgagattttggacacggacaatgcccgttatgccgcactccgcttggaactccgcgaacggcagcaggcgctcgagagtgctctgcaggaatccagccagttctccgataaactggagggcatgctgcgtgctctggccaacaccgtggatcaggtcaatcaattagatcccctgtccgctcttccgcagaagatacgtgagcagatcgaggataatgatgctttgatggacgatctggacaagcgacaggatgccttcagtgctgtgcagcgtgcggccaacgatgttatcgctaaggctggcaacaaagctgatccagctgtgcgtgacattaaggccaagctggagaagctgaacaatctctggaacgatgtacagaatgccaccaagaagcgcggcagctcgttggacgacatcctaagcgtagccgaacccttctggaagcaactgaacagcgtaatgaagaccctaaaggatctagaggaaacactatcttgccaggagccaccagcggcccagcctcaggacattaagaaacaacaggtggcgctgcaggaaatccgccatgagatcgaccagaccaaaccagaggtcgagcaggtgcgacgtcacggaagcaacctgatgaacatgtgcggcgagcccgacaagccagaggtcaagaaacacatcgaggacttggacaacgcatgggacaacatcacggcgctgtatgccaagcgcgaggagaacctcatcgatgccatggagaaggccatggagttccacgagacactgcagaacctcctcaagttcttgaccaaggccgaggacaagtttgcccatctgggagctgtgggttcggacattgatgccgtcaagcgacagattgaacaactcaagtcgttcaaggatgaagtcgatccgcatatggttgaagtagaagcattaaacaggtaaggccttctatatatatttatatatatatattcttattcaatcgaatctattcaaatttaaaaatctaatgttccattgccgtggtgtctatctcaacttgtgaattggcagaggtctcaaaaggcaagatagtttcaaaaaagtctagttcgttcgtgcgttgttgttgtgaatattgattacatttaagtgcttgcaactgcaatgatttaagatctccggtatctttgaacaaagttgagccgagcatgttttttgattgccacagtttatccagttgcatgcaatttcaaaatgaaaacaaaaaacacttgccatttattgtttttgcgcttgcttatgttacactgcagtttttgtaaattcttcggctaattgttaattgaatcttacagacaagctgtggaactgacggaacgcacttcacccgagcaagcggcatcgattcgcgaacccctgtcggtggtcaatcgccgctgggaggccctactccgtggcatggtcgagcgccagaagcaactggagcacgctctgctgcacttgggtcaattccagcatgctctcaacgagctgctggtatggatcaacaagaccgacagcacactggaccaactgaagccggtacgtagatatatatttcatgcttgagagaaacccaaatcattttccattatgtaaacttttagattcctggagatccgcaactgctagaggttgaattggccaagctaaaggtgctggccaacgacattcaggcccaccagaactcagtggacacactgaacgatgcgggccgacagttgattgaaaccgagaagggatctgtggaggcgtctactacccaggagaagctgcgcaaactgaacaacgagtggaagcagcttctgcaaaaggccagcgaccgtcagcatgaactggaggaggctctacgtgaagctcacggatatattgccgaggtccaggatattctgggatggctgggcgatgtagacgcagtgattggagctagcaagcctgtgggcggacttcccgagactgctactgagcaactggaacgtttcatggaggtgtacaacgagctggatgaaaacagacccaaggtggagacgattcaggcccagggccaggagtacatcaagcgtcagaaccaaatgaaggtctcgtccagcaacttacagcatacactccgcacgctgaagcaacgttgggatgccgtggtatcccgtgcatccgacaagaagattaagttggaaattgcactcaaggaagccaccgagttccatgacacactgcaagcctttgttgaatggctgacccaggccgaaaagctgttgtccaatgctgaacccgtctcacgcgttctggaaaccattcaggcccagatggaggagcacaaggtgctgcagaaggatgtgagcactcatcgcgaagccatgctgctgctggacaagaagggaactcaccttaagtacttcagccagaagcaggacgtgatcttgattaagaacctgctcgtgtcggtgcaacatcgttgggaacgagtggttagcaaggctgcggaacgcactcgtgctctggaccatggctacaaagaggctcgcgagttcaacgacgcctggagtggcatgatgcagtatctgcaggaaaccgaacaagtgctggatcaaattatcgaggaagccacagcgtccaaggaaccacaaaagatcaagaagtacattggcaagctgaaagagacgcatcgtcaactgggcgccaagcaatcggtctacgacggaaccatgcgcaccggaaagaatcttttggagcgagctcccaagggcgatcgccctgtgttggacaaaatgctgatcgaactgaaggaacaatggactcgagtgtggtccaagagcatcgatcgccagcgcaagctggaggaggctttgcttctttctggacagttcagcgatgctctgggtgagcttcttgactggttgaagaaggctaagagccgcctgaacgaaaatggaccagtccacggagatttggagacggttcaaggtctatgcgagcaccacaagcacattgagcaggatctgcagaagcgcgctgcgcaaatgcaaggagtgctcaagactggacgcgacctggagcgatctggaaacaatcccgaagttggacgtcagctcgatgagatgcagtccatttgggaggaggtcaagagtgccgtcgccaaacgcggcgagcgtctccaggtggcccttgttgatgccgagaagcttaatgcccgtgtccaggctctctttgattggctggatcatgccgagcacaagctacgatatgccaagaatgcccctgatgacgagaaggtgtcccgtgaaatgatggacatccacatggacttcatgaaggacctgcgagtgcgcgagcgtgaaaagaccgagacttttgagtacgccgaggacattatcaacaaggcctatcccgatgccattccgatcatcaagaactggctttcgattatccagcagcgttgggaggaggtgcgccaatgggccatcaatcgtgagtcgaagctggagcagcatctgcagtcgctcaaggatttggacgacaccattgaggagctgttggcttggctcagcggactcgagggcaccttgttgagtaagtattgattattaaattatttgagatagattttaattgacgttctctgcagacctgaagcacgaacagctgccggacgagattccacccgtggagaaattgatcgaggaccacaaggagttcatggaaaacactgctcgccgtcaaaacgaagtggaccgcgcatgcaaaccaagacagttgccaccaggagcgcgcaagccgtcgcgcagcggcaagacgccagtgtgagtagaataatagattcgcaagtagctgccgaaactgtagctctgctgtacatatccttggtatattattattattttgtatatttattttttccaatttctttttgtatactttcttttgtatccaccaccttattgctacaatattccaaacaaaaaccaaaaaacccccgcaacgtcttgcacacctatctctctgcctatccaaaaaccacaccaaccaatgaaccaactacctaccgaccaacagtcgtggctccagtcacgatctgcgtgagcagtcacccgacggcaccctgaggcgtcaaaggtttggccgcaagtttatactgtaatgcttgctactcgtttcatccacttgccaagtggcaaatgtgcttactcaccatctaatcacgaatggagttagtgattgcctaacatctgatataccgaaaccataccaagatacttgtttaaatccccaaagtagcgctaaaatacgtagctgctaacgcacaattcataccaaccgagcactcgtcaaaataaaaaaaaaaacaccctgcttaatcactgccgcttaacctattgcttgtttaatccgatacctaagtataattttgtaactaacgatatatattctcttttttcacagctttaagggatctcgtgaccagggactcaatgcccgcaagggaaggtgagttctcgttgggcttgtattattttttttgtaattcaagaatagatagattccgcatgtacttcgaaattctcaaatcgaatttgttttgttttcaacttttcaactacttttggaaatgctgcgtctacaactattcgaaatatttgtatatttaaatttgtaatatccatgtattatctatgttaatgtgttttgcgtattttgttcgttactgtaccattttgttttgtctctttttgattctactttcatcttgtctacacactacgctactacgtaaacgttgctcataccgctcgaatatcaaatatcaaaactttgcatcttgccgctttatttgcctatgtctatgtcaaaaaccaaaatctctgagcagtcgtatcacgcccacacgtgacacgcccgacagagatcgcctgccgcactatggcccccgattctcgccaaggtaagtccttgaaatcctccaaaatcatccatatcatctcaagctgtgcatgtccagtacaattgtttgtatttagtttggttcatgatgttcaccgggtttgaagaacttctaattaacagaaatatcacattttaatatagcacctcgggaccggaactggaattccgttcgccacgcgcgaagcttctgtggaccaagtggcgcgatgtctggatgctctcatgggagcgccagcggctgcttaacgatcatcttctgtatctgaaggatgtggagcgtgcccgcaacttcagctgggacgattggcgcaagcgcgtaagtatttttaactaacagtacttcactaagaatatgatttttaatatttctatccattcatagttcctcaagtacatgaaccacaagaagtcgcgcttgacggatctgttccggaaaatggataaggataacaatggcatgattccgcgcgatgtcttcatcgatggcatactcaatacgagtaagttcctccgatgcttatccttctatactaaactatattaacaacaaatataatttccttagaattcgatacatctggcttggaaatgaaggctgtagccgatttgttcgatcgcaatggcgaaggcctcatcgactggcaagagttcattgctgcccttcgtcccgattggcaagagcgtaagccagccaatgattcggacaaaatacacgatgaggtcaaacgtctggtcatgctgtgtacctgccgacagaagttccgtgtgttccaagttggcgagggcaagtacagagtaagtagcaagagtagtgtgtcacctggtcggcagttactaatgtgtaaaataacttatttcagtttggagactcccagaaactgcgcctcgttcgtatccttcgcagcactgttatggtgcgcgtgggtggcggttgggttgccctggatgaattcctgcagaagaacgatccttgtcgcggtaagtggtccatctatccatccgagtttagtcaaaacaccctatttagttgtgttgcgtacacacaatctcgaaatttgttggatttcatccattccacatccataccagccacataaattccatacatatatctaaaataataatctagcgtaatctagtagttcacatttttaatattccacccaaatcatgcattttgtctatacccagatactgtgcatcgtttgctcatatcatttaaatgcattcatatcacatctaggtacagttgtgcttaacaactaattatactataatgccaaataataataataataatattaccaaacggatatggtcatttaaccaaccaacaaacaaccaaccaacaataaactactgtgcctaaaataactagtcaatgaacccggaatataaaaagagaaacctttgttaaaacctcatcattaattcaggtccaaaagttgcctaaacaagctaaaatgatattaacagtgtgccttagggcgaattttacctttaattgccattcagccagcgccaaaagccacatcatatacacaattacccagcaaccaaaaccaattaaatataaaactgaccaatctagccaagggttgtaccatctactctactcatgctcatttttgtcgcttctatctaactgcgtaccaactagctgctataagaccatgaaaacacacacaaacgctcaccaaaaatatcccgccaattgtaggttcttctatttcctattagttagtgttattaaccaggtttctccacccaattcttagtcgtagttacattaaccctttgtttttaaccattagttgagaatgatattttgttaatcctatcctgctttcaaactaacatcctgctttatttgtttaacagtctagcatgctctgttaactaacagggtttgtgcacactgtacttcatgtcacccattttatgtttgaatcctcatcaatttcgttgtacgtcctgtatttaaattaaaattgttgtattaatttgtgttatttgtttttcgttttttactaatcaaactttatgtttacccctttttctttttttccaaaatggttttctttattataccgaaaatcgattgaatcttgataaaccgaacccgataaatatacatatatgtatactctacgcttgcgctgcccgctcgccacgcccacgaccacgcccgacatgcacccgcctgtgcccacaccaaatactaaacaacaaaaaaacaaaaatgttgtaaaacacaccatactgaaaacaaactgtgacaaatactttgcggtaacgaactttcgttgttattgttgttgtttatatgttcgccctacaacaaaacattgcctatccgtgtaaatgtgttatatgtgggtgcatctgccatgccaatgcgtacaaatgcgtatataaatgcatctgtgcatctgccactgcaactgcaatcgctaccaaaaccaatgccactgttatccgggagcagccaaaggacgcactaacatagagctacgcgagcaattcatattggccgatggcgtctcgcagagcatggccgcattcacgcccagacgttccacgccaaatgcggccgccactgcctcctcctcaccccatgcccacaatggcggcagctccaacttgcccccatatatgagtggacagggtcccatcatcaaggtaaatcaatcagcaaattgaatctgcaacggaaagtaaaggggagcctaagtgtcacaccgaatccatttccatcgtttttgtcgccaatcggaattaacttcttttgaagaacttaatacccaattatctactcttaaatattctttacttaaaaaccctcaaaattctaaactttggtcaaatcaatatgatatgtatattcacttaaaatcatttcaactaacctattatatttctgtttgctttaaacattttaactttctttaaatttaactataatatccaaaaagtattttaaaaagaggttctagctttatagaagaacaaatattctattatttctgaaaatgacaaatttaaacgaaattgagaaatgagaagaggtgccaaagtgttaagtggttaacgtcaaagggttaaacccttgctcaaatcccgatcccaatccatttacccatccaaacatatttccatccagcgagggcacaaggtaagtgctcctttcgtccttttttttgggttcgttgtgtgtgttgttgacaaagaaaagctattgctgctgcgccgccgactcttaaaatataatttctatatatctgcatgagaaccgaatacttggtaacaatgtgttcacattttttttgtatttgtatttgattaagtaattgcgacattttttagttaatgctagagcatacatatagtacaccccacactattcattgatgaggctatgaggtttttaggccaggttaggttgttgtccacggcttaaatgatcataaaccgtttgccaaatgaaatgcgttaattcattgttggttaaacatatcgaaattatatccttagccgacgaacacttggccgaactaatgccaatatttgagaaaatccgcgctcaagaccaggttccatgcgcctttcccattcacatgggtgccggcggcacggtattcgtccgttgcaataccagccgttcggtgccgctgagtccacacgtgctgcattgtcatccaacaacacactgggtaagttcgcaggcagcaggagcagaagacgccgaagctgctccagcaggagtgcccgatattggtttcatctttcacgggagagggggtgctaaacctacatgaatgatcccacattataatatttgtttatttatttttctgtaaaggtacgcgagcgctccgtccgctcgattcccatgtcacgaccgtcgcgctcctcactttcggccagcactcccgactccctgagcgacaacgagggtagccatggaggaccttccggccggtacacaccacgcaaggtcacctacacgagcacgcgcacgggtctcacgccaggaggctctcgtgccggctccaagcccaactcgcgcccgctcagcagacagggatcaaagccgccatcgcgacatggctccacgctgtcgctagatagcacgggttagtagcaagcaaatgagctcgtttgcagatctttggctgactggcatgtacttcctatttttgtagacgatcacacgccctcacgcattccgcaacgcaagccttcaacgggcagcacagccagcggtaccactccgcgtccggcgcgactttcggtgaccaccaccacgactcccggcagtcgtctcaatggcaccagcaccattacccgcaaaaccgcctccggatcggctagtccggcgcccacaaggtagggattttattattaaggcatctcatcgaatcaaatcgaaaatagcggggaaagtgggtgggatcaaacactattaattattcaaactcttattaatttattatttttattttcacactattttcggtttaccgcattaactattgaccactcacacaaaacaatcaacatcatgaaacgctaacttacaactgcaattggcatttgaaccatttgaaatttgcttgaacgcaactaaaaaaatgcaactaaaactcgtgcctgacaccaccgcccctcccaaaacaaacaaaaaaaaaaatatcaaaaaatgaaacagcaacggaggcatgagtagatcatccagtataccagcactaacaggcttcggcttcaaaccaattaggtaatacagccacgaacggcatagaacacgtaacataaatacatactcataagtttaggctagatttaagatcgatcatgtatcttaggcagcggttatggtttatctttgctaactatcgttgtacttactacctcccccaacataccaaaaagccggccatcacggataccgattaagataccctcattcgattccaagtcaacatcgcccagctcgactacgaatccaaccagcttggggtaaagttgataagcttacaacaaagacatttactagtcaatttcaactcagtctatagcaagtaattattatttgatacccgtctaaagttattgttaagtttcctcgtttgttcaaccttttccgcgcatgtgtatgttgatgtgcatgtccatgccacaaaaagaaaaaaaaaacagaataacaagcaaaaaatgctttcgactaatgcttaagttcgattaccagattacaatacatatttttgttatttttatgtgttatattgttgtgatcaactattgaaagaacagtcactaatcctgatacttttcgatcccaggcgaaacatcagcggtagctcaacgccctccgggatgcaaacgccgcgaaagagctcagcggagcccacattcagctccacaatgagacgcacttcgcggggaaccacaccgacggagaagcgtgagccattccggctataggaagccaccgttatggctgaggacgacgacgatagagaagcaaaagaatgccaatatttaaaccacatacaaaacactcaactctacgtactaactacgcactgaagttctaaactaaaccccccaaaaaccactccccaaactaatcgaggctacattagcaatgaatgtagcagcaggaacagcacacagttctacaaaagagactaactttgaagtgccctaatggattggtggagcgaaacaatttatagatgtttatactatatatattttgtaaaagacacagttaagatgaaagttatgcagacatatagctagcacacaaagttgatcagacaagcaacctacttacgagtactactactactaatactaccttttgctactactaatttgtaatgcccactacctttattcactagttatacacgtttccaaaattatgatttgtatatacttataaagcgaaaagcaagcgtaaattaatgaaaaatacactccaagtgctctacggcaattaaacaaacaaaaacaaaaaaaatacaaacaaaaacacataaaaaatatcgaaaaacttaagtgaaaaaaataaaacattcgaatgaaatgccgcggtctctgctgcaaaccatcttgagtctcagttctccactggaatcgccagtccggtggaattctagccaggagtggcacgtggcagaggcggaacggccaaaaaaataataactaaacccgttaaagagataaaatttgattttgttctgttattaaactaataggaaagtgaaaattgtaagccgcataaagaaaatatttaattatatactaaaagtcattactataagtttaattaatatttaactgttaagcgacaaacacacacacacacacagattttgtattgcataattattatgttttttatatgcaatatatcagcgaatgaattacgatgcagatgcagaagggcgaaagaaatcgaacccgtttctataaatactgtaaaatactaatactaaattattttgttgtacgaaacgaaagaaatgcattaaaactcgtgttttgtaattctatttaattaaaacaattcaaatgcgaaataaacatttacaaaaaaaaaaaataacaacataacccgacgactttttactttaatacccggcgataagaaataaaacccatgattctgttgattttcgaatttgatttattcattgaagttctcaatcgtagtagttatttgacacattgaaattgaattttcgatataataccatgatcgatccgtgcggatcactatttggttttctacaaaacactcaattaattgtgatatttaaatatgtgtgcatgcatgctaatgcagatgccctgtatcggggttactcctcctcctcctcctccttctacgttccctctattctgaccaccatttactgactagaaatgccgcttcaactttaatcatccaactaactcaagtacaagctgggttcatacgtttctttgtgctatgggctgccagagggggtttcatttcgactaaactttgaagtgcagttgcagattatgcgtaagtggatatcaataccgtctcctcctcgttcgtcccgatgctgtggtgtaatctcgtcaacgccagcgctgccagttggtgctcctaaatacatgctgctgctctacgcgctagctttcaaaggccctaataatatcggcttggcatgatgccgcaagtcttttgtaaattattataaatatcattatagttaaggtacaactaaatatcatcattaatatagtccaaattagctaacacggctcgctaaagctaactaaacataaatacataaatacatatatacgaacgtacgaacacaaacaaagtcacagaagtgcgcctcataaaactaaacctgggccgtttgggttggtgcttcattgtgtattagcagcatggcaacgcaatgggtatccggatccccatttctaccggaagccatcgtcacctggcaagcccggaactggctgactgggccttcgcctgcttgctattcgtgttgaccgcattcgatgtggagccacctgcgttggctggagctgcagccgcattctgctccccccgt

SEQ ID NO: 28127 - DNA, 27845 bp, DROSOPHILA
cgagacgccgccgcacacatttcacgatacctctccataaatatttgcaaaaattgtatagaaataaataaaacgcatgcgttcctcgggaaccgcggaattacaaaactgaacgaaaacaacgggaacgctttttcgtaaacccggaaaatctttataaagtgtaattacgaaaatcggcgcaaaagaaacgcggcaatacgaaacgatcttctaacgaaccttagaacgaaacgacacaaagtgaaacaaacgaaagcatcgataactgcgtaagcagttcgattataacgataacatgcactccagctcacaatcgacgctgaagcgcacacaacaactggtgcggcagacaaatggtggcaggggcgatgttctgagcagcggatccgaagtggttcactcctcccgaggaccggcaataaccaccaatatcgatgactcgaacttgcgctatcgtcatgagacaaaaagggagcgcactgtggaagcggtgattacggattatccaggtgtatcaccccttggtagcgttccccatgaacgaaccaactttgagcgcactgtgaccttccaggatcccacgggaaattcacgtcgcctctcggagactggagctttggtaccggccggtgcaattccaacgtcgtcgactcattaccaacaggtgacgcgaaataaacgcatctccacagaggtattgggctccagcgtggaaagcaccaagacatcgcaaagagcgccaaatggccatcgccgtgtaaccacgcacattgtccggaaagtgaccactttgagcagggcggaggagaatgctcagcctgccgaggatttgttgcctccggctaaaatgattcgcagctcggagttggagtatcgtcgcgccctgccgccggctatagagtcgtcgtccacgcagcgcagagagatctccgatattgttgtgggcaaagaggacaacgtatccgctcgggaggctctgctgcgctgggcacgtcgctccactgctcggtatccgggcgtacgtgtcaacgactttacgtcgtcgtggcgagatggattggctttctcggcgttggtgcaccgcaaccgaccggacttgcttgactggcgaaaggcaaggaacgatcggccacgggagcgcctggagacggccttccacattgtggagaaggagtacggagttacgcgtctgttggatcctgaggatgtggataccaacgagccggatgagaagtcccttatcacgtacatttcatcgctgtacgatgtgttcccggagccaccctctatccatccactctttgacatggagtcacaacgtcgcgttcatgaataccgcgacctggcccaacagttcatctactggtgccgcgagaagaccgcctacctgcaggagcgttccttcccgcccacgctaattgagatgaagcgtctgttgagcgatctgcagcgtttccgcagcgacgaggtaagcgcccgcaagcgcgagaaatccaagctcatccagatctacaaggagctggagcgctacttcgaaacagtgggtgaagtcgacgtagaggctgaactgcggccggatgccatcgagaaggcctggtatcgcatgaacacggcgctgcaggatcgcgaggttatccttcagcaggaaattgagcgactagaacggctgcaacgactggccgataaggttcagcgcgagatcaagcatgtagatcagaagcttaccgatcttgagggccgaattggcgaggaaggtcgccgcatcgagcgactacatcccgtggacgctaagagcattgtcgaggcgcttgaaaccgagatccggcacctggaggaacccatccaggacatgaaccaggactgccacgtgctcaacgagggtcgctatcctcatgtcagtgagctgcacaagaaggtcaacaaattgcaccagcgttgggctcaactgcgcaccaatttccacacgaacctggtacagaagctgtccggtttgaagtatcccgtccacgagaccacggtgacgcgtcaaacgcgcatggtggtcgagtcccgtcagatcgacacgaatccccatttccgcgatctgcaggagcacattgagtggtgccaaaacaagttgaaacaattgcttgccgctgactatggcagtgacctgccgtcggtcaaggaggaactggatcgccaacagcacgagcacaagatcattgatcagttccacacgaaaatactcaacgacgaacgtcagcagaccaagttctctggagatgagctggctttgtaccaacagcgtctcaatcagctgcagaaggtgtatgccgagttgcttagcacctcgacgaagcgtctgtccgatttggattcgctgcagcacttcctgggacaggcctcggcggaactgcaatggcttaacgaaaaggagcaggtggagattacgcgcgactgggcggacaaacaactcgatcttccctccgtgcacagatactacgagaaccttatgtccgaactggagaagcgtgagatgcactttgccaccatcctggatcgtggagaggcactgctgaaccagcagcatccggcctccaagtgcatcgaagcccatctgacagccctgcaacagcaatgggcgtggctgctgcagctaacactctgcttggaggttcatttgaaacacgccacggagtaccatcagttctttggcgagatcaaggatgccgagcagtggctggccaagcgtgacgaaatactcaacagcaagttctcacagtcagactttggcttggaccagggtgaaactctactcaggggaatgcaggatttgcgcgaggaactgaatgcctttggcgagacagtggccacactgcagcgaagagcccagacagtggtgcctctaaacaagcgacgacagccggtaaatcgacaaggacccgtgcaggccatttgtgcctacaaacaacagggtcaactgcagatcgaaaagggcgagactgttacgctgctggacaactcgggacgtgtgaagtggcgcgtgcgcactgctaaggggcaggaaggacccataccgggcgcttgcctgctattgccacctcctgaccaggaggctatcgatgccgccgaacgtctgaagcgtctgttcgatcgatcagtagctctttggcagaagaagcatctgcgactgcgccagaacatgatcttcgccaccattcgtgtggttaagggctgggactttgaccagttcttggccatgggtcctgagcagcgcacggccatccggcgtgccctcaacgacgatgccgacaaattgctgagcgagggtgatccaaacgatccgcagctgcgacgcctgcgccgtgaaatggacgaggtcaatcgcttgttcgatgagttcgagaagcgtgcgcgcgccgaagaggagagcaaacaggccagtcgcatcttcaccgaggaatgccttgccatcaagagcaaactggaggacatggcccgtgagctggatcagattatactggctccgttgccacgtgatttggactctttggagcatgtgctggaaattcattcggactacgagcgcaggttgcacctgttggagcctgagttgaaacacctgcaggaaacattccgcacgattgcgttgaagacgccagtgctgaagaagagcctggacaatctaatggagctgtggaaggagctgaacactcaaagtggcctgcacaaggaccgtctgaagttgcttgaggcttcgctggctggtctggaggacaatgagcatgtgatttccgaactcgagaacgagctggccaggcaccaggatctgccatcgaccgctgagggcctgcagcaagtgtttaagcaactgaaccacatgcaggacatcattacacaacagcagccgcaaatggataagatgaacgatgcggccgatcagctgggacgcatgggagtgcccaccaaggtgctcggcgacctcaagagactgcactcgaacgtggagcgcctgaacacgcgctggagtgcggtgtgcaaccaattgggtgaaagaatgcgctcatgcgagacggctatcgggcttatgaagaatctccagtcgagcgtgcaagtggaggaatcatgggtggatggcaccacggagcgactgtctgccatgcccaccgccacttcggcatacgaactagataaactgctcggagctgcaatcgaacgaaaaccaaaaatcgaaaatgtcaacgtggctggaggacgacttatacgcgaagctaagatctacgatagcaaatgcctacgcttcgtggactggctggtcgaggcccgtccgtcgttctcgccaccgcgccgggatctccggccggcggatagcgatccgggcgccacacagtattacagccaacgtttggacaacctgaacacgaagaacgacagattgctggaacaactgtcgcagcgtctgaaaacagcaatcgaagtcaatggcagcgatggtctgcaatacgctgagagtctacagaaaccgctcaagacctttagggttgacttcagtgcgggcagcgtgccaactggcgatggttacgctgcgcgccaggaggatctctacaccactacctacagcaccacacaaatcagctcaacgaagacaacgaaaagctctacgaagagcgtctatagtagcgatggcttggacgccgctagtcaggaggttagcactgctggcctgcctcaatcgcagatccaattcaacgaaatccgtacgctcaaacgctctcaacagctgggtggccattccgtgctggatatagccggaatacgcgatcctcgtacgggtcgcgttctaaccatcggtgaagccatccagcttcgcattctggacgtgcgcaccggcgagatgctagtgggtgatcgccgtatcacgctggaacaagctgccgaccaaggactgatcgatttgcaactggcaaagcaattgcttgagcctggtgccggccgagatgccagcggacgggagctgtcgctcctggaggttattcagcgcgagattagcgaagcggaatccggttacgagacggccgagaagcggatcaaggtaaacaacacagtcaccgtagagcaaacttccggagagctgggctctcccgagaatccacgcaacattgccgacgccattactgcggggagtgtggacaccaaaaccggcctgtatcgcgtcaaatccggacagacaatcagcctggcggaggcctacgagcgcggctacctcatccggcacgagtcggtgacaatcaaatcgaatgcgctgtgcctgagcgatgcgattgcgcatggcctggtcgatggcgccggctggatagcggatcgcaactccggcgacaagttccgactggattcggccattgccaatcaactaatagacgcgagtgtgcgcgaagtggtggacgcgaaacgcgatacgaagatcacactgcaggaggcactgcagtcgggcgtactgaatgcaaaaacgggtcgttatgtgaacgaggtgaccaaggagaagttaaccttcgcagaggcgcgaaaccgtcagttgatcgtgaaaccgtacacgctgaaggacatctgtgatctgaatctgctcgataaacaggctcagatcacgagtcccatgcgccgcgaaaagttaagcattatgcaggccatcgaggccggtgtactcgacggtaatttgctcaagtgtatcaccaaacgtaagggtgaattggtcacccttcaggaggccattgccgatggcatcgtgttgccggccgagtgcaagtaccgcgactttatgaccggtgagctaatcagcattccggaggcagtggaacgcggtctgattagctcggtggcgcagcgttcgatcttcgatattgacgggttcaaggatctgaggagcaatgactatgtaagctttaatgtggccctctcgcgcgatcttttgcgtcgcaagagcacgggctttgccttagagacgggtagggatagtctggtgccactagaggtggctgttagtgagggactggtgcgccaggaggtgtacgagatgtttagccgtggcattggcgttcagaatgccagtggtaaggagcttagcgtctttgatttggtctatcacaatctgattgacccgaagactggttatcttttggatcccaagaccggggagacagtgcccctggacaccgccatcgagcggaagtttatcactcccgagggtgctctactactaagtagtttgctcaatatcactttgacaacggaaacggtgacgcggacgatcaatcgttatgtgacaatcagggctggttcccaggagccagtcgacagcgtgttgctcaccttcacggaggcagtgcgtcaaggtttcattgacgaggagaggcaacttttcaaagatcccaaaacgggaaatatttactcagtacagcaggccctcaactatggcttgttggttcccgatagcaatcaaacagttccggagccaacaaataggaaaaagacaaaatccactattaccattgtgaccaagcaaatcataccggaagcagagcccatcaagctaaacacacagcacaccaagtacgtcgagaagtcggtggagattcctatttctcaggaactagtaaagccgcatcgtgtggtctccgaatttattaacttggaaaagtctagctatatcgaacaaaatgtaacggagcgtcagatcatggagttgcctccaggaggatggcgactaaaggacgccattgagcagcgcctgtttaatccagatacgggagtattccatgtccagggcacagatcgattggttaattttgaggagtgcatcaacaagcagataattaacaatctatcgctctccgtaattgatcccaacactggcgacaagatctccgtgcaatcagcctttgaacgtgatatcttggacagttatggcaactatacgaatagccggaaacaggtgcagggtatgcgtagcgctattgacgagagtaagatcattctggaaactgtcccggctacgagaggagccaaccaaaagacaattcttcgcatcactaaagtaaacaacattccagatgtgttagaggtttccacgcccctgaaagatgcaccgcccaagtttgtcgaggtgctcacctgccaacgagagctcgcctctccagagcccctgcaaattgcaccgggcgccatctatgatccgtccactgccctagtaatcttcacgcaaaccggagagactgaaaatatcttcgatgccgcccgtcagggtctggttgatgagcagctaattaaaatcgtggatccgacaaccaagcaacccatttccgttaccgaggcgatagcgcgttccatttacgatcccaagacagccactattcttgattctgagggacagccggtggatttgatcacagcaactaaacttggactattgagtgtggtaggtgctccattggttgccgccgagggagccctgcgaactgtgcgtttcgtcacagatccacgaactggtgagcaaattccagtggaggtggcctacgagcgaggcattgtctctcgggatcagttgcatcgcggaaggtcctttgacagtgaacccgcaacggtagaggacaaagttgtagtccttcagagaatgcgtaaggtcattctcaagccaaaggatgctttacgaaagggaatcatcgacgaagagacttgtgaaatacttgaaaacaccagtaacttcactaatcccaaaggagaggtggttaacataactgaggcactgaacaccggtctaattgatggacgacgtggtcaggtgatcgatccccaaaacaatagagtcttaaatttgaggcaagcagtggagcagaagattattgattccgagcagactaaccatattcttatgccgttggccaagagcttatcggtgccgcgtctggcagaccagggattaattgatccacaaactcagactattgtccatcctgagagtggttatccactgagcatccatgaggccatagtatgtgaggttctggatccgcattcaaaactgcataaacccgaaaaatgcacactagaggaagcgatcaccaagggcattatcaatgcagatgattccacattcaactataagaacaagacactcaacattactgaagccattgaagcgaagctctttgatcccagttacgatcagcaaaaatctaaggtggaaattccgccggtgggtatgatattccctgttgctgttgaaaagagccttgtggaaccgtccaagcgtgttgttctgcatccaagtacaaagaaagcacttccaattaagcaagccattgaggagaactttatcatgtccattccctattctcccaagccagatgctatcgaagtggttactgccatggagcaggatctcatcgatgtagctgcccaaacactaactgtaccgtccactggtgaacgtatacctctacgacaagctatggaaaatggtgttctggtggtaaagaatctctcagattttgtgattacccagaaacccattcccaaaacggagatcatggagacggtgcgtgcagtgcacacggtgactactaaaaccattgagcttatgcaaggctacgtcctcatttctaacaatgaagtgcagaacgttaacacaggcgaggtatgcagcttggaggaagctaaggagctgggaattctgcgcgaagaatccacaactcgggagacaaaagcagcggccggcgaaagtccggaatcggtgggcgacgttggtaccagtggcgatcaaactgttattgtagaagagcgcacccagacagttgtggtcagttcggatacccgcaagcaagagatgcaagtagttagcacgacgcaatccacgaaggatacatccgttccaagtgtaagtgaaatcgagacaaagggcagcaaggagccatcgaagacgttgcaaaatgtgaaagatgccgccaaattgggtgcattgggcgtaatcgcagctcctgtactggccggaggtgccatcgtaagtggcgttaaaagccttatcaaatctgtgaaatctcccacggaagatgccaagagcactgaaaaacctaaggaacctcaaaccagcttcattgaacaggagcgccgtaaagagctacagccgcaacaagtgccaagtgaggtggataatctcctcagtgaaacggagaattttatcagctctacgactgccaactttattgcaaacgaaaaacagcaggataagcccgatacgttgccacaggaaagcaatctgcccttggaagttgaatcaacaagcactctgaccacaacaacagtaacaacaattactacatcaagtacaacaacggagaccggaaatctggagccagttgtggtagaagatgtctcgaccacagttaaggaggataaagtggtggttaagccaagtacagttccagaagataaaacagaggtttccaaaataactgaaaccataaccacagtgacttctaatgaaacagatactgtaccagaaaagatatcacagaaatcagcttccgaggagtcagcaaagaaggatccagtggttacgaaagacacaagttccaggccagctgaaacggagacatctcctaagcctgttcaaaaggaaccaactcccgatccagctcaaaatacagaatttcctgaatctattaaaaaagatcctactcctgagccggattacaaggaaaccgctaccgaggcagcacaaatcacaccaaaggaagcttctcctgctccaaccaataagaacgaacaatcagctgaacctacctcaaagccagagccaatgccccgaactgctaaaaaggaggagatttctgaaattgagcccccgttcacagcaccactggctccatttgttgatcaattagcggaaaccaagatcactgaaattaaaacagaatttaaagaaccagttacaagttcccaaactatcacaaccatcaccacaacggttaaaacagtcgatgaacaccccatagtcgaggaagtagatgaggtcagcaaatctgagaaaattgtggatgtggaagaaccaacagttcaccaacaagaaccgattaaggtgaatgagacgagcgatgattccaccaggactgaacctaccaatgaaatagtgcatgaagaaagagttgtcactgtcgaagagccgacgatcacagaaactaccgtaacaacaacaactatcactacaacaacaacatcttcaagtgaggaaaccctgccccaagagaatacagccacagtaaaggaaacgcctttgaatgagcctgtgccttcatctccagctgaaactaaagagattgagcagacaactaatgatgatcaaaagaagccggaagaaattgtagataccgaaaagaaaacaacagagcagaagccggtggaaactatcccaaccgagccaataagcacatctgaaacaacaacagtgactcttaccaccaagacaacaattgttgatgaaggaaaactacatccaccaagtgatattgagcaaattattcaaccgcattctacttcggacaaacatcaatctcttgttgatttcattgaacaggagaagggcacacagccagcggaaggtggtagcaatattttgcagaatgtgaaggatgctgccaagctgggcgctctagccattgtaggagcaccagttcttgcgggcaaggctttggtagatgctctaaccacagaaaagacacttaagccagaacactccacatcacaagttgtaaccgagacagtggaagaactaccaacagagataattaccacaagcactgctacattagttaccaaagtcaccactacaactaccaccacaacgacatccaccagtgagggcactcccgatgatgaggctctggatgtagttaaactgcctgctgaattggttgaaagctctgtaaagcgagaagtgcccaggacactggccattggcgatgccatctcccaaaagttgattagccccgatgagtgccaggtgatcgtagatggagaacagcagtcgcagaccgtttccacgctactcaaggaggagcagcttagcccattggacgaagtacagatcatcgacgacaaactaattgttctgcagcaggtgtcttacctggtagacgcagacacagaactgacgccacagaatttgtatgaacttaacatctacgatcccgagaaccaatactttattgatcccagtactggccagaagatttccttccatacgctggtatttgacatgaatgtttttaacccagaaactattttggtaaagaactttagtaccggcaaatacgagactcttacagcagccttggagcgtccacttctggacaggcacacgggtcacatggtggatccgaagacaggcaagaaaatcccattctttgagtgcgttgaccgccaatggattatccgagccaatccggaagagcaaaagccatcgggcatcgagaacgtgacgatagacacacagactggacaggtggtgcttgacgatggtcgggtttgctccattgttgaggccatcaacagtggcaagctggacattcagtcgatatcggtgcgcgacccagtcagcggtgaggtgattccactgcgtatggcaattgagttgggggtggtagacatgcaggcgggcacagtgatagacattcagacgctcaaagagattcccatggagctagccttccagctgggtttcctagtgcccggtgcccgcaaacccatttccctggaggccgccgtacgcaaaggtctctacgacccggagacgggaaaactcttcgactcagagagtcaaaaccaggtcgatgttcagaagtcgattgaaattggtttagttgacccgaagatctcattgattgtggatactgtcactaagaaggaagtcaagctggattgcgctatcgaagacgatttggtgctgcccgccacgggtcaaatcaaagacaacaagaacaacactttggtgcccttcgatgtaggtgtacaacagtgtttgctgaaaaccgacaacgtcacctggagcctgccagagttgcttcagcgcgaatactacacgcccagcactggcaaggttcttaatcccgtcaccggcgaggagattcttcttcagcaagccattgaaatgggctttgtggagctagaaacgactttggtcaaagatgtcgatcatgataaaattttgccaggcaaggaggcggccaaggtgggtcttttggacactgttcgcggaacactaagctcgcccaacataagtctcgacgaggctttcgtaaagggctatcttataagcacgaaaaagccgctttccctggtcgattgtctgctgcgtggtctttacgatccttcgacagcaaaattcaccatcgacgacaagcagttggacctgaaggccgccattgcccaaaagctcattaatcccgaagagctggttttgcttgaccccaagacagagtctattatttccattacagaagctatcgcgaagggttatcttgatccgattgagggctatgtgattaacccatatgcctccaccaaactgtccctacacgaagccctggagaatcgtattctcatcccgcccaaacgaaagcgcagcttgcccgatgctgtctaccgcggtctttacgaccccaagactggtcaatttagcaatacggtgacccgcgaaaagctcacaactgaacgtgccattcgtaggggcatcctcgatcccgattcgacggtcgtcaatgtgggctcgggacagatcattccatttggggtagccaccgagactggaatcgtggacagtaaacatggtacggtgagggatgccgatgatcacccgattgactttaaggaagcattcgatcgtggtattttggttgaagccaagaagcctcttcgtcttattgaggctgtggtgaagaatgtctacgacgaggtggatggacactttgtcgatccgaagtcgggtgagaagctaaactttgccgaagccttaaacacgaatttactggacgagcatagtgtgcagatcagagacttcaagactggtctgtacaagcagctgaacctaacgcacgctaaagacaccggcattattgatgcccaaaattccaaactactgtataacaaccagacaatgacccttaagcacgcctttgatattggaatcctaatggatgtcaatgcgcccatcagcattcagcgagcaattcatcagggactattcgacgacaagaccggaaagctaagcgatcccagaactggtcgccagattacattacttgaaagcatgaggagtttcgttgttaatcctcacctgccctgttacttcgatgagcagaccgaacagatgtatactctgagcgagacctgtagaaatggcatcatcaatagaagggagggtgttttccgggagccgggaagcaattcgtttgttcctctgggcgaggccctaagcctgggtctcattgtggacattgagaatgccggttttggtttgtacgaactattgtcgatgggcttctatgaaacttccacacgtaaggttctgcatccagtcacaaatcgcaagcttaatctcaacgaagcttgcgtggaggatgtagttagcctatcatccagcttagtcaaacaccacgagaccggcaagtaccttcggcttgccaatgctattaaggagcagttagttgatgactctagaggttgttacaatctgggcaacgaacagttggatctccaggcggctagggccaggggtttaattgtttccaatcgtcgcctcctcagccttgaactcgtattgcgccaacaactttatcgccccgaaactggcaaattctgcgatccaacaacgggagaatatctagacctaatcgaagccatccattcgggtttcatagatcccgcgactaccgtatttaaaaaccagcttactggtaaggagttaccgctaacagaagctattgagaatggtgatattgatgtgtccaagggtagagtatttgatcccaagtctaagtcagcttataactacgacgtggcactctcgcgcggaatcctggtcaccattactcggccactaaccgatcgcaatgatgtggtacgtcgccaggatagcgttgaattactaaatcaaacacccgtgagtgttgtgattagcaaaccgcgtgaaatgtctctcgaagaggccattcgttacaacataatcgatcccaagaccgcgctcgttcgcgatttcgatagctttaagttcctgccttactcggtagccgtggaacgcggtctcgtggacaccaccaagcgcacactcgtggatccaaaggccctgtactttgccttcgatcccactttaatagtttacgtacgtgaaccggtcacctttgaccaggcggccgagtccaagtgtctggacttgcagaccggactgctgacctatgtgccagcaagtgtacctggatccgcaacagcggcaccagccagcgacgatagcgcaaacgattcgctgactgtcatcgagacgcccaaggtatacacgctcaaggaggccgccagtgccggtgtggtggatcccgactcggctctagtcaaggacttggccaaggctaagctggtccgtttgccagaggccttccgaaagggcctaatggatgccaacaaggcgaacgtgctcaacacccagacctcgaagctctgcaccctgcaagaggcctacgaaagtggcctgatctgcacgcctaagcgttcattcggtttgctagaagccatcacctttaacttgtacaacccaaccaatggctgcctagttgatcccttccaaatgcatccagatatcatccggcggcgcaagttcacgctggccgaggccattggctcaggtctggttgatccatcgtcgacagtggtgcgtgaccccagcactggagtcattgtcccactgacggctgccattagcagtggtctaatcgatgccaccgagggacgcctgaccgatgccaacgagccgaagaacaacatcgacctagtgaaggccgccgagaagggtctgctcctgccggcagaacagaggcaagcagtattcgagaagttcaacatgtgcgaagagaatgtcaacgatctgttgaaatgggttaccactgtggaacagaaaatctcaagtgtcggcggacctcgtgaaaagattgatgagttacgcaaccagattaatgcccttaagcaaatcaaggatgagatcgagtctcagcaacggccagttgccacttgtttggagcaaatccgtcagatcgtgctcaccggtggtgatgttttgtctgcccccgaagtgaccactctggagaactctggccgggagttgcgttcgcgtgtggatcgtgtcaacgatcgcaccgtgcgtttgctccggcgcctggaagcaggtcgagatgagctcaccaaactgcgcagcgaattggatgtattctccgattggttgcaagtcgcccgacgcactttggaggacaaggaacgttccctgtccgatttgactcggctgccctctcaggccgattcggttcgtgagtttgtcagcgatgtgattgggcaccaggccgatctgcggttcatcacaatggccgcacagaagtttgtggacgagagcaaggagttcttggccatactgaacgacttccgtacttcactgcccgaacgcttgccacatgttgagccactgtccagtgccgagagtcccatacgccaagaggtatcgctggtctcggcacagtacaaggatctgttgaaccgtgtgaatgctctgcaagatcgcgtctccggtttgggtggacgccagcgtgagtaccaggatgcattggacaaggctaacgagtggctgaggagtgtacatccgcgtgtgtcgcgcattatctctgaaccgattgccggcgatcctaagggagtacaggatcagatgaacgaggccaaggctctacacaatgagctgctttctagtggtcgcttggtggacaatgcgcaacaggcacttgataatctgctgcgcagccttggtggccaactcagtcccatggagatcaatcagttggaactgcctattgccgatctgaagaacaactaccagcagcttctggataatcttggtgagcactgcaaaactctggacaaaactttggtgcaatcgcagggcgtacaggatgccttggacagtcttgtgggatgggttaaccaggccgaggataagttcaagatgaatctgcgacccgcctcgcttatcaaggagcgtctgcaggagcagatccgcgagcacaaggtcctgctagccgatcttcaatctcaccaggccagcatcgacagcgttcaagtttcggccaaacatctgcttgccagcgcatcgaatgcacgcattgccaagaaggtggaatcgaatctaaacgatgtgaccgtcaagtttgagaagctctacgagaaggccaacaaacgtggtgaattcttagatgacgtttacaaccgattaagccgctatctggatgaaatcagcaccgtggagcagcgtatggccagcttacaggaggctctagatagccgcgagacaagcctgctttcaactgaagagttggctcgccgcatgaacgaactgtcgcgtgacaaggaccaactggctccgcagtttgaggattgcgtgcgcagtggcaaggatctaattagcctgcgtgatgtcaccgatactggagttttgcgcgatcgcatcaaggcactggaatctcagtggcgcaacattaacatcagcatcgatgagcgcgccaagctgtccaagcaaaaggccgaacaacaactggcctacgagggactgaaggatcaggtcctctcctggctggccagcactgaagcgcgagttaacggccttccgccggtagcaatcgatctggacaggattaagcagcagcatgacgagctgaagcccatatgcaaggattaccgcgactatgcaccaactattgataaaattaacgatattggagcacagtacgatgcgctaatccgtccagagagtcctgcccgcaaacgctccacttatagtccgattaagcggaccagtccgttgcgccgcatgtccggagacgctagaagccccagccccaccaagggaggcatcctgtcgccactatcgactggttccagtggattcggtagccgcagatcctcccaggatggtttccagctgtctgagctatctccggtgcagcagcagctgagcgagatcaacaatcgctacgggctgattggcgtgcgtctcaatgaccgccaacacgagctggacaacctgaacgaggaacttcgcaagcagtacgagaatctgaagggactagctcagttcctggagcgcattcagcgccaattgcccaaggagtccgtatcaaacaaggatgaggccgagcgctgcattaagcaggcgcgcaagatcctcgaagacatgtacgagaagcagagtcttcttgacaccaccaaggctcaggtgaaggatatcctccgccgcaagtcagatgtgcccggtgccgaacaattgcgccaggagaacgatagcatccaagagaagtggaagaatctcaacgacatctgcaagaatcgcattgccttctccgagaagctgcgtgactttttggacacccatggaaatctgaagagctggctggacagtaaggaacgtatgttaaccgtgctgggacccatctcttccgatccccgtatggtccagagccaggtgcagcaggtgcaagtgcttcgcgaggaattccgcactcagcaaccacaactgaagcatttccaggagcttggacatgatgttgtcgaccatttggccggcacacccgatgctcaggcggtcgaaatcaaactgaaggacattctgggcaagtgggatgatctggttggaaagttagacgaccgggccaatagtttgggcggtgctgctgacagttccaaggagttcgatgctgctgtaaatcgcttgcgtgaggctctgcagaacataagcgataatctggatactttgcccacggatggcgatcaccaggagaatctccgcaaaatcgagaacctggagcgacagcttgagggtcaacgcccgctgttagccgatgtggaacaatccgccgccactctatgcaacattctgggtgatcccgcctcgcgcgctgatgtcaactctcgtgtcgcagctctggagaaacagtatttggcccttcagaagaaactggataccaagaaggcagaaacagaggcttcccttcgggatggccgccactttgccgagaattgctcaaagactcttggttggttgggcggagagctctccaacctgaccgacaggcttttggtctctgcacacaagccaacactgcagcaccagattgacacccatgagccgatctatcgtgaggtaatggcccgtgagcatgaggttattatgctaatcaacaagggcaaggatctaaccgatcgccagcaggatcgcggagttaaacgtgatttggatcgcatccagcagcagtgggagaaactgcgccgtgaagccgtcgatcgacacacacgactgcagacgtgcatggagcactgcaagaagtactcccaaacttcggagacattcctggcctggctgcgtaccgcggaggataagttggctgatcttacacccggcgtattgtcgaaggcaaagctggagacgcgtctgcgtgatctgcagaccttccgtagtgaggtttggaagcattccggtgaattcgaaaacaccaagggattgggagagacattcctcagcagctgcgacatcgataaggaacccattaaggcggaacttcaagacatccgcgatcgttgggagagactcaacaatgatctgattgcccgtgctcatgaaattgaaaactgctcgcgtcgtttggacgattttaatgatgagttgcgaaacctggatcattctttaggtcgttgcgaggatcgacttgctgcccacgatgctctcggtggagctgccaaggatcccaaacttttggagcgtgttaaggccatacgcgaagagctcactaacttgagcaagcctttgcagtcacttaaggctctggccaaggatatcagtgctgaggctagagctgctggcggagatgctgatcatttgaccagtgaagtcgatggcctggccgaccgcatgtccgagctacagggtcgcctggatgatcgctgcggagaactgcaatctgcagccaccgccgtatcccaattcaacgaacaaatgaagagtttgggcattgatctgaacgatctggagaccgagattgaaaagctttcaccgcccggtcgagaaatcaagattgtccaagtgcaaatcgacgatgttggcaagatccagaccaaattggatcgccttgtgggtcgtttggaggatgcagaacgtgccgctgatgttttggtagatgcaggattcgctgcagacaccacccagacccgtgagcaaatctccacgctgcgtaagacattgggtcgtttggacaacagagttcgcgatcacgaggataatcttcattccactttgaaagcacttcgcgaattctacgaccatcaatcgcaaactctggatgacattcaagacgtaagcgatgagttcaagcgcatgaagcccgttggctcggagttggatcagattcgccgccagcaagaggacttccgtaacttcagggagcgcaaggtggaaccactggccatcaatgtggacaaggtaaacgttgctggcagagacctagtgcgttcggctggcagtggtgtttctaccacggccattgagaaggatctggaaaagctaaacgaccgctggaacgatttgaaggagcgaatgaacgagcgcgatcgccgtttggatgtggctctgctgcaatctggaaagttccaggaggcgttggccggtttatccaagtggctcagcgacaccgaggagatggtggctaatcagaagccgcctagctccgattataaggtggtaaaggcacagcttcaggagcaaaagttcctcaagaaaatgcttttggatcgtcaaaactctatgggctctctagccaatctcggcaaggaagttgccaaccactgtgaacccggcgaacgtgcctccattgagaaacagttgaacgatttgatgaaacgctttgatgccctgaccgacggagccgagcaacgtgagttggatcttgaggaagccatggaagtggctaagcgattccatgacaagattagtcccttggaactttggctggacaacacggagcgatctgttaaggcaatggaactgatacctactgacgaagagaagatccagcagcgaatccgcgaacacgaccgtctacacgacgaaatcttgggaaagaagcccgacttttccgaccttgccgatgtcaccgcccagctgatgcatttggttagcgacgaggaagccgttaatctgggcgagaaggtgcgcggtgtgacagagcggtacacaggattggtggatgccagcgacaacattggggctctgctagccgaatcacgccagggattgcgtcacttggtcttgagctatcaggatctggtggcctggatggaaagtatggaagccgagttgaagcgctttaagtccgttcccgtttacgctgaaaagctgctggaacagatggatcatctgttggagctaaacgagaacattgccggtcacgcttcgaatgtggaatctactgtggaatccggagccgagctgatgaagcacatttccaacgatgaagctatccaactgaaggacaagttagactccctgcaacgtcgctatggcgatttgaccaaccgtggtggagatctgctgaagagtgcacagaatgcactaccattggtgcagcaattccatgaagctcacaaccgtttagtggaatggatgcaaagtgctgaagctgctcttgctcccagcgagccacgtcaagctgatgtgcttcggctggagggtgaattggctgatatgcgtcctattctggacagtatcaatcaagtgggaccccagctgtgtcagctttctccgggagaaggtgctgccaccattgagagcattgtgacccgggacaaccgtcgcttcgattccattgtggagcaaattcaacgcaaggcggagcgtctccacctgagcaaccagcgcgccaaggaagtgacaggtgacattgatgaactgcttgagtggttccgcgaaatggacaccactcttcgtgaagccgatctgcctgccatggagcccaagttggtgcgtgcccaattgcaggagcatcgttctatcaacgatgacatttccagccagaagggacgtgtacgagatgttactgcggcctccaagaaggtgctccgcgagtccccacagagcgagaacaccgccactcttcgtgagaaattggatgatctgaaggagatcgtcgacactgttgctcaattgtgcagcgagcgtctgggcatcctggaacaggctctgcccctgtctgaacatttcgccgattcccatcagggactcaccgcctggttggatgacatggagcagcagatttcgcgattgagcatgccggctttgcgtcctgaccagatcactctgcagcaggacaagaacgaacgtcttcttcaatccatagcggaacataaacctctgctagacaaactgaacaagactggtgaggctttgggtgcattggtggccgatgatgatggtgctaagatcaacgagattttggacacggacaatgcccgttatgccgcactccgcttggaactccgcgaacggcagcaggcgctcgagagtgctctgcaggaatccagccagttctccgataaactggagggcatgctgcgtgctctggccaacaccgtggatcaggtcaatcaattagatcccctgtccgctcttccgcagaagatacgtgagcagatcgaggataatgatgctttgatggacgatctggacaagcgacaggatgccttcagtgctgtgcagcgtgcggccaacgatgttatcgctaaggctggcaacaaagctgatccagctgtgcgtgacattaaggccaagctggagaagctgaacaatctctggaacgatgtacagaatgccaccaagaagcgcggcagctcgttggacgacatcctaagcgtagccgaacccttctggaagcaactgaacagcgtaatgaagaccctaaaggatctagaggaaacactatcttgccaggagccaccagcggcccagcctcaggacattaagaaacaacaggtggcgctgcaggaaatccgccatgagatcgaccagaccaaaccagaggtcgagcaggtgcgacgtcacggaagcaacctgatgaacatgtgcggcgagcccgacaagccagaggtcaagaaacacatcgaggacttggacaacgcatgggacaacatcacggcgctgtatgccaagcgcgaggagaacctcatcgatgccatggagaaggccatggagttccacgagacactgcagaacctcctcaagttcttgaccaaggccgaggacaagtttgcccatctgggagctgtgggttcggacattgatgccgtcaagcgacagattgaacaactcaagtcgttcaaggatgaagtcgatccgcatatggttgaagtagaagcattaaacagacaagctgtggaactgacggaacgcacttcacccgagcaagcggcatcgattcgcgaacccctgtcggtggtcaatcgccgctgggaggccctactccgtggcatggtcgagcgccagaagcaactggagcacgctctgctgcacttgggtcaattccagcatgctctcaacgagctgctggtatggatcaacaagaccgacagcacactggaccaactgaagccgattcctggagatccgcaactgctagaggttgaattggccaagctaaaggtgctggccaacgacattcaggcccaccagaactcagtggacacactgaacgatgcgggccgacagttgattgaaaccgagaagggatctgtggaggcgtctactacccaggagaagctgcgcaaactgaacaacgagtggaagcagcttctgcaaaaggccagcgaccgtcagcatgaactggaggaggctctacgtgaagctcacggatatattgccgaggtccaggatattctgggatggctgggcgatgtagacgcagtgattggagctagcaagcctgtgggcggacttcccgagactgctactgagcaactggaacgtttcatggaggtgtacaacgagctggatgaaaacagacccaaggtggagacgattcaggcccagggccaggagtacatcaagcgtcagaaccaaatgaaggtctcgtccagcaacttacagcatacactccgcacgctgaagcaacgttgggatgccgtggtatcccgtgcatccgacaagaagattaagttggaaattgcactcaaggaagccaccgagttccatgacacactgcaagcctttgttgaatggctgacccaggccgaaaagctgttgtccaatgctgaacccgtctcacgcgttctggaaaccattcaggcccagatggaggagcacaaggtgctgcagaaggatgtgagcactcatcgcgaagccatgctgctgctggacaagaagggaactcaccttaagtacttcagccagaagcaggacgtgatcttgattaagaacctgctcgtgtcggtgcaacatcgttgggaacgagtggttagcaaggctgcggaacgcactcgtgctctggaccatggctacaaagaggctcgcgagttcaacgacgcctggagtggcatgatgcagtatctgcaggaaaccgaacaagtgctggatcaaattatcgaggaagccacagcgtccaaggaaccacaaaagatcaagaagtacattggcaagctgaaagagacgcatcgtcaactgggcgccaagcaatcggtctacgacggaaccatgcgcaccggaaagaatcttttggagcgagctcccaagggcgatcgccctgtgttggacaaaatgctgatcgaactgaaggaacaatggactcgagtgtggtccaagagcatcgatcgccagcgcaagctggaggaggctttgcttctttctggacagttcagcgatgctctgggtgagcttcttgactggttgaagaaggctaagagccgcctgaacgaaaatggaccagtccacggagatttggagacggttcaaggtctatgcgagcaccacaagcacattgagcaggatctgcagaagcgcgctgcgcaaatgcaaggagtgctcaagactggacgcgacctggagcgatctggaaacaatcccgaagttggacgtcagctcgatgagatgcagtccatttgggaggaggtcaagagtgccgtcgccaaacgcggcgagcgtctccaggtggcccttgttgatgccgagaagcttaatgcccgtgtccaggctctctttgattggctggatcatgccgagcacaagctacgatatgccaagaatgcccctgatgacgagaaggtgtcccgtgaaatgatggacatccacatggacttcatgaaggacctgcgagtgcgcgagcgtgaaaagaccgagacttttgagtacgccgaggacattatcaacaaggcctatcccgatgccattccgatcatcaagaactggctttcgattatccagcagcgttgggaggaggtgcgccaatgggccatcaatcgtgagtcgaagctggagcagcatctgcagtcgctcaaggatttggacgacaccattgaggagctgttggcttggctcagcggactcgagggcaccttgttgaacctgaagcacgaacagctgccggacgagattccacccgtggagaaattgatcgaggaccacaaggagttcatggaaaacactgctcgccgtcaaaacgaagtggaccgcgcatgcaaaccaagacagttgccaccaggagcgcgcaagccgtcgcgcagcggcaagacgccagtctttaagggatctcgtgaccagggactcaatgcccgcaagggaagtcgtatcacgcccacacgtgacacgcccgacagagatcgcctgccgcactatggcccccgattctcgccaagcacctcgggaccggaactggaattccgttcgccacgcgcgaagcttctgtggaccaagtggcgcgatgtctggatgctctcatgggagcgccagcggctgcttaacgatcatcttctgtatctgaaggatgtggagcgtgcccgcaacttcagctgggacgattggcgcaagcgcttcctcaagtacatgaaccacaagaagtcgcgcttgacggatctgttccggaaaatggataaggataacaatggcatgattccgcgcgatgtcttcatcgatggcatactcaatacgaaattcgatacatctggcttggaaatgaaggctgtagccgatttgttcgatcgcaatggcgaaggcctcatcgactggcaagagttcattgctgcccttcgtcccgattggcaagagcgtaagccagccaatgattcggacaaaatacacgatgaggtcaaacgtctggtcatgctgtgtacctgccgacagaagttccgtgtgttccaagttggcgagggcaagtacagatttggagactcccagaaactgcgcctcgttcgtatccttcgcagcactgttatggtgcgcgtgggtggcggttgggttgccctggatgaattcctgcagaagaacgatccttgtcgcgccaaaggacgcactaacatagagctacgcgagcaattcatattggccgatggcgtctcgcagagcatggccgcattcacgcccagacgttccacgccaaatgcggccgccactgcctcctcctcaccccatgcccacaatggcggcagctccaacttgcccccatatatgagtggacagggtcccatcatcaaggtacgcgagcgctccgtccgctcgattcccatgtcacgaccgtcgcgctcctcactttcggccagcactcccgactccctgagcgacaacgagggtagccatggaggaccttccggccggtacacaccacgcaaggtcacctacacgagcacgcgcacgggtctcacgccaggaggctctcgtgccggctccaagcccaactcgcgcccgctcagcagacagggatcaaagccgccatcgcgacatggctccacgctgtcgctagatagcacggacgatcacacgccctcacgcattccgcaacgcaagccttcaacgggcagcacagccagcggtaccactccgcgtccggcgcgactttcggtgaccaccaccacgactcccggcagtcgtctcaatggcaccagcaccattacccgcaaaaccgcctccggatcggctagtccggcgcccacaagcaacggaggcatgagtagatcatccagtataccagcactaacaggcttcggcttcaaaccaattaggcgaaacatcagcggtagctcaacgccctccgggatgcaaacgccgcgaaagagctcagcggagcccacattcagctccacaatgagacgcacttcgcggggaaccacaccgacggagaagcgtgagccattccggctataggaagccaccgttatggctgaggacgacgacgatagagaagcaaaagaatgccaatatttaaaccacatacaaaacactcaactctacgtactaactacgcactgaagttctaaactaaaccccccaaaaaccactccccaaactaatcgaggctacattagcaatgaatgtagcagcaggaacagcacacagttctacaaaagagactaactttgaagtgccctaatggattggtggagcgaaacaatttatagatgtttatactatatatattttgtaaaagacacagttaagatgaaagttatgcagacatatagctagcacacaaagttgatcagacaagcaacctacttacgagtactactactactaatactaccttttgctactactaatttgtaatgcccactacctttattcactagttatacacgtttccaaaattatgatttgtatatacttataaagcgaaaagcaagcgtaaattaatgaaaaatacactccaagtgctctacggcaattaaacaaacaaaaacaaaaaaaatacaaacaaaaacacataaaaaatatcgaaaaacttaagtgaaaaaaataaaacattcgaatgaaatgccgcggtctctgctgcaaaccatcttgagtctcagttctccactggaatcgccagtccggtggaattctagccaggagtggcacgtggcagaggcggaacggccaaaaaaataataactaaacccgttaaagagataaaatttgattttgttctgttattaaactaataggaaagtgaaaattgtaagccgcataaagaaaatatttaattatatactaaaagtcattactataagtttaattaatatttaactgttaagcgacaaacacacacacacacacagattttgtattgcataattattatgttttttatatgcaatatatcagcgaatgaattacgatgcagatgcagaagggcgaaagaaatcgaacccgtttctataaatactgtaaaatactaatactaaattattttgttgtacgaaacgaaagaaatgcattaaaactcgtgttttgtaattctatttaattaaaacaattcaaatgcgaaataaacatttacaaaaaaaaaaaa

SEQ ID NO: 28128 - protein, 8805 aa, DROSOPHILA
MHSSSQSTLKRTQQLVRQTNGGRGDVLSSGSEVVHSSRGPAITTNIDDSNLRYRHETKRERTVEAVITDYPGVSPLGSVPHERTNFERTVTFQDPTGNSRRLSETGALVPAGAIPTSSTHYQQVTRNKRISTEVLGSSVESTKTSQRAPNGHRRVTTHIVRKVTTLSRAEENAQPAEDLLPPAKMIRSSELEYRRALPPAIESSSTQRREISDIVVGKEDNVSAREALLRWARRSTARYPGVRVNDFTSSWRDGLAFSALVHRNRPDLLDWRKARNDRPRERLETAFHIVEKEYGVTRLLDPEDVDTNEPDEKSLITYISSLYDVFPEPPSIHPLFDMESQRRVHEYRDLAQQFIYWCREKTAYLQERSFPPTLIEMKRLLSDLQRFRSDEVSARKREKSKLIQIYKELERYFETVGEVDVEAELRPDAIEKAWYRMNTALQDREVILQQEIERLERLQRLADKVQREIKHVDQKLTDLEGRIGEEGRRIERLHPVDAKSIVEALETEIRHLEEPIQDMNQDCHVLNEGRYPHVSELHKKVNKLHQRWAQLRTNFHTNLVQKLSGLKYPVHETTVTRQTRMVVESRQIDTNPHFRDLQEHIEWCQNKLKQLLAADYGSDLPSVKEELDRQQHEHKIIDQFHTKILNDERQQTKFSGDELALYQQRLNQLQKVYAELLSTSTKRLSDLDSLQHFLGQASAELQWLNEKEQVEITRDWADKQLDLPSVHRYYENLMSELEKREMHFATILDRGEALLNQQHPASKCIEAHLTALQQQWAWLLQLTLCLEVHLKHATEYHQFFGEIKDAEQWLAKRDEILNSKFSQSDFGLDQGETLLRGMQDLREELNAFGETVATLQRRAQTVVPLNKRRQPVNRQGPVQAICAYKQQGQLQIEKGETVTLLDNSGRVKWRVRTAKGQEGPIPGACLLLPPPDQEAIDAAERLKRLFDRSVALWQKKHLRLRQNMIFATIRVVKGWDFDQFLAMGPEQRTAIRRALNDDADKLLSEGDPNDPQLRRLRREMDEVNRLFDEFEKRARAEEESKQASRIFTEECLAIKSKLEDMARELDQIILAPLPRDLDSLEHVLEIHSDYERRLHLLEPELKHLQETFRTIALKTPVLKKSLDNLMELWKELNTQSGLHKDRLKLLEASLAGLEDNEHVISELENELARHQDLPSTAEGLQQVFKQLNHMQDIITQQQPQMDKMNDAADQLGRMGVPTKVLGDLKRLHSNVERLNTRWSAVCNQLGERMRSCETAIGLMKNLQSSVQVEESWVDGTTERLSAMPTATSAYELDKLLGAAIERKPKIENVNVAGGRLIREAKIYDSKCLRFVDWLVEARPSFSPPRRDLRPADSDPGATQYYSQRLDNLNTKNDRLLEQLSQRLKTAIEVNGSDGLQYAESLQKPLKTFRVDFSAGSVPTGDGYAARQEDLYTTTYSTTQISSTKTTKSSTKSVYSSDGLDAASQEVSTAGLPQSQIQFNEIRTLKRSQQLGGHSVLDIAGIRDPRTGRVLTIGEAIQLRILDVRTGEMLVGDRRITLEQAADQGLIDLQLAKQLLEPGAGRDASGRELSLLEVIQREISEAESGYETAEKRIKVNNTVTVEQTSGELGSPENPRNIADAITAGSVDTKTGLYRVKSGQTISLAEAYERGYLIRHESVTIKSNALCLSDAIAHGLVDGAGWIADRNSGDKFRLDSAIANQLIDASVREVVDAKRDTKITLQEALQSGVLNAKTGRYVNEVTKEKLTFAEARNRQLIVKPYTLKDICDLNLLDKQAQITSPMRREKLSIMQAIEAGVLDGNLLKCITKRKGELVTLQEAIADGIVLPAECKYRDFMTGELISIPEAVERGLISSVAQRSIFDIDGFKDLRSNDYVSFNVALSRDLLRRKSTGFALETGRDSLVPLEVAVSEGLVRQEVYEMFSRGIGVQNASGKELSVFDLVYHNLIDPKTGYLLDPKTGETVPLDTAIERKFITPEGALLLSSLLNITLTTETVTRTINRYVTIRAGSQEPVDSVLLTFTEAVRQGFIDEERQLFKDPKTGNIYSVQQALNYGLLVPDSNQTVPEPTNRKKTKSTITIVTKQIIPEAEPIKLNTQHTKYVEKSVEIPISQELVKPHRVVSEFINLEKSSYIEQNVTERQIMELPPGGWRLKDAIEQRLFNPDTGVFHVQGTDRLVNFEECINKQIINNLSLSVIDPNTGDKISVQSAFERDILDSYGNYTNSRKQVQGMRSAIDESKIILETVPATRGANQKTILRITKVNNIPDVLEVSTPLKDAPPKFVEVLTCQRELASPEPLQIAPGAIYDPSTALVIFTQTGETENIFDAARQGLVDEQLIKIVDPTTKQPISVTEAIARSIYDPKTATILDSEGQPVDLITATKLGLLSVVGAPLVAAEGALRTVRFVTDPRTGEQIPVEVAYERGIVSRDQLHRGRSFDSEPATVEDKVVVLQRMRKVILKPKDALRKGIIDEETCEILENTSNFTNPKGEVVNITEALNTGLIDGRRGQVIDPQNNRVLNLRQAVEQKIIDSEQTNHILMPLAKSLSVPRLADQGLIDPQTQTIVHPESGYPLSIHEAIVCEVLDPHSKLHKPEKCTLEEAITKGIINADDSTFNYKNKTLNITEAIEAKLFDPSYDQQKSKVEIPPVGMIFPVAVEKSLVEPSKRVVLHPSTKKALPIKQAIEENFIMSIPYSPKPDAIEVVTAMEQDLIDVAAQTLTVPSTGERIPLRQAMENGVLVVKNLSDFVITQKPIPKTEIMETVRAVHTVTTKTIELMQGYVLISNNEVQNVNTGEVCSLEEAKELGILREESTTRETKAAAGESPESVGDVGTSGDQTVIVEERTQTVVVSSDTRKQEMQVVSTTQSTKDTSVPSVSEIETKGSKEPSKTLQNVKDAAKLGALGVIAAPVLAGGAIVSGVKSLIKSVKSPTEDAKSTEKPKEPQTSFIEQERRKELQPQQVPSEVDNLLSETENFISSTTANFIANEKQQDKPDTLPQESNLPLEVESTSTLTTTTVTTITTSSTTTETGNLEPVVVEDVSTTVKEDKVVVKPSTVPEDKTEVSKITETITTVTSNETDTVPEKISQKSASEESAKKDPVVTKDTSSRPAETETSPKPVQKEPTPDPAQNTEFPESIKKDPTPEPDYKETATEAAQITPKEASPAPTNKNEQSAEPTSKPEPMPRTAKKEEISEIEPPFTAPLAPFVDQLAETKITEIKTEFKEPVTSSQTITTITTTVKTVDEHPIVEEVDEVSKSEKIVDVEEPTVHQQEPIKVNETSDDSTRTEPTNEIVHEERVVTVEEPTITETTVTTTTITTTTTSSSEETLPQENTATVKETPLNEPVPSSPAETKEIEQTTNDDQKKPEEIVDTEKKTTEQKPVETIPTEPISTSETTTVTLTTKTTIVDEGKLHPPSDIEQIIQPHSTSDKHQSLVDFIEQEKGTQPAEGGSNILQNVKDAAKLGALAIVGAPVLAGKALVDALTTEKTLKPEHSTSQVVTETVEELPTEIITTSTATLVTKVTTTTTTTTTSTSEGTPDDEALDVVKLPAELVESSVKREVPRTLAIGDAISQKLISPDECQVIVDGEQQSQTVSTLLKEEQLSPLDEVQIIDDKLIVLQQVSYLVDADTELTPQNLYELNIYDPENQYFIDPSTGQKISFHTLVFDMNVFNPETILVKNFSTGKYETLTAALERPLLDRHTGHMVDPKTGKKIPFFECVDRQWIIRANPEEQKPSGIENVTIDTQTGQVVLDDGRVCSIVEAINSGKLDIQSISVRDPVSGEVIPLRMAIELGVVDMQAGTVIDIQTLKEIPMELAFQLGFLVPGARKPISLEAAVRKGLYDPETGKLFDSESQNQVDVQKSIEIGLVDPKISLIVDTVTKKEVKLDCAIEDDLVLPATGQIKDNKNNTLVPFDVGVQQCLLKTDNVTWSLPELLQREYYTPSTGKVLNPVTGEEILLQQAIEMGFVELETTLVKDVDHDKILPGKEAAKVGLLDTVRGTLSSPNISLDEAFVKGYLISTKKPLSLVDCLLRGLYDPSTAKFTIDDKQLDLKAAIAQKLINPEELVLLDPKTESIISITEAIAKGYLDPIEGYVINPYASTKLSLHEALENRILIPPKRKRSLPDAVYRGLYDPKTGQFSNTVTREKLTTERAIRRGILDPDSTVVNVGSGQIIPFGVATETGIVDSKHGTVRDADDHPIDFKEAFDRGILVEAKKPLRLIEAVVKNVYDEVDGHFVDPKSGEKLNFAEALNTNLLDEHSVQIRDFKTGLYKQLNLTHAKDTGIIDAQNSKLLYNNQTMTLKHAFDIGILMDVNAPISIQRAIHQGLFDDKTGKLSDPRTGRQITLLESMRSFVVNPHLPCYFDEQTEQMYTLSETCRNGIINRREGVFREPGSNSFVPLGEALSLGLIVDIENAGFGLYELLSMGFYETSTRKVLHPVTNRKLNLNEACVEDVVSLSSSLVKHHETGKYLRLANAIKEQLVDDSRGCYNLGNEQLDLQAARARGLIVSNRRLLSLELVLRQQLYRPETGKFCDPTTGEYLDLIEAIHSGFIDPATTVFKNQLTGKELPLTEAIENGDIDVSKGRVFDPKSKSAYNYDVALSRGILVTITRPLTDRNDVVRRQDSVELLNQTPVSVVISKPREMSLEEAIRYNIIDPKTALVRDFDSFKFLPYSVAVERGLVDTTKRTLVDPKALYFAFDPTLIVYVREPVTFDQAAESKCLDLQTGLLTYVPASVPGSATAAPASDDSANDSLTVIETPKVYTLKEAASAGVVDPDSALVKDLAKAKLVRLPEAFRKGLMDANKANVLNTQTSKLCTLQEAYESGLICTPKRSFGLLEAITFNLYNPTNGCLVDPFQMHPDIIRRRKFTLAEAIGSGLVDPSSTVVRDPSTGVIVPLTAAISSGLIDATEGRLTDANEPKNNIDLVKAAEKGLLLPAEQRQAVFEKFNMCEENVNDLLKWVTTVEQKISSVGGPREKIDELRNQINALKQIKDEIESQQRPVATCLEQIRQIVLTGGDVLSAPEVTTLENSGRELRSRVDRVNDRTVRLLRRLEAGRDELTKLRSELDVFSDWLQVARRTLEDKERSLSDLTRLPSQADSVREFVSDVIGHQADLRFITMAAQKFVDESKEFLAILNDFRTSLPERLPHVEPLSSAESPIRQEVSLVSAQYKDLLNRVNALQDRVSGLGGRQREYQDALDKANEWLRSVHPRVSRIISEPIAGDPKGVQDQMNEAKALHNELLSSGRLVDNAQQALDNLLRSLGGQLSPMEINQLELPIADLKNNYQQLLDNLGEHCKTLDKTLVQSQGVQDALDSLVGWVNQAEDKFKMNLRPASLIKERLQEQIREHKVLLADLQSHQASIDSVQVSAKHLLASASNARIAKKVESNLNDVTVKFEKLYEKANKRGEFLDDVYNRLSRYLDEISTVEQRMASLQEALDSRETSLLSTEELARRMNELSRDKDQLAPQFEDCVRSGKDLISLRDVTDTGVLRDRIKALESQWRNINISIDERAKLSKQKAEQQLAYEGLKDQVLSWLASTEARVNGLPPVAIDLDRIKQQHDELKPICKDYRDYAPTIDKINDIGAQYDALIRPESPARKRSTYSPIKRTSPLRRMSGDARSPSPTKGGILSPLSTGSSGFGSRRSSQDGFQLSELSPVQQQLSEINNRYGLIGVRLNDRQHELDNLNEELRKQYENLKGLAQFLERIQRQLPKESVSNKDEAERCIKQARKILEDMYEKQSLLDTTKAQVKDILRRKSDVPGAEQLRQENDSIQEKWKNLNDICKNRIAFSEKLRDFLDTHGNLKSWLDSKERMLTVLGPISSDPRMVQSQVQQVQVLREEFRTQQPQLKHFQELGHDVVDHLAGTPDAQAVEIKLKDILGKWDDLVGKLDDRANSLGGAADSSKEFDAAVNRLREALQNISDNLDTLPTDGDHQENLRKIENLERQLEGQRPLLADVEQSAATLCNILGDPASRADVNSRVAALEKQYLALQKKLDTKKAETEASLRDGRHFAENCSKTLGWLGGELSNLTDRLLVSAHKPTLQHQIDTHEPIYREVMAREHEVIMLINKGKDLTDRQQDRGVKRDLDRIQQQWEKLRREAVDRHTRLQTCMEHCKKYSQTSETFLAWLRTAEDKLADLTPGVLSKAKLETRLRDLQTFRSEVWKHSGEFENTKGLGETFLSSCDIDKEPIKAELQDIRDRWERLNNDLIARAHEIENCSRRLDDFNDELRNLDHSLGRCEDRLAAHDALGGAAKDPKLLERVKAIREELTNLSKPLQSLKALAKDISAEARAAGGDADHLTSEVDGLADRMSELQGRLDDRCGELQSAATAVSQFNEQMKSLGIDLNDLETEIEKLSPPGREIKIVQVQIDDVGKIQTKLDRLVGRLEDAERAADVLVDAGFAADTTQTREQISTLRKTLGRLDNRVRDHEDNLHSTLKALREFYDHQSQTLDDIQDVSDEFKRMKPVGSELDQIRRQQEDFRNFRERKVEPLAINVDKVNVAGRDLVRSAGSGVSTTAIEKDLEKLNDRWNDLKERMNERDRRLDVALLQSGKFQEALAGLSKWLSDTEEMVANQKPPSSDYKVVKAQLQEQKFLKKMLLDRQNSMGSLANLGKEVANHCEPGERASIEKQLNDLMKRFDALTDGAEQRELDLEEAMEVAKRFHDKISPLELWLDNTERSVKAMELIPTDEEKIQQRIREHDRLHDEILGKKPDFSDLADVTAQLMHLVSDEEAVNLGEKVRGVTERYTGLVDASDNIGALLAESRQGLRHLVLSYQDLVAWMESMEAELKRFKSVPVYAEKLLEQMDHLLELNENIAGHASNVESTVESGAELMKHISNDEAIQLKDKLDSLQRRYGDLTNRGGDLLKSAQNALPLVQQFHEAHNRLVEWMQSAEAALAPSEPRQADVLRLEGELADMRPILDSINQVGPQLCQLSPGEGAATIESIVTRDNRRFDSIVEQIQRKAERLHLSNQRAKEVTGDIDELLEWFREMDTTLREADLPAMEPKLVRAQLQEHRSINDDISSQKGRVRDVTAASKKVLRESPQSENTATLREKLDDLKEIVDTVAQLCSERLGILEQALPLSEHFADSHQGLTAWLDDMEQQISRLSMPALRPDQITLQQDKNERLLQSIAEHKPLLDKLNKTGEALGALVADDDGAKINEILDTDNARYAALRLELRERQQALESALQESSQFSDKLEGMLRALANTVDQVNQLDPLSALPQKIREQIEDNDALMDDLDKRQDAFSAVQRAANDVIAKAGNKADPAVRDIKAKLEKLNNLWNDVQNATKKRGSSLDDILSVAEPFWKQLNSVMKTLKDLEETLSCQEPPAAQPQDIKKQQVALQEIRHEIDQTKPEVEQVRRHGSNLMNMCGEPDKPEVKKHIEDLDNAWDNITALYAKREENLIDAMEKAMEFHETLQNLLKFLTKAEDKFAHLGAVGSDIDAVKRQIEQLKSFKDEVDPHMVEVEALNRQAVELTERTSPEQAASIREPLSVVNRRWEALLRGMVERQKQLEHALLHLGQFQHALNELLVWINKTDSTLDQLKPIPGDPQLLEVELAKLKVLANDIQAHQNSVDTLNDAGRQLIETEKGSVEASTTQEKLRKLNNEWKQLLQKASDRQHELEEALREAHGYIAEVQDILGWLGDVDAVIGASKPVGGLPETATEQLERFMEVYNELDENRPKVETIQAQGQEYIKRQNQMKVSSSNLQHTLRTLKQRWDAVVSRASDKKIKLEIALKEATEFHDTLQAFVEWLTQAEKLLSNAEPVSRVLETIQAQMEEHKVLQKDVSTHREAMLLLDKKGTHLKYFSQKQDVILIKNLLVSVQHRWERVVSKAAERTRALDHGYKEAREFNDAWSGMMQYLQETEQVLDQIIEEATASKEPQKIKKYIGKLKETHRQLGAKQSVYDGTMRTGKNLLERAPKGDRPVLDKMLIELKEQWTRVWSKSIDRQRKLEEALLLSGQFSDALGELLDWLKKAKSRLNENGPVHGDLETVQGLCEHHKHIEQDLQKRAAQMQGVLKTGRDLERSGNNPEVGRQLDEMQSIWEEVKSAVAKRGERLQVALVDAEKLNARVQALFDWLDHAEHKLRYAKNAPDDEKVSREMMDIHMDFMKDLRVREREKTETFEYAEDIINKAYPDAIPIIKNWLSIIQQRWEEVRQWAINRESKLEQHLQSLKDLDDTIEELLAWLSGLEGTLLNLKHEQLPDEIPPVEKLIEDHKEFMENTARRQNEVDRACKPRQLPPGARKPSRSGKTPVFKGSRDQGLNARKGSRITPTRDTPDRDRLPHYGPRFSPSTSGPELEFRSPRAKLLWTKWRDVWMLSWERQRLLNDHLLYLKDVERARNFSWDDWRKRFLKYMNHKKSRLTDLFRKMDKDNNGMIPRDVFIDGILNTKFDTSGLEMKAVADLFDRNGEGLIDWQEFIAALRPDWQERKPANDSDKIHDEVKRLVMLCTCRQKFRVFQVGEGKYRFGDSQKLRLVRILRSTVMVRVGGGWVALDEFLQKNDPCRAKGRTNIELREQFILADGVSQSMAAFTPRRSTPNAAATASSSPHAHNGGSSNLPPYMSGQGPIIKVRERSVRSIPMSRPSRSSLSASTPDSLSDNEGSHGGPSGRYTPRKVTYTSTRTGLTPGGSRAGSKPNSRPLSRQGSKPPSRHGSTLSLDSTDDHTPSRIPQRKPSTGSTASGTTPRPARLSVTTTTTPGSRLNGTSTITRKTASGSASPAPTSNGGMSRSSSIPALTGFGFKPIRRNISGSSTPSGMQTPRKSSAEPTFSSTMRRTSRGTTPTEKREPFRL

SEQ ID NO: 28129 - DNA, 4357 bp, DROSOPHILA
agagccgagcaaatgggctatggcatcacggtgaagtatgcccaactaacggcttcactattccgatccgccatcgaaaggattactagtgatcctagcttcacggaaagggttaaggtgatatccagtcaatatcgggaccaaaaggagactccactggaacgagctgtttattgggtggagcatgtgactcggcataaaggagccaagtacctgagaagtgcctgccaggatctgaacttcatccaataccacaatctggatgttctggcgacattcttttcggtcattggattgaccgttattttcgtctttctattagttcggtttttagttactattgtaaacggctttctatataaacctagttcgaagctaaaaattaactagtttatatataaatatttttttagtacaaaactaagctatatagaatattatcttttttaagtatattggattttttcggtggacttaaatacaaataattttttacataatacatcaaactattattaaattttatggtggcttaataattatctcaaattttgatctcaaacaaaaattcgcaacgtgcattttctaaaatacctcgcatagttttctttatcaacaacaaatattgtttgaatcagaattctacaccaaccatgcatcagaaagagaaccaaagtgaaaaacaaaacaaaatattgctccccaccaaaaaagccggtgtgaaaacaaagcgaaggagaatccgagaataaaacctatccaaaactgataatatatgcgagagagcctctccactttgtagagatattgacactcgatcgtgaatagcgtacaaaatattgagatttggcactgtaacgatgacgaagaagagagggcgtgagaatagaagagcagagcagagcacactctccaaatctgattgggacctaacccaaccacttataattacctcatcgcagtcccatgttaactcagtttactgcgaggcgtcgaggcgttcgtagcccccatttagtatcagtttcacggtcgttggtcgttaagaacgcatttcacaactggcaacaattaagccaaattaattgtattgaattcgcagttttcgaaactaacgatgaaaccaacagctggccaaacgggttttctggccctactgctgttctgcctgctgagctgcgtgtctgcctacaactacctggtggtgctccataccgccgcacgatcccattaccatgtgggatctgccctggccaagggattagccgctgcgggacatcaggtgaccatcatctcccccttcgagctgaagaaacccatcaagaacatcaaagatgttccggccaagagcattctgacttccatgcagggtatgtttaacgaccgaaattattaataacattattacacaatctaatggggaattcggtaagactacagacactgtgtctgaaattaataattattgaatggaatctaaagtttgaacaatgaacttccattataattcaagaacacagtcgtatcatattattagtgtgattaatataacataaattatttctgttattttgcaatggtgacaacatttaaagacttttaaaatgtgaatttgtaaaatatggcctatggtgtaaaccggttgggttacatcaaatatttatttgttgacaaatggagttttctggtttacttatgcattacataactaaatgaattcagcttattagcttaactttcaaagtcatttcatttttacctcaagaagttgcaccaataaaaatgagttaagttcgattcgataagcctagctaacaattgcttctgataacgtccatggtttctaagcacttaagggttttaaaataacctaacctaataccaattttgtatgacatgacatgttctctttgttagaaagacacgcgttttaatacactttaatttattttaggaagaattgctaaccttttgcaaagctcaaaggagcccataatcaagcagatcattaactttcacgaaatgggtattgaaataaccgaattgctgctgaaggaaccatctgtgatagaactgatgaaatccaaccagaccttcgatgccgtaatatccgaggtgttcctgaacgaagctcacttcggattcgccgagcatttcaaggctccacttataggactgggcacctttggagctattagctggaacaccgatctggtgggtgattatttgccatagtgactaagaggatttccataatttatatattcttaccttttattttaggtgggatctccttcaccgccctcgtatgttcccagtgcactgctgaagtttagtgaccgcatgtccctcgtagagcgagtgggcaaccaggccttcctcacctacgaatatatcttcctcaactacttctatctgccgcgccaggaggtcctctaccgcaagtacttccccaataacaagcaggacttttacgatatgcgcaagaacacggctctggtgctgctcaatcaacatgtatcgctcagttttccacgaccctactcacccaatatgatcgaggtgggcggcatgcacatcaatcgaaagcgccagccgctgcccaaggacattctggagttcattgagggtgccgagcatggagttatctacttctcgatgggctccaatctgaagagcaaaacactgccgttggaaaaacgccaggcgctgatcgacacctttgcccagctgaagcagcgtgtgctgtggaagttcgaggacacggatctgcccggaaagcccgccaatgtgttcatctcggactggttccctcaggacgacatcctggcccatgacaatgtgctggcctttattacgcacggcggtctgctcagtaccacggagtccatttaccatcgcaaacccttcgtgggcattccaatctttggcgatcagttcctgaacatggctcgtgccgagcagaatggctacggggtgactgttcattacgaggaattgagttctgccaagcttttggctgcgattcagaaaataatcaacaatcccgaagccacccagagggtgcgcgacatgtccgacagatatcgcgatcagcagcagactcctttggagcgggccgtttattgggtggagcatgtgtcccggcataagggtgccaagtatctaaggagcgcctcccaggatctgaatttcattcaataccacaatctggacgcaatgctgatactatatggcggcattatattcgtgctctattgtattttcctgctgatccgtttagtgtggcgactcctgcaggaattatttattaagaaggacacttccaagccaaagcagaaagccaagcggaattaagctcaagtgataaataagtttggtttccatgaccagtttaaattagggtgcttacaaacaaattagcttttaactggcaataatagaaaaatacttattaagtattaagaatgaataaattaggtatagagtttcatgaaaactccttcccattttcaattcaactccaaagtaaaaacagtgaaattttctcataattttcttaatgtatttgtttgaaataaaatcaacaaaaatatatttggtatttacggatttttccataaactgtctttgaatttgctgcgattcagtgttgttggaaaagctcatggaaatttcatttgattttacagcgtggttgtgtggttggtttcagcctgcggctcgaagcttgtaaactaaaatggaaaatattgtgagcttctatcgaaaaaatgccacgttgctttcctatttttctcggtcttctattttattttcagctgcttacatttcatttatagttgtatactctcacggaatggaaacacaataaaattataaatgtatcttaagatcttgcaagcttatgcatatttcaattcgcaaactttgcaaatgtttaaaaatgtttgcagtctttaggaacttctatatatataagaaatttattatgaggacctcaaattttcttgatcatctcattattgtttcaaccgagggtatttgtagtttcggttcagtggtgaaaacttttctttgttggttcccattttcatggaccctcgttttcccctcctgctgcaagttgcacatagttaacgcttcagttgtaaaaatgcccatcagcgcgttcaaatttttaacagcagcgaactgagtgccacgcccactcccattgaccgcccctgccacacccacccacaacgcccacgggctaaatgcttttattttctttgccgtgcatcttcctcttctcatccttttgccaagcaaaaggcgtggtaaaagttgtgtagccccaacttattgaaactgt

SEQ ID NO: 28130 - DNA, 1704 bp, DROSOPHILA
ttcgtagcccccatttagtatcagtttcacggtcgttggtcgttaagaacgcatttcacaactggcaacaattaagccaaattaattgtattgaattcgcagttttcgaaactaacgatgaaaccaacagctggccaaacgggttttctggccctactgctgttctgcctgctgagctgcgtgtctgcctacaactacctggtggtgctccataccgccgcacgatcccattaccatgtgggatctgccctggccaagggattagccgctgcgggacatcaggtgaccatcatctcccccttcgagctgaagaaacccatcaagaacatcaaagatgttccggccaagagcattctgacttccatgcagggaagaattgctaaccttttgcaaagctcaaaggagcccataatcaagcagatcattaactttcacgaaatgggtattgaaataaccgaattgctgctgaaggaaccatctgtgatagaactgatgaaatccaaccagaccttcgatgccgtaatatccgaggtgttcctgaacgaagctcacttcggattcgccgagcatttcaaggctccacttataggactgggcacctttggagctattagctggaacaccgatctggtgggatctccttcaccgccctcgtatgttcccagtgcactgctgaagtttagtgaccgcatgtccctcgtagagcgagtgggcaaccaggccttcctcacctacgaatatatcttcctcaactacttctatctgccgcgccaggaggtcctctaccgcaagtacttccccaataacaagcaggacttttacgatatgcgcaagaacacggctctggtgctgctcaatcaacatgtatcgctcagttttccacgaccctactcacccaatatgatcgaggtgggcggcatgcacatcaatcgaaagcgccagccgctgcccaaggacattctggagttcattgagggtgccgagcatggagttatctacttctcgatgggctccaatctgaagagcaaaacactgccgttggaaaaacgccaggcgctgatcgacacctttgcccagctgaagcagcgtgtgctgtggaagttcgaggacacggatctgcccggaaagcccgccaatgtgttcatctcggactggttccctcaggacgacatcctggcccatgacaatgtgctggcctttattacgcacggcggtctgctcagtaccacggagtccatttaccatcgcaaacccttcgtgggcattccaatctttggcgatcagttcctgaacatggctcgtgccgagcagaatggctacggggtgactgttcattacgaggaattgagttctgccaagcttttggctgcgattcagaaaataatcaacaatcccgaagccacccagagggtgcgcgacatgtccgacagatatcgcgatcagcagcagactcctttggagcgggccgtttattgggtggagcatgtgtcccggcataagggtgccaagtatctaaggagcgcctcccaggatctgaatttcattcaataccacaatctggacgcaatgctgatactatatggcggcattatattcgtgctctattgtattttcctgctgatccgtttagtgtggcgactcctgcaggaattatttattaagaaggacacttccaagccaaagcagaaagccaagcggaattaa

SEQ ID NO: 28131 - protein, 528 aa, DROSOPHILA
MKPTAGQTGFLALLLFCLLSCVSAYNYLVVLHTAARSHYHVGSALAKGLAAAGHQVTIISPFELKKPIKNIKDVPAKSILTSMQGRIANLLQSSKEPIIKQIINFHEMGIEITELLLKEPSVIELMKSNQTFDAVISEVFLNEAHFGFAEHFKAPLIGLGTFGAISWNTDLVGSPSPPSYVPSALLKFSDRMSLVERVGNQAFLTYEYIFLNYFYLPRQEVLYRKYFPNNKQDFYDMRKNTALVLLNQHVSLSFPRPYSPNMIEVGGMHINRKRQPLPKDILEFIEGAEHGVIYFSMGSNLKSKTLPLEKRQALIDTFAQLKQRVLWKFEDTDLPGKPANVFISDWFPQDDILAHDNVLAFITHGGLLSTTESIYHRKPFVGIPIFGDQFLNMARAEQNGYGVTVHYEELSSAKLLAAIQKIINNPEATQRVRDMSDRYRDQQQTPLERAVYWVEHVSRHKGAKYLRSASQDLNFIQYHNLDAMLILYGGIIFVLYCIFLLIRLVWRLLQELFIKKDTSKPKQKAKRN

SEQ ID NO: 28132 - DNA, 5409 bp, DROSOPHILA
tggcactacccttcaccgtgatctgaatcttcatacagtggaagagcagatctccaggcacaccagcagatatagtgatagactaagacgacaccacagtatacttgctagacgcttactccctgctaggcctctaaggagattaaaaaggaagggtttcgccaaaacacttggacaaccctaaagaccccctcgaaatatgagacatagttgtaagtcctcacatgattagtgagaggtttggttttatcttttatatgttaattgcgctgttatgttactgttactgcattgtattgattcatcgcttctaaataaataaatatatataaaaaagtgaagacttttatgtgatatatattagaaggcatataaaagtatgcaacaaaaagattgttttcgaaacttacttgagcccacaacagatggcgccaaaaaatggttcgagaattagctaatgagctcttacatcttaaagatgaaattttgtatgcggcctaatttattaatttttgaattgtaatttccagtaagcttcaaaattaaatgttttgttattctcctttaaaagcaaaatggcaacacccaacatccttagaaaataggatggcagctcccggaatgggaaaatatcagggttggcaactgcggaaattggcgccgaaaatatgttcttttcaaattgttacttaaaataatttgtgtgattaattaatatgtatgtagttaattaccgaagaaatttctttatattatttaaattgctatagaatttggatgtattttagtaaccgaagatataataattgaactttctacgcaatgtttgtctttttataaataatttgtgtttatttctatttatattcatgtatattatagtttcccttctatgcgctatgcaactacttttactgtgccactacttagagcctaattaaacgtgattattgtgtcctttgaggtaatattgatgcacgccatcccaagttgaggatggctagttggcgtacttgagtccctcgtagtatccaccgcccccattcagagccaccatcatggggggcgggctgatgggcggcaggtaggccggcttgcgatcaatgggcgaatgatcgatcccatggctgccaccggactgcgatggtggtggcgtcgtggatgatgtgccgtgattctggtgcatggatccgtggccctgatggctgtggctggggtggctcgcatggtgctgatggtgatggtggtgcgcctgtgcttgggcctgagcctgggcatgctggatgctggacaatccgggcagctgctgcagcgaaatcgaacggaggcctacggacggattcaatttagagaggaaaagcgattaaactggctgttcgcgttttatggacaagcgctaaaattcacactgcgccgcgacgtcggcggcaactattaaaagagagagagttaaaaacggagtcgatcgagtgcggcatagattaccatatgttggtgctacacccgccgcccccgcccactgtccttcgtaattcgagatgtgaaacgtcagcaattaaattaccctgattgacgcgaacacccaggaacattgtgatcccccttcacaaagtcgcccggcacccttcaagtggctgcactgcgagaaatactgggtcatctatctacttgaaatttaataaattaagggcttaacttccctaagagcagatttagatagaactagatacatattcacatcggacttttccctatgattttgaatttttgtgatttctttgaatctatgtatacaccccacccacaatttctcgctgtgtagctcaaccctcgtcgctttctcgagctgctcacttaccgttgtccaggctgccggcacttgttgcataggaatagccagcggccacgagactcgcggttggcgcataatcgctttgaagcgtcgccgccgctcccagtggcgaacttgaggatgatgccgatggggccattcccagtgcggagtgggccagcgggggcgtggtagccgagccattcacattgcctccggctgccaggcaggatatgttcgtatactggggcaggggacccacgcccatgcccacgcccaccgacgacgagccactgtgggcggcatgggcgttccagggatcggcgaatccttgaccaccagccggcgagacgccagtggctccagctgcactgtaatcgtagctagcaaaggcaggcgaggcgtaatagttgccattgtcctggtgggcaaagagagaagtactatagatattatatgatcttaagttgttatgaaatcgatggagcttaccattcccgcatcgccatagccgctggcgtagtatccattggcatggccggcatacggcttcaccttgatcttggagcgatagccacgcggccggcgcctcaggctgccctcgtcctcgaagagatgagccgagttctcgtcaatggtccagtagttgcccttgcccggcttgcccacgcccatgccctttggcagcttcttgaagcactcgttcaggctgagattgtggcgcaccgagttcttccagcccacgtagggtcctcgaaagaattcgtagctgcaatgataaatatgagtttaacaactgagtttctaacactcgcataactgcttatacttaatatcatgaattcaagatgttcttaagggcacattattatgtttgtcttttgcattggagcttaaaagccagcgaaaattgataatcaagcgtttatttattttactgagcctgtgaggctcaattaaaattttttttttttttttatttcggtgggatcagagtgtggtgtcaaacaaacaaacgatgtcagcttaaaagcctctcacgcatttggaatccccaccagccccggctctgtcccttcaacgctcaagtggattggatctccgtctcgtcgccgaaatcgaaatccaaacaagcgtcgcgaaatatgagacattctgaaggatgcgcaagtcgagttggccaaatagaatcggatgcccatacaaaaaaagggccagcgacacatttttgcagttgtagcgaccgatacggatcggtattactggtattaataaccgtatgggccgtagtgtcgatatcgccaattggctccgcctgagatgccgccaccactctggagatcgtgttaatcgaagcgaaagcgatgcgattttaaagaaactattactctttaaaactgtgtaactacaactaaacataaacaatactgcaactttactggtactgaactttaaaaggaatttgctcctggtacctatttgatatttattaaactgcaagttaccatttcaatatttcagatattttctagactcaatttttaactgttactgtttccccatcaatgccttacaatagttacctcttctgcaagtaggcgtagatctcggagagcgttagctttccagttggtgattccttgatcgcatgcccaatcatattgatatagctgagtgctggtttctctggccgccgggtaccagacttcttggtggtatccggagtgctcggcgcatcctgctgactggaaccacctgtaccaaccaccgctgagcccgaaaccttgttctccagatgattctgactgggcggcgaggattcggaaccgttgagcgacttggcaggcgaggaactcgagctggagtagtttagcacgggcatgccgtgcgcattgctgatcacctgcgacggcgatgtggaaatgcgcgacatgtagccaccgcctggtgaatgctggagctgctgggctggcaactgctgcggctgctgttgccccgcctgctcctggctggtcagcaattggtagtcgttcgcactgagtatggtgttgttggagcagtacttaatggtggacgcgtactgatggttgagtggctgcagctgcacctgcaatggctgcaccttggcggttgatgtgctggagctcgcatactgcaaatcctgcggcagatccgtgggcgtcttcgaattcgattgcggagaagcggatccagccgaatgggcagtcattagaaccccgtacggtggtatgggactggaggatgccggcggtgtacccatgctgtgcagcgcacttaggctataatgttgtgctgccgaaacgggcgtggcagtgggcgtagcgtccatataatgctttagctccatatacccgatgttcggtttctcatcgatcagctccgtgggtgattctccgccacccattgcctggtaattgccaccggttaacagattcccagctctatatggatgtccagtgtgggtgtgttgatgtgggtgggagtgtgcatgtgggtggctgaaagggggatgggcgcggggatcgtggtagtagccacccagctgatccatggtcataaccgaacgatcggaggcttcttcacttttaatcattttcactgggcttttcggtttcaaacaccgtgcgttgtttcaaaaatattttaaaaatatttttggttttttttttatcaatatttctctttgaaataattttcactataatttcgaatcgaaagtacgcgcaattctttccggcggagtgggattttctttaaccactgaaagtaccgcaccgcttggctattctcactcaactgaaacggatggcatatcgctcccgctactggcaccacgatcccattcgatgcgatccacttgagttgccatcggccggaattctttttttagtacgcccacgccttacgcaaatcgctcgattctctctctatttctctctcggattccccatatgtaccgtatgtataggttcgggcaatgccgccaattggctcgttttcccggggttttcctctcggagcaaaacgcaaaatatatagaattcaggtctgtgacttggggactgcggttattggagtacgtttagatggcgaaacttcagtatgccaggtatctaagaaacccaaacggaactcaagggaaaatcgagatctataagatggtatcaaagaaaataaaatgtaatgcgtgcttgaattttctttgaattaaaaaataatatataatgaagaaaagtatgaaagtttaaaataattatattaataataccacataagatgaggcttgaattacaattgggatctattttgcacttagtcatttcagtccgactttagttagctaaactgctaatttcataaacatggcatctgtgtttagtcgcaaaattggttcaaaagcgtatttaaatcaattctgaccccaaaaatcgcgaacggaacccacacacattactgactcattatcgctattgtttccgatgcgaattcggattgaatttggatgcacctccccgctgggagtgtctaccttcagccaccgcccctctggccagtca

SEQ ID NO: 28133 - DNA, 2085 bp, DROSOPHILA
atgaccatggatcagctgggtggctactaccacgatccccgcgcccatccccctttcagccacccacatgcacactcccacccacatcaacacacccacactggacatccatatagagctgggaatctgttaaccggtggcaattaccaggcaatgggtggcggagaatcacccacggagctgatcgatgagaaaccgaacatcgggtatatggagctaaagcattatatggacgctacgcccactgccacgcccgtttcggcagcacaacattatagcctaagtgcgctgcacagcatgggtacaccgccggcatcctccagtcccataccaccgtacggggttctaatgactgcccattcggctggatccgcttctccgcaatcgaattcgaagacgcccacggatctgccgcaggatttgcagtatgcgagctccagcacatcaaccgccaaggtgcagccattgcaggtgcagctgcagccactcaaccatcagtacgcgtccaccattaagtactgctccaacaacaccatactcagtgcgaacgactaccaattgctgaccagccaggagcaggcggggcaacagcagccgcagcagttgccagcccagcagctccagcattcaccaggcggtggctacatgtcgcgcatttccacatcgccgtcgcaggtgatcagcaatgcgcacggcatgcccgtgctaaactactccagctcgagttcctcgcctgccaagtcgctcaacggttccgaatcctcgccgcccagtcagaatcatctggagaacaaggtttcgggctcagcggtggttggtacaggtggttccagtcagcaggatgcgccgagcactccggataccaccaagaagtctggtacccggcggccagagaaaccagcactcagctatatcaatatgattgggcatgcgatcaaggaatcaccaactggaaagctaacgctctccgagatctacgcctacttgcagaagagagtggtggcggcatctcaggcggagccaattggcgatatcgacactacggcccatacggttattaataccagtaataccgatccgtatcgctacgaattctttcgaggaccctacgtgggctggaagaactcggtgcgccacaatctcagcctgaacgagtgcttcaagaagctgccaaagggcatgggcgtgggcaagccgggcaagggcaactactggaccattgacgagaactcggctcatctcttcgaggacgagggcagcctgaggcgccggccgcgtggctatcgctccaagatcaaggtgaagccgtatgccggccatgccaatggatactacgccagcggctatggcgatgcgggaatggacaatggcaactattacgcctcgcctgcctttgctagctacgattacagtgcagctggagccactggcgtctcgccggctggtggtcaaggattcgccgatccctggaacgcccatgccgcccacagtggctcgtcgtcggtgggcgtgggcatgggcgtgggtcccctgccccagtatacgaacatatcctgcctggcagccggaggcaatgtgaatggctcggctaccacgcccccgctggcccactccgcactgggaatggccccatcggcatcatcctcaagttcgccactgggagcggcggcgacgcttcaaagcgattatgcgccaaccgcgagtctcgtggccgctggctattcctatgcaacaagtgccggcagcctggacaacggcctccgttcgatttcgctgcagcagctgcccggattgtccagcatccagcatgcccaggctcaggcccaagcacaggcgcaccaccatcaccatcagcaccatgcgagccaccccagccacagccatcagggccacggatccatgcaccagaatcacggcacatcatccacgacgccaccaccatcgcagtccggtggcagccatgggatcgatcattcgcccattgatcgcaagccggcctacctgccgcccatcagcccgccccccatgatggtggctctgaatgggggcggtggatactacgagggactcaagtacgccaactag

SEQ ID NO: 28134 - protein, 694 aa, DROSOPHILA
MTMDQLGGYYHDPRAHPPFSHPHAHSHPHQHTHTGHPYRAGNLLTGGNYQAMGGGESPTELIDEKPNIGYMELKHYMDATPTATPVSAAQHYSLSALHSMGTPPASSSPIPPYGVLMTAHSAGSASPQSNSKTPTDLPQDLQYASSSTSTAKVQPLQVQLQPLNHQYASTIKYCSNNTILSANDYQLLTSQEQAGQQQPQQLPAQQLQHSPGGGYMSRISTSPSQVISNAHGMPVLNYSSSSSSPAKSLNGSESSPPSQNHLENKVSGSAVVGTGGSSQQDAPSTPDTTKKSGTRRPEKPALSYINMIGHAIKESPTGKLTLSEIYAYLQKRVVAASQAEPIGDIDTTAHTVINTSNTDPYRYEFFRGPYVGWKNSVRHNLSLNECFKKLPKGMGVGKPGKGNYWTIDENSAHLFEDEGSLRRRPRGYRSKIKVKPYAGHANGYYASGYGDAGMDNGNYYASPAFASYDYSAAGATGVSPAGGQGFADPWNAHAAHSGSSSVGVGMGVGPLPQYTNISCLAAGGNVNGSATTPPLAHSALGMAPSASSSSSPLGAAATLQSDYAPTASLVAAGYSYATSAGSLDNGLRSISLQQLPGLSSIQHAQAQAQAQAHHHHHQHHASHPSHSHQGHGSMHQNHGTSSTTPPPSQSGGSHGIDHSPIDRKPAYLPPISPPPMMVALNGGGGYYEGLKYAN

SEQ ID NO: 28135 - DNA, 3253 bp, DROSOPHILA
ttcattgaattactttcaaatcatcaactctgagctatatttaattgtatttaatgtggttaaatatgctttaatcatgagcgagggtgtgcagttcgatccaaaaataagctcaaactccatacacactcccctttctctttcttttttttttacgttttgggtggggaagattcttattaagatttatgtatctggctctgtttccgtttgtgccaccctcaagggatcgacacactcgacttgggatgagccagaataaagatcaaaaatgtaaaaaaaaaaagaaaaacgcacagatcacttcccatctatatcatctaaatattttgagttgaaaccataaatatttatgctctggtgaaaggcggaaaaagtttcttctgaaagcttgatctgtccggattttcccatgcaatatgcaaccgaatgttgcaacagcttttcacacattgtccataaacaaaagattttaatccatgtaaacaatttgcatttttagagtttattgtcggagaataccgtggacgatcagcattggcccaaggagctgatcttgctgcgcgagaagtttacggccaagagtcaactggagatcactcagctgaacattaaacatgccgaagaggtgagtaacgaatgcatatactccgttcatatacaacttctcctaattcctaatttttgtcgattatcgtagatgtcgcgcctgaaattagaatttgaaaagcagctgaatcgaaagaacaagcgccatctgaccttcgatgcagcccgtgacctggagcaggtgatctgcgaacgagatggattgagggagctgtccaagagtttccgcagcgtactttgtcggctggccaagtgtgtggcccactgtgaggaggatttgaatgccacactatccgaggaggtgcaacgcctgctgttccacagtcgcagtcaagatggaggtgatgatctggaggctaccattagtagctccctaaataatacgaagcacatgctccgtgtgccggatgtccacagcctgctggaagttgtggaggatccgagtttggtgcagttcatcgacagcaagagcaacgaagagccaagtgaggacttcgatttgaatgattgcctagagcgtttgaagtcggaagcctcctacctgttgcatttgtcagaggatttgcataagcagcggacacacgatgagtcgtcggagcacttggacgaaccggaaaaacaggagcatgagctctgctgcgaggcggaagatggtctgaagaccacaggtgcagtgaatcaacaagtactgtcgaaattcctgcgcacaaattccttgaacgatcagcaaatgggcgtggccaatcagaggaagaacagcaatcccgaggcgggaaaaacacattcctccctacctccagatcttcaagagcatgcgggaaatgcatcagagctgtcgttccagcttgtgcagctaaagaatcgcttgattaaatcggaggcagatcgtcagaacttgcaacagcaactcagtcgcactattgatcgcaatgcggagctgggacaggagctacaagcacttagggatcagctctcccagttgaactctctgaaccacacggattacaatgagggatacggcttgggcacaatgaagagcttgcaggagcagggattggatcaatcatcggccagttttcttgccctccaagagagagcgcgtcatttgctttcatcctctccggtcaaggagcaaccatcaagagaccacggcaattcgaccgttatcttgctacaaatgatcgaggacttttgccgcgagggcgacaaagtggtggagttcagcaaaaaggatcgcgaggatctgcagtcccaggtaagttaagaaacggtctgcacacggatcatcttcccctttttaagttttccctttcccaccttttaacattgagtgctaaacgcatgatccaaaaataaattcgagtagtccgtaagccaggttaattatgaattaaacaccacttcgatgccctctcctttgacctataaccacaaacacaaacacagatcgataccgctgacaagcagctgaaggataccaggcgattcctggaggatcaggccgccgaacgcgaacaggaacgcgatgagttccagcgcgaaatcgagcggctgaaggctcagttgcgcgacaaagagaaggagcacagctcctatgccaatgcctccgaggaggtgagtccagtccatggttcttatctatgatccctcggatcttgatcttgattttgggcttggtttgactttcgtttgcgtttttgcctgggttcacaaagtcctttcctctgtcctttcatatctctttatttgttttctatctatctttttattattgttattattattattattatttcaaggcttaagtttttggttgtaagtttggctataggcatataaatatttaagttgtcccagcatgtggccttccttttttattaactgacacaattccgcacattctccaaatattaacacagaactacttcaaaggcactgaattctggaagccatcgaagtcatttcctcgaagagttttccaaatcgcatggggcacctgttgggcataattcaattgtaaatcgccatgggggcatttcaacggagtcaagggcagcctccgattcttgtgtatatatgccggagcttttgtaagcatctgccgacatatttatagaccccaagaaatgagcacttaagtgcgagcgagtcagagcctttcaatcagtttccatttagccgaactacctcaagtttaagatctctggggggttgagatactttcaatgtcgcactgatatatgaacaaaatacttatgtttgaatttaatttgctatgttcttgtgaatgtttcaatggttttccaattaaattgctctgctaattaaaattttaattaagcggggatgtattcatctgtactttcaaagagtttttataaatttaaatgggttttttgttatatttcgacccatattatataaattataattaccataagtgttctctgtgctaatcaatatcatatattgaaaataatattaaactgattaacgtatttgtaattctttgcatgcacccaataaacaaaaccgcaactaaaattacaaactaatgcacctgtacccttttgccaccgtgtgcacccaaaaaaaaaaaaaaaaatagttgaaggtagcgaagcgaaagcatgtaagtttgtca

SEQ ID NO: 28136 - DNA, 1062 bp, DROSOPHILA
atgctccgtgtgccggatgtccacagcctgctggaagttgtggaggatccgagtttggtgcagttcatcgacagcaagagcaacgaagagccaagtgaggacttcgatttgaatgattgcctagagcgtttgaagtcggaagcctcctacctgttgcatttgtcagaggatttgcataagcagcggacacacgatgagtcgtcggagcacttggacgaaccggaaaaacaggagcatgagctctgctgcgaggcggaagatggtctgaagaccacaggtgcagtgaatcaacaagtactgtcgaaattcctgcgcacaaattccttgaacgatcagcaaatgggcgtggccaatcagaggaagaacagcaatcccgaggcgggaaaaacacattcctccctacctccagatcttcaagagcatgcgggaaatgcatcagagctgtcgttccagcttgtgcagctaaagaatcgcttgattaaatcggaggcagatcgtcagaacttgcaacagcaactcagtcgcactattgatcgcaatgcggagctgggacaggagctacaagcacttagggatcagctctcccagttgaactctctgaaccacacggattacaatgagggatacggcttgggcacaatgaagagcttgcaggagcagggattggatcaatcatcggccagttttcttgccctccaagagagagcgcgtcatttgctttcatcctctccggtcaaggagcaaccatcaagagaccacggcaattcgaccgttatcttgctacaaatgatcgaggacttttgccgcgagggcgacaaagtggtggagttcagcaaaaaggatcgcgaggatctgcagtcccagatcgataccgctgacaagcagctgaaggataccaggcgattcctggaggatcaggccgccgaacgcgaacaggaacgcgatgagttccagcgcgaaatcgagcggctgaaggctcagttgcgcgacaaagagaaggagcacagctcctatgccaatgcctccgaggaggtgagtccagtccatggttcttatctatga

SEQ ID NO: 28137 - protein, 353 aa, DROSOPHILA
MLRVPDVHSLLEVVEDPSLVQFIDSKSNEEPSEDFDLNDCLERLKSEASYLLHLSEDLHKQRTHDESSEHLDEPEKQEHELCCEAEDGLKTTGAVNQQVLSKFLRTNSLNDQQMGVANQRKNSNPEAGKTHSSLPPDLQEHAGNASELSFQLVQLKNRLIKSEADRQNLQQQLSRTIDRNAELGQELQALRDQLSQLNSLNHTDYNEGYGLGTMKSLQEQGLDQSSASFLALQERARHLLSSSPVKEQPSRDHGNSTVILLQMIEDFCREGDKVVEFSKKDREDLQSQIDTADKQLKDTRRFLEDQAAEREQERDEFQREIERLKAQLRDKEKEHSSYANASEEVSPVHGSYL

SEQ ID NO: 28138 - DNA, 2459 bp, DROSOPHILA
ggtgggcatgatgcgatagtaaccgttgttatagtacggataccaattgttgttccattggttacgtggtgacgatggggtagtatttccctggttgctgttggcaacggaattggacactcccgtaatgatcaccgtgttgtttccaaacttaaccgtcgtattcctttgaccagcctctgccaggacggcctgcagccaacccaaattcatctggggagctgcattgccataggcaaggataccggcaaagatcagaagagcaaatgctatggattgcatgattatcaaaagtatacaggctgagtgcaactgagactatgattttcaattagcttatctttgtttttatatctttaaaaagttgtccaaatcgatcgatttattgtgacatgattacattatgctaacaatcgtcaaggttccatcatggcctacgatatatttagttagaagtagttattgtttttggcttaccacaaatacgacaccgaacatgtgagtaaatattaagaagtttcgagtaagcggagcaaaacaagctaatgtgctatgaatcagaaaataagaatatggagggccattcccaaaatttgtaaacaattgtaggtggaacagtggttattctacaaagaaataaaaaggagtcattaatttgatatagacattttcataagcaagttaactatggattataacatgctgtgtttgctttccttaggttatacaatatattgtatataaaagtatgacgttagccacgtttcactgtaatctttatacgttctccaagttccgtcagtcaaatgtttacgcacgactttgcctcattttttgacgctcaaaccaaggcaacagctgtcgcggggtaaacacaaaacgaaccaaataaattgtcacaatgcgcgcttttatttttctgccaatttagagattttgctataaaagcgtattttcaatgtggaactgaacttagttgaaaactaaatttgacaatacaatgcgtgcctatttgctgcttgccctgtttggatgtgtgcttttggccacagtttccgcaaatccggtggacattgacgacttggaggacctcgaggaggacaaacgaattgctgatgagcaggataatgctaacgatgatgagaaagacgatgaggattcaaatgaacccgagtccgacgacgacttagatgagcctgaatccccggaggacgattcccagaacaatgatgattccgaaagcgacgagagcatccagtacaatcaagatgaagagtagctctaatgggaattaaccctttctattctttattgtctttatctacacgctttcaccggtcgttagacgtttaaacaactgtttacacagaaatacacagttcatcttcaacaaccaaataagtaaaggtttttatgttattctagtaaatacacacatttctggaaacacccatcataattggtgctttttacttaacttctttttatacagctcttaaatgattttgtaaagaattacatactaaacaaaatcttaaaaatgcaatttttatttaattaattggcctcaaagccactcttaatactcttatttcagcgcagggaaaaagaaataattttctgcctgtaatgtgtggctcaatagatcaataaatgttttatctctcaaatatttacttaacattagtaaggtgcagccattgtgcagtttgcaatagaaattttaaagcaaacacggcattcatatataagaagtgcagtactttgaaaaaacttattcaaagaagaactaagtctacgaaatagagatgcactttctgatggtactcgtgataattgctcttttggccatggcctttgtgagtgcaagcccacttccccatccaagtggagaagttatcgttattgtcaacccaaaagccccagttgactggtgctctacaacatcagcggcttaaattcgaaaatacaaaaatatttagaaattctcccccgatgcaatttctcaaacacaaaatatgaaatgagcaactgataaatcaccaataaagaaaataaaaataaaacttattcagggtaaaacttttaaatacgttttttggtctttataagttaaatgaaatcaataaacgttttgaagttcgatttggagatatcagattttttattttgctttatattagcacatattaccacgacggaaatgaaaatcctttaggcgaagtaaatagtaatgaaggtaagaaaatttgtatctaatgttttaaaaaggccaaaaaccattcactatctttttaattcaatgattgcatgcgagtgtgtaataaatatgacaaaataaaaacagaggtcgctatagtcaagtgccacgactattagatacctgttaatcagaatagaggcaagcacaacgaacccacttactcaaaacaattctggacaattcccagaataatatc

SEQ ID NO: 28139 - DNA, 459 bp, DROSOPHILA
atgcgtgcctatttgctgcttgccctgtttggatgtgtgcttttggccacagtttccgcaaatccggtggacattgacgacttggaggacctcgaggaggacaaacgaattgctgatgagcaggataatgctaacgatgatgagaaagacgatgaggattcaaatgaacccgagtccgacgacgacttagatgagcctgaatccccggaggacgattcccagaacaatgatgattccgaaagcgacgagagcatccagtacaatcaagatgaagagtagctctaatgggaattaaccctttctattctttattgtctttatctacacgctttcaccggtcgttagacgtttaaacaactgtttacacagaaatacacagttcatcttcaacaaccaaataagtaaaggtttttatgttattctagtaaatacacacatttctggaaacacccatcataa

SEQ ID NO: 28140 - protein, 92 aa, DROSOPHILA
MRAYLLLALFGCVLLATVSANPVDIDDLEDLEEDKRIADEQDNANDDEKDDEDSNEPESDDDLDEPESPEDDSQNNDDSESDESIQYNQDEE

SEQ ID NO: 28141 - DNA, 2504 bp, DROSOPHILA
attattgctctcgtcgctttcctggccatttccactgtgatggcacatccatatgcgaacagtagcactgaagaaggatcaggatccagtaaccgatcgactattcgtcctgtccccagatggcctaagtggggtggaatcggtccagtcattttaaacactccccccactccgtgacaatgaactacggaaagaaattaattgtgaaaccccacaacgaacctttgttgttgtctaaaaaaaaaaatatctccaaaaatacgcttgtaaaactttccattgagacaattgttcaaataccaaagcgtaaataaagatttcgtagtagattctacgaatcggccaaaatttgcgagacttttcctataaatagctgaatgttgtacgaaatgggaaagcagttttcgcgataacttcttagactcaacttcaaaatgcgttccctgattcttgtcgctcttttggccttcttggctgttggctttgtggctgcccgtccagctgaggatgaggagtcctccgctgccgtggttgagaatgccgatgaggattcgactagcaatgatgcggagagcaccgaagccactgatgcggaggaatcttctgatgatgaggagacgactgaagagtctggtgatgccgctgacgaatccagcgatgatgccgatgaggatgagacaaccactgcagcttcggccaagaagcagatccgtcccttctggcccaggttcggaggtcatggtccagttgtgatcaggcgtcaccctagtcttgtctaggtcaaagccctatagtcttgattgcttaactattcctttctattttctaaataaaaaatgttatctttaactcaaactaaaaattcaaacttttctaccaattttctatacaactctatttttttcaaaacaaataaagtgaaatttcaaaaattaagaaaacattaaaagcagctgattcttttgtagcagcagccagtattgtttagaacgttgaagaaatgcgtactttgtgtgctctaagtttgatcgcttttatgggcataaccctaatatctacaaagccattagatgaatctatcaaaccgaaagttttaaggccactaaatcaagcggatttggataaaatgataaaaaacttgcagttgcttgaaaaattagccaatgagacatattattcaccagatcccaccaaaaaggagacatacttaacgcaagatcaaaaggcggaggaaactaaagagccaactggagaggaaaccgaggaaccttctggagaggaaactcacagtcctacgggagaggaaaccaaaagtcaaactggagaagatggcgagttcttcgaagatgaagaggaggaagatgaagcgactgtggataaaccaactgatgtcataccagttaattttctaaaatatcccgagcacgaagctgattttaagtcttatccaaggtttgcaatccttcgaaatggctatgtgcatcacatgaacttggacttttagcgtttacgcaatttcatcacaaattcgagctaatgacgtgttctcaagaacattgtcagttaatgtcgatagatggggaaattccgactacagtcaggtggtttgcacagctgtgactctgaataaaagttagatctgtggtacctatgtatgagtttgttttcctatagctatacctacaaacagtgtgctccgagccacacatttgagtagttttgtttttagttaccaaaatgcgtctctacgttgggttactatcggttttggcccttacttttatgattgccttaatcacgtgtgctgattcatcatctggaaagtcccggaatcgcgaagatcgatttgatctagaaaacgagagctttaataatcaaggaagtgacgagctaattgcgtcatgtgaaagtaaagagagtgtggaaatcaatagctgtcgtcaggggaaaagtaaataccccaaaagaaagacatttaaattcgccatttagttaaaacattcgataatactgttctcaataaaaatgtattaaaaacaaataatagctatgatgtttacttggtttggtttttatagttagaatatattttgataagtactgatttttgatcatgcaggccatagttttttgctattctttaaatatattatttatacagcatttgcttttaaagataatttttttcacaaaattgtataatgtatatataatttttctttttatagttaaacaagttgtgaataagttgtgtattcaatttgtattttcagtgaattcaactcatcggcaagatggttatggttagttccgcggttctgggggccgcagccggtacaggattggccctgatcctggccgtgacaatcgtcatgtaccgctactaccttctgcgtaagcgtggcaaggagtgggacgaactggaccgctgggaggaaacgcgcattatgcggaagctgcagatgaaggtaggcgactgacgcagtctgttaatgttaatgtga

SEQ ID NO: 28142 - DNA, 504 bp, DROSOPHILA
atgcgtactttgtgtgctctaagtttgatcgcttttatgggcataaccctaatatctacaaagccattagatgaatctatcaaaccgaaagttttaaggccactaaatcaagcggatttggataaaatgataaaaaacttgcagttgcttgaaaaattagccaatgagacatattattcaccagatcccaccaaaaaggagacatacttaacgcaagatcaaaaggcggaggaaactaaagagccaactggagaggaaaccgaggaaccttctggagaggaaactcacagtcctacgggagaggaaaccaaaagtcaaactggagaagatggcgagttcttcgaagatgaagaggaggaagatgaagcgactgtggataaaccaactgatgtcataccagttaattttctaaaatatcccgagcacgaagctgattttaagtcttatccaaggtttgcaatccttcgaaatggctatgtgcatcacatgaacttggacttttag

SEQ ID NO: 28143 - protein, 167 aa, DROSOPHILA
MRTLCALSLIAFMGITLISTKPLDESIKPKVLRPLNQADLDKMIKNLQLLEKLANETYYSPDPTKKETYLTQDQKAEETKEPTGEETEEPSGEETHSPTGEETKSQTGEDGEFFEDEEEEDEATVDKPTDVIPVNFLKYPEHEADFKSYPRFAILRNGYVHHMNLDF

SEQ ID NO: 28144 - DNA, 3597 bp, DROSOPHILA
ttggcacagggccagcgaaaaaaggcaccacatctcatagaggtcgagggaattcaacagcgatgcctgcatatctaccacaagatatatttccccgacgatacggttgaggctttcgagattgaatcacacacccggggagcagagctcatagcggacatagcccagagattggagctcaaatcacctgtgggttatagtattttcttgaagacaggcgacagggtctatgctatgccggaagaggagttcgtttttgatttcatcacccaactcatctactggctaagacagcagaggaccatacgctccatatccgatggccaataccaactgcacttcatgagaaagttatggttaaacaaccatccaggcgaagacctcaatggagatatgatctttagctatccccaagagctgcacaaatacttgaagggctactatcccatcgattgcgagcaggcctcgcgtttggcaattcttgtgtacagtgcagatcatgacgttagcttgcagcggctgcccgaagtgctgacacgtttaattcctgaagacctaataccgcttcaaacggtggccgaatggaggcagcagatcctgcccaaggtccaccgcgatcatttaacggaagatcacgccaagattttgttccttcaagagctgtcccatttcgcttgcttcggttccacattctttgtggtgaagcaacaaaatgacgatgcccttcccgaaactcttttaatcgcaattaacagcacaggtttccatatgctggatccgacaactaaggagatccttcgcagctatgaatactcccagttgggtatttggagctcgggtaagaaccacttccacattcgttttggtaacatgatcggagcatcgaagctgctgtgcagcaccacccaaggatacaaaatggacgatttgctggcctcttatgttaagtattttaatgaacacgaataaatcataaattcgggataaataaatcgtgctcttacaagtagcccaactccttggtcttttcaattaaagccagcattccaaccattagctcctcgcagttgggaatgatctgcactggtggcaggataaagccgtagcgacccttatcacggtactcgattgtgtaaccgatcttcttgcccagctcgttgaacacccagtccacggaggttccagtggccacatctgttttaaaatgtcataaatatttagtaggcataatttagcatgctagttattttagttttattaaggcaatacttacaaagcacatcagctgtagagccatactggtagacggttccgtacggcagtgcttcaatggcatcggcaaaagctttgccaatagtcaggatatcattgtaattttctgggaactcctcattggtatgaccgtagggcgaaagcaaatactgtccatatgagtggaaggatatgtacacactaatttggtcctggattttggtcaagtactcgaccaaggccttggcttcaggctcagattcagggttatccccagcaaaagtctcactgcagggattgtcagaggctccattgttctggagccaataggagtcgaagttcctattggcgtcagctccaatgcatgcattcgtggcatgtggctgacgtgttttgcgccacatacgatcctgttattgcataatgatttaaatatataaatagatgtcaaaatcagtgaaagcattcactcaccttcttgtgtgagtactcaaaaccatctacattgaacacgggaattatatgccaatcatagttatcggccaaacttcgcacatcggcatcctctgaggtcaaaagctgattgatgaaccatgtagcactggccgaagttatccattctctggcatgaatgttggactcgatgaaaatgccaggattgccagccttgtgggagatcttaatgcctctaatggttctcccctcgtaggacttgccaacaatgaactcctcggtcaccgagggataagcatttagaatctcgtccagccaggcctcaatctcttccagctcgtagtacttcgtccagccgaaggtggcgctatctgcagtcggcgtgacttgctcctcgtcgatacgcctgaatgggaatccaatcgttaactttatggtcttaaatgagcacgcactaatggttagctaatcgagcgatcttatcgactcgagtggcattaacccgtacgctgtgccgcattccactacttactcttggacattctcgatcataagctcactgctgatattattgaatttaagcagctcctgaaagtggttaagttctccaggactaaccataatatcaatctgcctacttcgctcgtcatactccttccaaatattgtactaaacacaaaagaattgattgggttacgtcatctgatctgtggtattaaacaactaaccttcttcgttagctcgccaattttctcgatcgcagccaattgaattttgttctggatagtgagcttgtataccctgaagttatcataacgctctttgggagagtccttaaggataccagcacttgttagagccaccagcgtggcaagcaaccaaagcagacgcattttgagcaatgactaaaattctgctgacggcctcgtgcttaagaaacataacacgttgattatctgcagttaatctttattgttttattgcacattgaatttccccagcacttacagcgcgctcttaagcccgagatagccgaggtctttacacttttctaatagggcagcaatgccgattagtgcctcctctgcgtttggaataatgtgcaccggtggcaggataaaaccatatcgaccggtgtccctaaattcaatggtatacgatatctccactccttgttcattgtatgcccaatcgatggtggctccagacgcgggatctgtgataacaatttaagtttacatacatgcaaataaaatatattgtccaaaatcttacaaagaatgcccgcagctgagccgtatctgtaaacggttccataaggtaggctctcaacagcatctccataggccttagcaacttccatcatatcatcaaaattgggaggaaactcctctttagtgtgtccatagggagagagcaaaagctgactatacgagtggaacgcgagcaaaacattgattttatccttgatgctgattacaaactcagacatggcctggatttcaggctccgaaaagggcttgggtccaccgtaatcctcagcacagggattcgaagaagccccctcgttctccatccaatgcgaatcgtagtttcgattggggtctgctccaatgcaactagaaatttcggagggttgacgggtctttcgccacatgcgatcctacaaaaaatgtgttttacaagcaaagtgtcaagtatagatgaatgcattggtaccttttcatgagtgtacacaaaaccgtcgacattcagcactggcactatataccagtcgtgattctccgcaagatcccgcactaattcatccgtagaggtaaggaactcgtttatcagccaagtggctgtcgcagaggtgatccactcccttgcatgtatattggactcaataag

SEQ ID NO: 28145 - DNA, 1269 bp, DROSOPHILA
atgcgtctgctttggttgcttgccacgctggtggctctaacaagtgctggtatccttaaggactctcccaaagagcgttatgataacttcagggtatacaagctcactatccagaacaaaattcaattggctgcgatcgagaaaattggcgagctaacgaagaagtacaatatttggaaggagtatgacgagcgaagtaggcagattgatattatggttagtcctggagaacttaaccactttcaggagctgcttaaattcaataatatcagcagtgagcttatgatcgagaatgtccaagagcgtatcgacgaggagcaagtcacgccgactgcagatagcgccaccttcggctggacgaagtactacgagctggaagagattgaggcctggctggacgagattctaaatgcttatccctcggtgaccgaggagttcattgttggcaagtcctacgaggggagaaccattagaggcattaagatctcccacaaggctggcaatcctggcattttcatcgagtccaacattcatgccagagaatggataacttcggccagtgctacatggttcatcaatcagcttttgacctcagaggatgccgatgtgcgaagtttggccgataactatgattggcatataattcccgtgttcaatgtagatggttttgagtactcacacaagaaggatcgtatgtggcgcaaaacacgtcagccacatgccacgaatgcatgcattggagctgacgccaataggaacttcgactcctattggctccagaacaatggagcctctgacaatccctgcagtgagacttttgctggggataaccctgaatctgagcctgaagccaaggccttggtcgagtacttgaccaaaatccaggaccaaattagtgtgtacatatccttccactcatatggacagtatttgctttcgccctacggtcataccaatgaggagttcccagaaaattacaatgatatcctgactattggcaaagcttttgccgatgccattgaagcactgccgtacggaaccgtctaccagtatggctctacagctgatgtgctttatgtggccactggaacctccgtggactgggtgttcaacgagctgggcaagaagatcggttacacaatcgagtaccgtgataagggtcgctacggctttatcctgccaccagtgcagatcattcccaactgcgaggagctaatggttggaatgctggctttaattgaaaagaccaaggagttgggctacttgtaa

SEQ ID NO: 28146 - protein, 422 aa, DROSOPHILA
MRLLWLLATLVALTSAGILKDSPKERYDNFRVYKLTIQNKIQLAAIEKIGELTKKYNIWKEYDERSRQIDIMVSPGELNHFQELLKFNNISSELMIENVQERIDEEQVTPTADSATFGWTKYYELEEIEAWLDEILNAYPSVTEEFIVGKSYEGRTIRGIKISHKAGNPGIFIESNIHAREWITSASATWFINQLLTSEDADVRSLADNYDWHIIPVFNVDGFEYSHKKDRMWRKTRQPHATNACIGADANRNFDSYWLQNNGASDNPCSETFAGDNPESEPEAKALVEYLTKIQDQISVYISFHSYGQYLLSPYGHTNEEFPENYNDILTIGKAFADAIEALPYGTVYQYGSTADVLYVATGTSVDWVFNELGKKIGYTIEYRDKGRYGFILPPVQIIPNCEELMVGMLALIEKTKELGYL

SEQ ID NO: 28147 - DNA, 3946 bp, DROSOPHILA
aatgaaactttcccacccaaatccctgtccgaatacacattcaccctacctgagttgcccaaaatcgatgtgaaagactacctgaaccaggagcagttcgaatcgctacgctctcaggccgccgagcatgcggtccgcgttcgcgattgggccgacgactacgttttgtacttgagaaccatcggtcagaacgtggtcaacaagggtcgtcagttatttcagggcgatgataaagtctattatgagcgtgtgtagggaacatctgcaatgggcaggctacagctaccagatttagtgatctggttgggtgcaacgccccttgcacttagacaaatatgagaaactttctttatgaacaatatgagtacaaaataaagcatttgatccgttttttgtccgtctgcttgacccgcagttttgcgcacttactttatagtttttcgtcccgtcatttacccacttcataggcaaacccacctctcataccccaccatactaaccgacacaattcccaacaaaatgcaacatcacaggctgatgggagaaggatagagctcgccgctgttcaaattgtaaaactttcgtaatcgttaacttcattcttgtccaacaattagggccgttatccgtctgggttagtgccctaactaaatcttacttgttgttaaacaacgtttaattgtaatttgtgcactgtttgctttgtaatagtctatacaaaaataaatcgcaaacaatttcatatgaaacatcaagtacaaagaagagttgtttgttttatttgccatttgttggaagttcgctaaatggtaagtaagatgtaaacaaagcaatattagttggccagaatcgaactctatccttctgcatttgtgttggaataaccccaaaaacgagttccctgttacctcagtccggttgataattgaagttggtagggactgtaaatgtagaaggattgccaactaatagtgctatgtttaattttctccttccccaggatggttgctcttgcaggaggatcaacgtagtgcttacgttcagcgtgcggaagcactgttgccgctgccactatctattttcggctccctacgtagtcgattttcaaatgctggagccaccttgaaaagttggatggaagtgcccaccgtcaggagtccccagcgggaagccgaggccattaaggtaaacatggccagcattgaacagaacatccagaaagccttgactgccgaggaatacgaaaatatcttaaaccatgtaaacagctacgtgcagcagttggtcgagctgaaaatgcagcagcattccaaggagctcgcaccgcaacagattgaactctttgttaagctgatgaaggaaaacctcaagcagattatgtacaaaacggagctaagcgaaaaggatttgtctgatctggccataaaactgaaactggagctgcaaagctcaggcggttggcaagatggagcgaaactatcacaagctaacttagaggagataaccaagctaattaaagcagaggttcacctccacgaatcgcactacaccattcaattggacaggatagactttgcatccctgctggagcgtattcttgctgcgccagcattggcagactttgtagatgctcgaataagtcttcgggtgggagagctcgagccaaaggagagttccggttcctcagatgcagaagtccaaattgagcgtctgaacagggaaatcgccttcattaagttggctctctctgacaagcaagcggagaacgccgatctgcaccaatcaatcagcaatctgaagctcggccaagaggatttgctggaacgcatacagcagcacgaactttcccaggataggcgcttccacgggttgctggctgaaatagaaaacaaactgtctgcgcttaacgactcgcagtttgctcttctcaacaagcagatcaagctatcccttgtcgaaattctgggctttaagcaatccaccgctggcggttccgctggccaattggatgacttcgatctgcagacctgggtacgcagcatgtttgtggccaaggactacctggagcagcagctgctagagctgaacaagcgcaccaataacaacattcgcgacgagattgagcgttcgagcatcctgctgatgagcgacattagccaacgactcaaacgggagattcttctggttgtggaggccaagcataacgagagcaccaaagcgttgaagggccatatccgcgaagaggaggtgcgccagatagtcaagacggtgctagctatttacgatgccgacaagacgggcctggtggacttcgccctggagtcggcgggcggccaaatcctttccacgcgttgcactgagagctaccagacaaagtcagcccagatatcggtgtttggaattccactctggtatcccaccaacacgccgcgggtcgccatttcacccaatgtgcagccaggggaatgctgggcattccaagggtttcccggatttctaggcaagtcgcgggtaaatagtaattgctaaaacagtccttatagttttcttcccacagtgctaaagctcaactcgttggtgtacgtcactggattcaccctagagcacataccgaagagtctatcccccacaggaagaatagaatcagctcctcgcaacttcactgtctgggtaagtttgactaagggtgaaaggaagtggtgcatttctaatacgacttatccatcaactcagggcttggagcaggagaaggaccaggaacccgtattgttcggcgattaccagtttgaggacaatggtgcttccctccagtactttgccgttcaaaacctggacatcaaacggccgtacgagatcgtcgaactgcggatcgagacgaaccatggccatcccacctatacatgcctctaccggtttcgcgtgcacggcaagccgccggccacataaatctgttcaaatctcttctagtgacctaagtactgccaggtgtacataatgtctgtgccttaaaaaggaaactaaacaatatatcactgcgagatgtggatcaacggagcccagccgctttcaacaatgcgaactatgtaaaaagtaaggctatatagattgtaagtgttttgtatcatatcgtagatttgaagtgtttaaatcacattaaggttaacttgtacatagcatattatttaagtcaggactagagtccctataagtactataatatttattagtatttagttatttccctgaaatcaatcatcgttcctttaagtctactctacttacgtatgcaagtttccaacccgtaaacgtagcactataccccagtttataaacaaatttcaaattccaatctcggcgtcaaaaaaatgatcttgtcctgaatcagactgatcttctaactttatcctaatccaatcttcctcggccagaagcttttctttagaaacttctttaacgttcaattatgtttagaatcaaagctttatgctgattgagacgagaagttgatcatggcctggtctccaagcggaagctgtgtttactttaagttttgttatctatcttatcgggtacctaagtgctggcaaaggcaatgacaaaaacaaagacaaaggaaatgccgccgagattgaaatgtgaaatttgtttataaactggggtagggtgctatgttttcgggttggataacttgcatatcttttaccatgtttgccatgtttaaaagcgttttgaaggtaatagtcatagtttgtctaagccacacacttgctggaaatgtatagtttaagctatatctaagctaaaatgttttaccatgaaaacttgcaaattccttataaatgcgatagcgatttgaattcacacctctaaaatagtgacaaataaaattgaaactcactgaataactcgatcgaataaaagctgcctgcatccctcccaatgaaac

SEQ ID NO: 28148 - DNA, 1844 bp, DROSOPHILA
gatggttgctcttgcaggaggatcaacgtagtgcttacgttcagcgtgcggaagcactgttgccgctgccactatctattttcggctccctacgtagtcgattttcaaatgctggagccaccttgaaaagttggatggaagtgcccaccgtcaggagtccccagcgggaagccgaggccattaaggtaaacatggccagcattgaacagaacatccagaaagccttgactgccgaggaatacgaaaatatcttaaaccatgtaaacagctacgtgcagcagttggtcgagctgaaaatgcagcagcattccaaggagctcgcaccgcaacagattgaactctttgttaagctgatgaaggaaaacctcaagcagattatgtacaaaacggagctaagcgaaaaggatttgtctgatctggccataaaactgaaactggagctgcaaagctcaggcggttggcaagatggagcgaaactatcacaagctaacttagaggagataaccaagctaattaaagcagaggttcacctccacgaatcgcactacaccattcaattggacaggatagactttgcatccctgctggagcgtattcttgctgcgccagcattggcagactttgtagatgctcgaataagtcttcgggtgggagagctcgagccaaaggagagttccggttcctcagatgcagaagtccaaattgagcgtctgaacagggaaatcgccttcattaagttggctctctctgacaagcaagcggagaacgccgatctgcaccaatcaatcagcaatctgaagctcggccaagaggatttgctggaacgcatacagcagcacgaactttcccaggataggcgcttccacgggttgctggctgaaatagaaaacaaactgtctgcgcttaacgactcgcagtttgctcttctcaacaagcagatcaagctatcccttgtcgaaattctgggctttaagcaatccaccgctggcggttccgctggccaattggatgacttcgatctgcagacctgggtacgcagcatgtttgtggccaaggactacctggagcagcagctgctagagctgaacaagcgcaccaataacaacattcgcgacgagattgagcgttcgagcatcctgctgatgagcgacattagccaacgactcaaacgggagattcttctggttgtggaggccaagcataacgagagcaccaaagcgttgaagggccatatccgcgaagaggaggtgcgccagatagtcaagacggtgctagctatttacgatgccgacaagacgggcctggtggacttcgccctggagtcggcgggcggccaaatcctttccacgcgttgcactgagagctaccagacaaagtcagcccagatatcggtgtttggaattccactctggtatcccaccaacacgccgcgggtcgccatttcacccaatgtgcagccaggggaatgctgggcattccaagggtttcccggatttctaggcaagtcgcgggtaaatatgctaaagctcaactcgttggtgtacgtcactggattcaccctagagcacataccgaagagtctatcccccacaggaagaatagaatcagctcctcgcaacttcactgtctggggcttggagcaggagaaggaccaggaacccgtattgttcggcgattaccagtttgaggacaatggtgcttccctccagtactttgccgttcaaaacctggacatcaaacggccgtacgagatcgtcgaactgcggatcgagacgaaccatggccatcccacctatacatgcctctaccggtttcgcgtgcacggcaagccgccggccacataa

SEQ ID NO: 28149 - protein, 569 aa, DROSOPHILA
MEVPTVRSPQREAEAIKVNMASIEQNIQKALTAEEYENILNHVNSYVQQLVELKMQQHSKELAPQQIELFVKLMKENLKQIMYKTELSEKDLSDLAIKLKLELQSSGGWQDGAKLSQANLEEITKLIKAEVHLHESHYTIQLDRIDFASLLERILAAPALADFVDARISLRVGELEPKESSGSSDAEVQIERLNREIAFIKLALSDKQAENADLHQSISNLKLGQEDLLERIQQHELSQDRRFHGLLAEIENKLSALNDSQFALLNKQIKLSLVEILGFKQSTAGGSAGQLDDFDLQTWVRSMFVAKDYLEQQLLELNKRTNNNIRDEIERSSILLMSDISQRLKREILLVVEAKHNESTKALKGHIREEEVRQIVKTVLAIYDADKTGLVDFALESAGGQILSTRCTESYQTKSAQISVFGIPLWYPTNTPRVAISPNVQPGECWAFQGFPGFLGKSRVNMLKLNSLVYVTGFTLEHIPKSLSPTGRIESAPRNFTVWGLEQEKDQEPVLFGDYQFEDNGASLQYFAVQNLDIKRPYEIVELRIETNHGHPTYTCLYRFRVHGKPPAT

SEQ ID NO: 28150 - DNA, 3747 bp, DROSOPHILA
gctcagctttttttttttttattgtatttggcccgtacccaaccaaatacacctaccttcaatttgctgttgattttcaaaatcgaatcttgaattaatcatgcggaataaatttactctacatttactctagaagtctgccttaaacgagaagtaattgtggaatgaagtaagaggaataagaatggtatccattctcaaaatttctcctgtggctaattgaattaaaattgcgatttcattttcagcgattgcttcatgcgtataaataatatttctattccaattccaatcgcatcgaaaaaccaaaatcgaatgcgaaaacagcgaaatttatgacaggcaggcaagatttacgcttgtggcttcagtttcagtcggagagttcaataacttttcggggtggattagagcataattccattgtcatggtaatttatgagcttagttcccattgttgtcgctgttcgagccgatgctgttgttgttgtcgttgttgcaactcatccagctttgcagatttttgcaacattagcgcggaattatggcatccattacgaaggattctcccatatgtgcttgggtcctataaaagcattcgaacattcctcatatgtcgaaatgttgtcgctgcaaatgggcattggcaattacgttaagcgtttcgccaaatcttcttttaaaagtccttttaaactgggtcacacttttcaattttcaattgggtgctaagtggttgattcgtttttggtagccgaccattgctgtctgcttagtggtaactgattacatatgcgcatattttaatagaccacagttattcccacatggggttgtttgcaagaaagtaggggtaagagtaagggcaagactagagttcaatttctggtgtagatctaatgaacaaattagtagaagaggtactagtttagattttattgtgtatgcttacatcgcattcctattttcagaaatatattgcctaaagttgttgctaccactagttattgttataattttttaaaaagtgctctttgacagccgatctgttggtttttctgttaccacttcgaacgatttgatctacaattaatgctcctccatttagctgcttaaacttggcagttatgcgcttccttacgtactccaccacatcctgcgcttccagttgggtacccggcttcttgaccaacgatgctgctgcctcatctccatttactggatcccaaatgccgaacacacaagcctcgagcacatttggcatttcggcgatgacattctcaatctcactgggataatacattatgttctgatacttcagcatatcctttaggcgatcgataacaaatagataaccatccttatccacatagcccaagtcccctgtgtgaatccagttctcagagtcttgaatttgcctggtttcatcgggatttttgtagtaaccagcccatttttggctattgtggaagcatatctctcccacgacattgggttcctgagcttcaccctgctcgtcgattaccttgatttttatacccctaatcgcacgacccactgaattgggtttctcatcgaaatttaagttaacgctgcccgcactgttgagctcagttaggccgtagcaaaaatttaggcaatcgtggctaagacggctgcgaactttacgctgaacttccagagaacagcttgatcctccaaaaatcacgtaatttaatgaagacaggtcagccgattcgaactctgggcagttggcaaatatggctaggtaggagctacttagaagcaccatcgagatcctatactttccaatggcgcgacaaaatagcccaggatcaaagtcacagtccgctataatactagtggtactgaacacgccagaggttatggccatcgaaagacccgagcaccagtccagggtgctcgacgtatactgaatattggagttattaattgccctgaaatgtagttgtttaagaaaatgaaataaaagtctttaactatatttacatgtagtccacaatgatcttgtgactattgctgatggtaactgcctttggaaatcccgaggtgccggaagaactgagaatggccagagtgtgatcgatgccatctttgagacgaagtggttggaaattctgcatcactggagtggtcagaacatcctggatcctcactgatcccctcggatgattccgcatggtgactatcgttacctggaggtccttggtggccgatttaaccttttcatactcatcaccatcgcagaagatcaagcggggctttgtgattccaaaaagtttggcgatgcatgcctcttcgtaggcattgtgaagggcgtgtaagggggttccgttgaagaagcatgcatatgccacagctgattggtgagtcgtgtgtctgcccatgacccccactatatcagtttgccccaagcccatattcctcatataactagccactcgcatcgcattcatatgaagatcttcgcgggtgagtacgatgtcctccgtgatcgagatctggtggttcaatgcaaatctatacatttctctgatttcgagagaaaagaaactcacctgggcaatgagtttcggattgtttaccatatccccaaagattatctctccgattgataagtttggcgaaaataaacttggtgcttcacgaccactccagatcttgagtttatcatcataagtgcacatcgcgttcaatagtttttgttttacttccatttcagccattataagaaaatgctgagtcgattattagtttttaagtaaattatgctattataacccctcgtatcagcaatgctatttcacagcaataatgtacataattacgaaagatcagctgtattaacgattttgtaatcgatatgtgtttcggtattattttactcggcgaatatgaaaaaatgcctaagatggcgaacctcttaaaaagcttacgataaatacaacaaatacaaatacaaatacaataaaaatacaaatacaacataaacattacaataattaaatatgcaaaactaattcttctccataattcgtaaaaactcagcttttgtggccgctctgtttgcttttctattgccactctgaataatgtgatccacaatcaaagctcctccattcaactgcttaaatttggcaggtatacgtttcctcacatactccacaacatcctgggcctctagttgggttccttgtttcttgaccactgaagcggctgccttatctccataaacgggatcccaaatgccaaagacacaagcttccacaacatttggcatttcagcgatgacactttcaatctcgctggggtaatacatgatggtctgatacttgagcatatccttcaagcgatcgataatgaacaaatatccatcctcgtccatgtagcccaggtccccggtgtgaaaccagttctccgagtcctgcatcttcttcgtttcttccggattcttgtagtaaccaggccatttctgaccattattgaagcatatctcgcccacgacattgggtccttgtgcttcacccagctcgttgactattttgatttgaatgcctctaaccggacgacccactgaattgggtttctcatcgaagttgaagtttaggcatccggggctgttcaactcggttagtgtataactgaaatttacacattcgttgcttagacggctgcgaattttgttctggacttccagtgagcagtttgatccgccgtaaaagaaat

SEQ ID NO: 28151 - DNA, 1695 bp, DROSOPHILA
atggctgaaatggaagtaaaacaaaaactattgaacgcgatgtgcacttatgatgataaactcaagatctggagtggtcgtgaagcaccaagtttattttcgccaaacttatcaatcggagagataatctttggggatatggtaaacaatccgaaactcattgcccaggtgagtttcttttctctcgaaatcagagaaatgtatagatttgcattgaaccaccagatctcgatcacggaggacatcgtactcacccgcgaagatcttcatatgaatgcgatgcgagtggctagttatatgaggaatatgggcttggggcaaactgatatagtgggggtcatgggcagacacacgactcaccaatcagctgtggcatatgcatgcttcttcaacggaacccccttacacgcccttcacaatgcctacgaagaggcatgcatcgccaaactttttggaatcacaaagccccgcttgatcttctgcgatggtgatgagtatgaaaaggttaaatcggccaccaaggacctccaggtaacgatagtcaccatgcggaatcatccgaggggatcagtgaggatccaggatgttctgaccactccagtgatgcagaatttccaaccacttcgtctcaaagatggcatcgatcacactctggccattctcagttcttccggcacctcgggatttccaaaggcagttaccatcagcaatagtcacaagatcattgtggactacatggcaattaataactccaatattcagtatacgtcgagcaccctggactggtgctcgggtctttcgatggccataacctctggcgtgttcagtaccactagtattatagcggactgtgactttgatcctgggctattttgtcgcgccattggaaagtataggatctcgatggtgcttctaagtagctcctacctagccatatttgccaactgcccagagttcgaatcggctgacctgtcttcattaaattacgtgatttttggaggatcaagctgttctctggaagttcagcgtaaagttcgcagccgtcttagccacgattgcctaaatttttgctacggcctaactgagctcaacagtgcgggcagcgttaacttaaatttcgatgagaaacccaattcagtgggtcgtgcgattaggggtataaaaatcaaggtaatcgacgagcagggtgaagctcaggaacccaatgtcgtgggagagatatgcttccacaatagccaaaaatgggctggttactacaaaaatcccgatgaaaccaggcaaattcaagactctgagaactggattcacacaggggacttgggctatgtggataaggatggttatctatttgttatcgatcgcctaaaggatatgctgaagtatcagaacataatgtattatcccagtgagattgagaatgtcatcgccgaaatgccaaatgtgctcgaggcttgtgtgttcggcatttgggatccagtaaatggagatgaggcagcagcatcgttggtcaagaagccgggtacccaactggaagcgcaggatgtggtggagtacgtaaggaagcgcataactgccaagtttaagcagctaaatggaggagcattaattgtagatcaaatcgttcgaagtggtaacagaaaaaccaacagatcggctgtcaaagagcactttttaaaaaattataacaataactag

SEQ ID NO: 28152 - protein, 564 aa, DROSOPHILA
MAEMEVKQKLLNAMCTYDDKLKIWSGREAPSLFSPNLSIGEIIFGDMVNNPKLIAQVSFFSLEIREMYRFALNHQISITEDIVLTREDLHMNAMRVASYMRNMGLGQTDIVGVMGRHTTHQSAVAYACFFNGTPLHALHNAYEEACIAKLFGITKPRLIFCDGDEYEKVKSATKDLQVTIVTMRNHPRGSVRIQDVLTTPVMQNFQPLRLKDGIDHTLAILSSSGTSGFPKAVTISNSHKIIVDYMAINNSNIQYTSSTLDWCSGLSMAITSGVFSTTSIIADCDFDPGLFCRAIGKYRISMVLLSSSYLAIFANCPEFESADLSSLNYVIFGGSSCSLEVQRKVRSRLSHDCLNFCYGLTELNSAGSVNLNFDEKPNSVGRAIRGIKIKVIDEQGEAQEPNVVGEICFHNSQKWAGYYKNPDETRQIQDSENWIHTGDLGYVDKDGYLFVIDRLKDMLKYQNIMYYPSEIENVIAEMPNVLEACVFGIWDPVNGDEAAASLVKKPGTQLEAQDVVEYVRKRITAKFKQLNGGALIVDQIVRSGNRKTNRSAVKEHFLKNYNNN

SEQ ID NO: 28153 - DNA, 6291 bp, DROSOPHILA
ggttgtagatgtggacctggtacataatataatatatatatatatatatattggatttgaagataagagatttgaactcacctgctgtgagagattgacaaagtcctggaagcgagccgcgcggtagtgcaggaggacctggaagatagacttctcgcgccatttcttggcaaacggacggataaagtcggcggtgttctcgtttagttggccggacttctcgttgaccagcggagggaggcggacgcggtcgcggaatcccctgaaggctgtgggaaaatggaaacggaggaaggccgttagagtaacccatttgaaaagcggtcgcggcggtggacggtggtggtgaatgagagggaagtcaccttaatttaattaaattttcatttcttttctacgcagcacttataattcatctcttttcgcaggggccgtcgatgttaagtgttatgtctcagacagctataagccgattggttgcatcagatggagaacacaaccgcccagcgggatggggtgggatggtatccacattggacaccactaagcggcttaagtggtttgccgaggccctagactagatgatagctggttgtttgcgttttctacattttattggtagtcgtattacgattagtatcgatcgatatagtgatatagtgtgtataaatggtatatagtaggggcctattcctcggcggaggcctgctcgattttggctattcgcaccgctgccagagcctcatccattctggcctcgaggaacatctcctccgcctccgagggcgtctcgcttatgtcgatgtgctcctcgtcgtactctcttagcctatccacctgcgtttttttacctttttgtattttggacgcggccacatcatgatgctccggtccctttttgcccactaatagggaatttaaaattagatttcataccatatactgtataagtattatttatatcttacatttgaaaactttgccgcccttaactcgtttccgtgctagcaaagctcgcatcatggactgcactttgatgaccttcttcacctgcagctcatacaatctgaaagcaattgatagtacttgcttttctcaatgcgtatgaattgatagctcacctggctaagaactcatcgttatagtagcgcaaaaacaccttggtcttgcccaaggcccagccttccatcttgaggcgcaagaataatagacgacagttatccttggtcatttccacgggctcatcaaagtcaaaggcaaggaattggtatctaatacgaatattttaaatatttagaaatctttaaatggaaactggaatggaatcgattacccaccgccttaggaactcgtcgaatggcagacgcgagctgaatcccttctggcgagcaataacagtgtccagaactcccaaggccttcatctgttgctggacgacatccgagtggaaggatctgggcttgtactccagatcagcgcgaatgcagcgaacgaagtgcacgccgagatttgcattctggcttagcattttgagcagggtcaggcaggtgaagcggaagttggccgccagggtacgtagattgttcacttgggagatgcatccggcacttagggtattcaaggcctgaaatgcatagtttacaaaaatataccaaatttaggttagctaataaaaactgtgacagacttacatatgacttccgttcagattcatccttatgctgcactgcctcgaatggcatggtgagattgccagccttggtcagttgattggtgaacatgagcatgatgctctcatccagcgaggagcggaaggtctcgatcatttccggcggcacaaagtcccggttgatgtcggtgaaggcgcgcgtatcatagatgatgcggcccgtgtaatgagccacggatatttcagtggcagtgtgcttcttcacaaactggctgtgcttctccgaaacgcgatctgtagatggaaagtggttaaatcacatatccaaagtggtgccagaattggttgtatacccataatcaaatcctgatcttgacaggagcgtgaggcatcgtcaatgatgtagaacaggccatccggtttggttagcagattatccagagctgtcttgttgtcatagaaattcaagttgatggtgtcaatgtcttcagcttccatttccagcatttcgctgataaaaatacgttgattgtagtgatattgcatttgctcgtttagagtattgatcattagttgctccagaccatttcgattaaagcactcaaatccaaacatgtcgtgaataatgatggcatttgtgtctccgcttaaaaagttatttaagccacattgttaaacttatgaatttgtaactttttttttaatattacttacaacacagcccgtgggaaggacatgttcatgttaatcctgttgatgataaagtccaccaatcgagagtagagcgtgctggccaccgcatcgcgtgcatccctagcttcttcagtggtgtactgtcgcctctcggcgatcccgcccttgaccataatgaagttggtcagagaccacatgaactttttctcatccacacggaggagctcggcgatccgggacacaatgtccgtgttctccacttccgcatactttccgttctgccggaaacggatgttgccaatgttcaaaatggcagccaaaactttgcgaacggtctccaattgcttgtgattgaaatcaatgtcccgcaggatgttctcgaactccctgtacctctccacattgccctcgggatcatcacgacgatacttgagtttcgatggcggaacctctggcggaactcgcagataacgataattgcgatcagccttcagattgtactccttaagctgattttgctgattaataaagtcgtagaagtagtagaagatgtggaagttgtgctgggttccgtccgtagtggccactcgtagtttctccagcatatacatattaaaaacggccccactcattttgccggtttttccaaaggtcaagcaatattgtaggacacatcttgtggagtcgttgtttaccggagttcctgcattcaccaacatcaggatggccttgatggagctctccacgcgcccggtggccccacgatttccatcacccaagtagcacagatgcttgattagcagccgggcatttgtggacttgcccgagtagctctctccggagagcacgatgtgttgcggctccttatgatgcagcatatcctggtaggcgatatcggccaccgagaaaatatgcggctggttttccgaacgcgacttgaagcgatacttggcatggaactagagaaaggataaatataacatatttaagtatacatattagatgttttcaacttacctcctgcggaaattcctgcttgatttcattggaattcaaggataaaaggatatcgccaatgaaactgtacgattcccccatcaaaatgcgatgacgcagtgactcgattatgttttcatccacgggattttccaaggcagccaagtcctccggatacatcttttccggcttctcatcgaacctcttcacatagccgcggtccacgaacaattccggctccttgtacaaagtctttacatccctagagagttccaacatttctgcgatgtccgatcgcatctcgtcctcgttttcgatgagctccgtgaggaatggatgctccaccatctcaaccatcatgggccgattttcggcatttttctccaaactctcggatataaaatcattgatctgctgcgaccaattagtgggtcgcattaaggtcggcggtggattgcgaatgatctggaacatggccctagtgggatgcatgtcagcgaacggtggctttccatcggccaactcaatggtagtgattcccaaggcccagacatcggcacgaacggtgatgtccggttcgcgggattccatggcggacaccacttcgggagccatccagcagggagatccaatgcaggtgcccctcttgcccagagtggaatccacctgacgggataaaccgaaatcgcacagcttgacccgtccatttttggtcaacaatatgttatctccccgaatgtcccgatgcaggacatgattacggttcagctcgatggcagcacggcaagtctcccggataatgtaggcgatgtgctcctctcgcattcgacgatccagtttcaaaagcttgttaaccatgtccactgctgttcccccagcgcagtactgaaatattcaaatggtttatataaattacaaaaaattggatttaaatttttggaaaaaatttaataaaatattaacaaaatgttttgactcacctccatgacaaaccagatctcatcaggtccgtttggcttcgacagcttgtagacgccatagaactcgggaagattgggatggtcgcagtagtcccgcagagtgcgatactcctcctcgatggaaacctggtgctcctcatcgtagtgctgaatcttcagggcaacgatccgatcattgtcgagctccttggcccgaaaaaccttggcattgacgccttgggctatctcctcgtagatctcgaatttatccgtaggatccggcaattgcgcgtacggtaaatacatcatgacttagatgcttattctgaatattcgaagaacatgtgggttaaacttgggaattgggtctatcataaaatgggcttcaaaggttttctttttcaattttccctcatgcaaatcgcattatatttgggttcattgttgcaaaacacttaagaatgggcattctagaggtttcattgtaatcttttgcttctaataacaatttgctttttctttaaaggtgaaagttaagttactttggtttacttaacgtaaggatattttggaatgtttgctttgcaagcacgaaagatttcaaggacctttaaacaaataagatgcaattttgaaatgtaaaattataataaaaccattttctataaaacacttaaataattcatgtgaaaacgaaaaagttaaatgtacgatttatccttggtaattaatccttcctaggtttgtattttgaatcagcaactttggataaagggattctagggggttatttgtattatatccacttcacagggcttcaaacacttaatccttcaggacacaccttcgctgccgcagattggcacacttatcctgcagctgtgtatttttggttgcaaggatgtacttgtgtggaacttcgaaccgaccgcacgcatgcagcacgtaccgctgccgttagccaactaaatgatgggccaatgcaatcggaggcttttcactggcaaggaaggaagccattcaatgggcagtacctgggtgcacaccttggacaactatttagctggctaattcaattagcggcggcgacattcacgtgcaagtgaaaaaagcggcgacacagatggccaaaatgccgaggtgaaagggaaattggcaatgcgagtgaaagtcagctgattgacagactaattatgcatcttattgttcgtatttacaaaatatatttatacgtattccaaatggctggagattgctaaactaggcattgcattcacacacgttgtttattgatgtttgccctattgcgtactttatgtttttttttctgtaatactgatttctttgtgtgttaagttctgtgagaatgaagaaaagtcttttcttatgcatgtggctgaggctccatcgctccatcacttcatcgtccttcgtcttgcgtccattgtccttaattgcatatgctaatccattcctctacgtggcactcctcgcactccacattacagcaccattggaatttacagtgacaccgctccgccctccgctggatgacctggctgtggccacggccacagcagagggaggtgcatccgtcgctggtcgtggtgttccgattgcacttgcgtcccacggtgcctgtgcggaaattggctcagattagtcatgtttatgtttttctaaagatataatcatcagaaaagaaaattatgtggtatctattaaaatataaaaataacaagttaataaaattagtggtgtaagatttgcgtaattagcaaatgattaagtgttctcatcaaatgcaatccatcgccaaatggcagttaatcccgcctactggcggacaagcaattaaaagaccataaataaactattaaactaaagcacaaacaaagtatcataattgtttggccgacgataattgccagcgttaattgctatcatttgaatagacacgacaccggacacgga

SEQ ID NO: 28154 - DNA, 3991 bp, DROSOPHILA
atcatttagttggctaacggcagcggtacgtgctgcatgcgtgcggtcggttcgaagttccacacaagtacatccttgcaaccaaaaatacacagctgcaggataagtgtgccaatctgcggcagcgaagaataagcatctaagtcatgatgtatttaccgtacgcgcaattgccggatcctacggataaattcgagatctacgaggagatagcccaaggcgtcaatgccaaggtttttcgggccaaggagctcgacaatgatcggatcgttgccctgaagattcagcactacgatgaggagcaccaggtttccatcgaggaggagtatcgcactctgcgggactactgcgaccatcccaatcttcccgagttctatggcgtctacaagctgtcgaagccaaacggacctgatgagatctggtttgtcatggagtactgcgctgggggaacagcagtggacatggttaacaagcttttgaaactggatcgtcgaatgcgagaggagcacatcgcctacattatccgggagacttgccgtgctgccatcgagctgaaccgtaatcatgtcctgcatcgggacattcggggagataacatattgttgaccaaaaatggacgggtcaagctgtgcgatttcggtttatcccgtcaggtggattccactctgggcaagaggggcacctgcattggatctccctgctggatggctcccgaagtggtgtccgccatggaatcccgcgaaccggacatcaccgttcgtgccgatgtctgggccttgggaatcactaccattgagttggccgatggaaagccaccgttcgctgacatgcatcccactagggccatgttccagatcattcgcaatccaccgccgaccttaatgcgacccactaattggtcgcagcagatcaatgattttatatccgagagtttggagaaaaatgccgaaaatcggcccatgatggttgagatggtggagcatccattcctcacggagctcatcgaaaacgaggacgagatgcgatcggacatcgcagaaatgttggaactctctagggatgtaaagactttgtacaaggagccggaattgttcgtggaccgcggctatgtgaagaggttcgatgagaagccggaaaagatgtatccggaggacttggctgccttggaaaatcccgtggatgaaaacataatcgagtcactgcgtcatcgcattttgatgggggaatcgtacagtttcattggcgatatccttttatccttgaattccaatgaaatcaagcaggaatttccgcaggagttccatgccaagtatcgcttcaagtcgcgttcggaaaaccagccgcatattttctcggtggccgatatcgcctaccaggatatgctgcatcataaggagccgcaacacatcgtgctctccggagagagctactcgggcaagtccacaaatgcccggctgctaatcaagcatctgtgctacttgggtgatggaaatcgtggggccaccgggcgcgtggagagctccatcaaggccatcctgatgttggtgaatgcaggaactccggtaaacaacgactccacaagatgtgtcctacaatattgcttgacctttggaaaaaccggcaaaatgagtggggccgtttttaatatgtatatgctggagaaactacgagtggccactacggacggaacccagcacaacttccacatcttctactacttctacgactttattaatcagcaaaatcagcttaaggagtacaatctgaaggctgatcgcaattatcgttatctgcgagttccgccagaggttccgccatcgaaactcaagtatcgtcgtgatgatcccgagggcaatgtggagaggtacagggagttcgagaacatcctgcgggacattgatttcaatcacaagcaattggagaccgttcgcaaagttttggctgccattttgaacattggcaacatccgtttccggcagaacggaaagtatgcggaagtggagaacacggacattgtgtcccggatcgccgagctcctccgtgtggatgagaaaaagttcatgtggtctctgaccaacttcattatggtcaagggcgggatcgccgagaggcgacagtacaccactgaagaagctagggatgcacgcgatgcggtggccagcacgctctactctcgattggtggactttatcatcaacaggattaacatgaacatgtccttcccacgggctgtgttcggagacacaaatgccatcattattcacgacatgtttggatttgagtgctttaatcgaaatggtctggagcaactaatgatcaatactctaaacgagcaaatgcaatatcactacaatcaacgtatttttatcagcgaaatgctggaaatggaagctgaagacattgacaccatcaacttgaatttctatgacaacaagacagctctggataatctgctaaccaaaccggatggcctgttctacatcattgacgatgcctcacgctcctgtcaagatcaggatttgattatggatcgcgtttcggagaagcacagccagtttgtgaagaagcacactgccactgaaatatccgtggctcattacacgggccgcatcatctatgatacgcgcgccttcaccgacatcaaccgggactttgtgccgccggaaatgatcgagaccttccgctcctcgctggatgagagcatcatgctcatgttcaccaatcaactgaccaaggctggcaatctcaccatgccattcgaggcagtgcagcataaggatgaatctgaacggaagtcatatgccttgaataccctaagtgccggatgcatctcccaagtgaacaatctacgtaccctggcggccaacttccgcttcacctgcctgaccctgctcaaaatgctaagccagaatgcaaatctcggcgtgcacttcgttcgctgcattcgcgctgatctggagtacaagcccagatccttccactcggatgtcgtccagcaacagatgaaggccttgggagttctggacactgttattgctcgccagaagggattcagctcgcgtctgccattcgacgagttcctaaggcgataccaattccttgcctttgactttgatgagcccgtggaaatgaccaaggataactgtcgtctattattcttgcgcctcaagatggaaggctgggccttgggcaagaccaaggtgtttttgcgctactataacgatgagttcttagccagattgtatgagctgcaggtgaagaaggtcatcaaagtgcagtccatgatgcgagctttgctagcacggaaacgagttaagggcggcaaagttttcaaattgggcaaaaagggaccggagcatcatgatgtggccgcgtccaaaatacaaaaaggtaaaaaaacgcaggtggataggctaagagagtacgacgaggagcacatcgacataagcgagacgccctcggaggcggaggagatgttcctcgaggccagaatggatgaggctctggcagcggtgcgaatagccaaaatcgagcaggcctccgccgaggaataggcccctactatataccatttatacacactatatcactatatcgatcgatactaatcgtaatacgactaccaataaaatgtagaaaacgcaaacaaccagctatcatctagtctagggcctcggcaaaccacttaagccgcttagtggtgtccaatgtggataccatcccaccccatcccgctgggcggttgtgttctccatctgatgcaaccaatcggcttatagctgtctgagacataacacttaacatcgacggcccctgcgaaaagagatgaattataagtgctgcgtagaaaagaaatgaaaatttaattaaattaaggtgacttccctctcattcaccaccaccgtccaccgccgcgaccgcttttcaaatgggttactctaacggccttcctccgtttccattttcccacagccttcaggggattccgcga

SEQ ID NO: 28155 - protein, 1135 aa, DROSOPHILA
MMYLPYAQLPDPTDKFEIYEEIAQGVNAKVFRAKELDNDRIVALKIQHYDEEHQVSIEEEYRTLRDYCDHPNLPEFYGVYKLSKPNGPDEIWFVMEYCAGGTAVDMVNKLLKLDRRMREEHIAYIIRETCRAAIELNRNHVLHRDIRGDNILLTKNGRVKLCDFGLSRQVDSTLGKRGTCIGSPCWMAPEVVSAMESREPDITVRADVWALGITTIELADGKPPFADMHPTRAMFQIIRNPPPTLMRPTNWSQQINDFISESLEKNAENRPMMVEMVEHPFLTELIENEDEMRSDIAEMLELSRDVKTLYKEPELFVDRGYVKRFDEKPEKMYPEDLAALENPVDENIIESLRHRILMGESYSFIGDILLSLNSNEIKQEFPQEFHAKYRFKSRSENQPHIFSVADIAYQDMLHHKEPQHIVLSGESYSGKSTNARLLIKHLCYLGDGNRGATGRVESSIKAILMLVNAGTPVNNDSTRCVLQYCLTFGKTGKMSGAVFNMYMLEKLRVATTDGTQHNFHIFYYFYDFINQQNQLKEYNLKADRNYRYLRVPPEVPPSKLKYRRDDPEGNVERYREFENILRDIDFNHKQLETVRKVLAAILNIGNIRFRQNGKYAEVENTDIVSRIAELLRVDEKKFMWSLTNFIMVKGGIAERRQYTTEEARDARDAVASTLYSRLVDFIINRINMNMSFPRAVFGDTNAIIIHDMFGFECFNRNGLEQLMINTLNEQMQYHYNQRIFISEMLEMEAEDIDTINLNFYDNKTALDNLLTKPDGLFYIIDDASRSCQDQDLIMDRVSEKHSQFVKKHTATEISVAHYTGRIIYDTRAFTDINRDFVPPEMIETFRSSLDESIMLMFTNQLTKAGNLTMPFEAVQHKDESERKSYALNTLSAGCISQVNNLRTLAANFRFTCLTLLKMLSQNANLGVHFVRCIRADLEYKPRSFHSDVVQQQMKALGVLDTVIARQKGFSSRLPFDEFLRRYQFLAFDFDEPVEMTKDNCRLLFLRLKMEGWALGKTKVFLRYYNDEFLARLYELQVKKVIKVQSMMRALLARKRVKGGKVFKLGKKGPEHHDVAASKIQKGKKTQVDRLREYDEEHIDISETPSEAEEMFLEARMDEALAAVRIAKIEQASAEE

SEQ ID NO: 28156 - DNA, 5611 bp, DROSOPHILA
tgaggtcacagtccggagaaaatcccctcataaatatgaatttcatttttagattgttttcagaacagctttatttaaaggcaagtgtctgtagccttattattatattactttccgtcttgagaaacacaattctctaaaccctcattcatattctactattttttattcccagtcccagctgtataaatagtcagctcaaaattacaaaatacccctttacagtttagtcaagatgcgtccacagattgcaatgttactattgataactgcttggaaaagtagcctatcagatccgataggtccccgttcctatgaaaactattcagtgtataaggttttcattaaaactcggtcggatcaacaggttatcgatggactgctgaaggacacagacaatgtgagtttcactggaatttagaggaaaaaaaagtcgaataatcccttaatattccagtataacttgtggcatcgtggcttaaatgtagttcacataatggtgagccctgtggaaaaggattctttcctagctgtaatgcaaaaggaaaatattgttgtggaagtacttataaaaaatgttcagacgtaagtatataagcattttaaaattataaaatgcgtaactgtatactctgttttcagacttattgatagatactgacgtgtcgttgtttttataaagtttaataattttcccatttaagcagtgatcttgaactatgcaatatcatgaacaaaacgtaaagctaaaatgtgaatgatacagcctaatggtatgcttcacatcttatatgatctggtattagatttgaaaaacttccaaaaatatattttgtatacctttgtgctctaacattatttaacaattattgtcgaatgtggtcataaagaatgttatttatttgaatgctcacaatatttgttttttatttaatattttcgaagggaggtctgttgatacttcttacaaatgtttacaccatcgtttcactctgggatctcagtcctttttgcagccctctccgcaatcggcgccttcgcagatgtcgcacagggaggacttcacctggtagtactcggtggccttgcgctccgtgtcatagtagtcgtatagggaaacggaggccggcttctgcttggccaccgcgtgagccttggaggcctctaacggcaagcaacgaacatcaccgggagttaagctgtcaaagtagacgaccaccgtggagtcggagttcttggtctctacgcgcttcacccgatccactgcctggattttgcccaagcttgtggagtcaccaacgaaccctgagggcagggcgatttccatcactgccatgttggagtccttgtccttgtcggcgtcttctaagggcacgtactcggcacagacgtccactattagtagctggttgggagtgtccttgaccgtgggtgttaccttgaaactgggcttcttctctttctccgctagattgtagcgataggagagctgaaccatggcagatcctgttcccttggctgtaaaatcgaccttgcgagtgctcttgggcaggtcatgggtctgcagaaccagggaattctctgggttaaccttaattgtattcttggattcacccgcagatgagaactcaatatccatggtgcctgagccagagcccgtcttgtatgcgaattttgtgagcgcctgaagaccaatcacagtatcctgagtggaggagaatcccccgttgctgttgcgctgcgatatcagccacttgataatgggcagggccttctcagccggatccttttcaagaagcgcaagcagaacataggaggtgatctcgacgtcgttactgcgaggtttccagtggaaaactcgtccatcctcaccagtcgattccgtggccttggaccaccacattcgatcgttttcctttcgggccacgctctccagcttagcaatgaccttctccgactgcgggtgcttggccagttggagggccacggcggcaatggccagggaatactggtcgtccgtcttgtcagcctcttcggccacatagcgtactgctttcttaatggcactttggtacttcgggatcagttcctaatgcaattaaggataaatctctggtcaaaatacataatcggtatgataataggcagctaactaggttacttacatgattctcgaagaaagccagcagaacgaacgaagttagagccaatgggttttggttcgcgttgtcgaagagtttgccgacctccgggaactcgccactctccttctgtttcgatacaaggaagtcaagaccagcagtaatgactttaggatcgatatccgtgtatgttccagcttgatggaaggaacgcatgacataggcggtaagccaagtgctgcccgaagcgtccgattttccaaatgcactatatgagccatcgtcgtgcttgtaggtcagttccctctggtagccgatctccaggaactttctagctttggactcaacggacggaagctttcgaccagtaacctccagatatttcagcaccagaatgttgggcacaaagtttaccatgttttgctctccgcagccgtacggcatacgcaccagattgtcgagattctggagcgtcggacccagaagatcaccaaccacagaaaactctataaattcagactggggcacgacctcgttgggaatatcagcatccagagactgagacatctctggctgatccttgaggttgataaagacagcccggttctcgaacaaagttacgccctctggctcaacctttaacttctggtgaatagcatcgccggccaaggcagaggtggctgtgattttcagggtcgtgaatcctacgttcttcggtcggatcataaatgaaacactcttgccactattggccggtatcgtgacccgtttgacccggcgcacctcatcgattgccttttccaacacctcattggtggcctcggtgaattcatattcctgatcagagttgtccattactacatctgcatcaagggtcttatccaggtagttgaagatgaccacgggaatagcaattacctcaccttagatatttttcaaatgttagtttgttaaataacgatattgcaattgcaatcacctcgctttacggaatacggcagatttgtggacacaaagaagggctggaatactcgaatcttgctcggattcttagttaaagcaattccggatgttgggttaagggagaaaccagtaaccacccatgaggtgatcgtatccggtatctttttggtcagggtgaattcctcttcacccacactgtataaagatgagaataattcgattagtttttaaaacttcatacaggatagaatcagtatatacacattgtacgagaaaacacaaagtgttaggttggcgtgtagagttagtaaacaattaaacatgcatgggaaaagttaaaaagcagtacggaaacaaattacttttttggtaagttttgaaattcgtatatcaaagacttcaaaaatgtggatattcttattgactctttccgcttcttaagatgattgcctcgctacgtgagtcggttttttggaatctttcgtattttcgcagaaccccccctttcatatgagtatatccgattttgaaaaatggcatgcagacatgcaaacaggacacaagaggaaaaaagttgattacttttcaaaaaaccacgtttctggaaactctttgcggattgtcgttcgttggggtgtttgttttaaaaggatttcttttagatttctatcatttaaactctgagaaagaaaagatatcctatctccagaatcacctcgtatgccaacacgatatcttgggcgggtaatccatgggtgtctcgacccttcaaatacataagacatcacgagaggacctatggtatccattagtttagaatgtttggttattgtttattgcgactaaaatgataatcagttttctatttaaatttttatgatcatataattttcatcttataaattcaatatatgtttgttaaattgtaataagccgggattttgttagtcataaacacaaatgtaacttgaattatgaaatttcaagtatcatacttttcgaagatgttaaatatccagttttccggaaactcttttcgaacctgtggttcaggaataacgtttggtggtaaggatccagcaactgttacgcggttaaatagtgggcgtgggaagccaatccctggtctaatgaatattcgtctttctagtaggtacataactttgtcagtctctgtatatatggattaatgggtaaggttagtaagtcaaactcttgatggaagcggaatttttccaagaaataaaccctataatataatttcaaacctgatctacgaaatccaaagcgtgtagttattagagtgttaatagttaagcgtaaagacgacaccccaagacattatacacagtgggatgacctatggataaggctagaaatctgtcatacttttcggcattataaaatatccagttttccggaaattcttttcgaatctgtggagcttgattaggatgtgaagctatcgatgaagtgccaggcattcccgctatggctgcctgcggtgccgcaagggaaaatgcaattgggaattctccattaagtatgagtgggtatattgaataggaatctgtattggggatatatgatgattattaacgggtctatgtacaatagtttacgatttggtctagacacacaaagtttttaagattaaagtttttaagaaaatattacatatcattggtgcttcaaatttttaagatattatgttcattaatgttcctgtgattttatgctacaaatatacttaaattttaatcccaaactgaccacccttaagaattgtcatacggatttagatcaatagcgagcatgcactctcgtattagtacaatcttgagttgatagatgatatagactctaaggatagttcactttacccaaaagtaaaaataaggaagcagagagagctgtacgataggttgcaaaacaaatagaaatagaagaaaatctaaaacccacctcccattgtcggatgttgtccacatccagacttctgcaaagttcgttcgaactaattcgatttttgtagatgaagttatagaaattgcgtccacttcgtcgtacgaaatcgaatcttctacttgatagtcaagactttcagggattgctttggctataaaattgatttcacagataaatacgaaagctgaatgtgacacatttgaaacctgacgatgatcacgaaagtgcccgggaagtaagcaaaatctattattagaacaatattattccgttgttgtattagtacactttgcattgatagcctagatagcctttgcatagacataaaaataagaaagcatagaagctgtgcgttagggtgcaaaacaagtggggtcaatttccagtgacccaccttcggccgatcgattgccaaatccagacatcggcaaagttcttacgtatctctaccggctgaacggtatttccggtgtcaggggggaaattagctatagcaggcattggaggcaatgcatcaagattgttttcgaatgcgtaga

SEQ ID NO: 28157 - DNA, 2285 bp, DROSOPHILA
caccgcaggcagccatagcgggaatgcctggcacttcatcgatagcttcacatcctaatcaagctccacagattcgaaaagaatttccggaaaactggatattttataatgccgaaaatgtgggtgaagaggaattcaccctgaccaaaaagataccggatacgatcacctcatgggtggttactggtttctcccttaacccaacatccggaattgctttaactaagaatccgagcaagattcgagtattccagcccttctttgtgtccacaaatctgccgtattccgtaaagcgaggtgaggtaattgctattcccgtggtcatcttcaactacctggataagacccttgatgcagatgtagtaatggacaactctgatcaggaatatgaattcaccgaggccaccaatgaggtgttggaaaaggcaatcgatgaggtgcgccgggtcaaacgggtcacgataccggccaatagtggcaagagtgtttcatttatgatccgaccgaagaacgtaggattcacgaccctgaaaatcacagccacctctgccttggccggcgatgctattcaccagaagttaaaggttgagccagagggcgtaactttgttcgagaaccgggctgtctttatcaacctcaaggatcagccagagatgtctcagtctctggatgctgatattcccaacgaggtcgtgccccagtctgaatttatagagttttctgtggttggtgatcttctgggtccgacgctccagaatctcgacaatctggtgcgtatgccgtacggctgcggagagcaaaacatggtaaactttgtgcccaacattctggtgctgaaatatctggaggttactggtcgaaagcttccgtccgttgagtccaaagctagaaagttcctggagatcggctaccagagggaactgacctacaagcacgacgatggctcatatagtgcatttggaaaatcggacgcttcgggcagcacttggcttaccgcctatgtcatgcgttccttccatcaagctggaacatacacggatatcgatcctaaagtcattactgctggtcttgacttccttgtatcgaaacagaaggagagtggcgagttcccggaggtcggcaaactcttcgacaacgcgaaccaaaacccattggctctaacttcgttcgttctgctggctttcttcgagaatcatgaactgatcccgaagtaccaaagtgccattaagaaagcagtacgctatgtggccgaagaggctgacaagacggacgaccagtattccctggccattgccgccgtggccctccaactggccaagcacccgcagtcggagaaggtcattgctaagctggagagcgtggcccgaaaggaaaacgatcgaatgtggtggtccaaggccacggaatcgactggtgaggatggacgagttttccactggaaacctcgcagtaacgacgtcgagatcacctcctatgttctgcttgcgcttcttgaaaaggatccggctgagaaggccctgcccattatcaagtggctgatatcgcagcgcaacagcaacgggggattctcctccactcaggatactgtgattggtcttcaggcgctcacaaaattcgcatacaagacgggctctggctcaggcaccatggatattgagttctcatctgcgggtgaatccaagaatacaattaaggttaacccagagaattccctggttctgcagacccatgacctgcccaagagcactcgcaaggtcgattttacagccaagggaacaggatctgccatggttcagctctcctatcgctacaatctagcggagaaagagaagaagcccagtttcaaggtaacacccacggtcaaggacactcccaaccagctactaatagtggacgtctgtgccgagtacgtgcccttagaagacgccgacaaggacaaggactccaacatggcagtgatggaaatcgccctgccctcagggttcgttggtgactccacaagcttgggcaaaatccaggcagtggatcgggtgaagcgcgtagagaccaagaactccgactccacggtggtcgtctactttgacagcttaactcccggtgatgttcgttgcttgccgttagaggcctccaaggctcacgcggtggccaagcagaagccggcctccgtttccctatacgactactatgacacggagcgcaaggccaccgagtactaccaggtgaagtcctccctgtgcgacatctgcgaaggcgccgattgcggagagggctgcaaaaaggactga

SEQ ID NO: 28158 - protein, 753 aa, DROSOPHILA
MPGTSSIASHPNQAPQIRKEFPENWIFYNAENVGEEEFTLTKKIPDTITSWVVTGFSLNPTSGIALTKNPSKIRVFQPFFVSTNLPYSVKRGEVIAIPVVIFNYLDKTLDADVVMDNSDQEYEFTEATNEVLEKAIDEVRRVKRVTIPANSGKSVSFMIRPKNVGFTTLKITATSALAGDAIHQKLKVEPEGVTLFENRAVFINLKDQPEMSQSLDADIPNEVVPQSEFIEFSVVGDLLGPTLQNLDNLVRMPYGCGEQNMVNFVPNILVLKYLEVTGRKLPSVESKARKFLEIGYQRELTYKHDDGSYSAFGKSDASGSTWLTAYVMRSFHQAGTYTDIDPKVITAGLDFLVSKQKESGEFPEVGKLFDNANQNPLALTSFVLLAFFENHELIPKYQSAIKKAVRYVAEEADKTDDQYSLAIAAVALQLAKHPQSEKVIAKLESVARKENDRMWWSKATESTGEDGRVFHWKPRSNDVEITSYVLLALLEKDPAEKALPIIKWLISQRNSNGGFSSTQDTVIGLQALTKFAYKTGSGSGTMDIEFSSAGESKNTIKVNPENSLVLQTHDLPKSTRKVDFTAKGTGSAMVQLSYRYNLAEKEKKPSFKVTPTVKDTPNQLLIVDVCAEYVPLEDADKDKDSNMAVMEIALPSGFVGDSTSLGKIQAVDRVKRVETKNSDSTVVVYFDSLTPGDVRCLPLEASKAHAVAKQKPASVSLYDYYDTERKATEYYQVKSSLCDICEGADCGEGCKKD

SEQ ID NO: 28159 - DNA, 2176 bp, DROSOPHILA
gaactcatcgaacaaggcagtaataacggacatcatttgaatgatctttgaaagatacaattaaattagataaaaattcttaaatgggtgcatatgtaaacttaccaaggcacatagttctgataaaaatatcatgccaaagaacagaaatgcccagagatttggagtcgtcgtaaaacgtccaaacaagtatgagaagcagagatacagaaactgcatatgatgcttctcatccacatgtaatggcatcataccaacgtgatctgtttgaatatagcaatttaaaaattggaattgttttcaaaaacaaaattcaagaggccctaccctcaaagtgatcgtgggccacattgcagcagagcagtcccattaacccaatggtaatatgagtaaggcacacccagatactcagtctttcggcatctctgcgaaagttgttgtagctagacaaggttatgatactgccccaaccgggccccaaggctccgccggccatcaggagggccgtgcgagccgttgccaaaatgctgtcaaagctatccaactggggcatccaataataatgcagggtatcaaacgtgacttgctcgtgaataagtaagtacaagaaaacagcgacgaagaagccgaacatcagcacgcatgaacatcgcagaactttcccaatctaaaaaattagggctgttaaattatgtatattttttagtttgtttgaaatacatacaaaagcaactggcttgagcagcagggccagaaccaccagccaaattgataaaacgcctatgagcatggaccacgatatgctcatggaagtggaaccttttgcagtagaggcaatcatcgatctaaggatatagacaaagtaagctttagctcaatctaatgtgaattcgagtgtaacttgcctgaaaaactctaccgtggaatgaggatcaactctatagtcctataaacacaaactatctaagtaagtaaatatataaccatctaaactactcacatcgacgtcgtagttctcgtgcaaggaacactcctgggtattccaactattgttgcaactcatccagggtatcactgggtgtattgaattcacggtatatatgaggggcactacagctgctatactgtaataggtgagcgttcccagattgaggagcagaatggcgtagccaatgcctaaaagtatgccacattagttgaagcattttacagttagcaactattttaacagattttcacctttaaatattggcgccacgcgaaatgctgatatggttccagaacttgaaaactgtcccaaaaaggcttggatcaaaaatattggcagcgagtaaaatagcattcccatcaggtaggcgattataaacaaaactataaaaaaagaatttaaaagtcaaacatataagagacacatcgcattactgatatattatgagtaattcgaattattattgaaccctgatactcatcataattatctattgcttgcacatcgtgtcgaacactgtgtcattagttatgagtttatcttaaatatgatattagtaacttggtgataactaacaattaaatcattagaaaaacctgttttgaagataattaaggagagttagtaagagatattctggaacagtggctttgattttatgcgggctttgccccgctgttcaccttatcgctcgcaaaatataataatttttcaaagtgttcgcaaaaagccatcattaacgcagcttagataacctttgctttagttaattgaattttattgataacaaacagcaatgggatcaaataaaggggataaccgtcagcaaatgaactgcaaaaaaattatatggaattcttatgcgagagtttaaattttacgctctttgaccttgaataggaatgtcgcattacttttattttattgttcaatatttgtcatatgtatgaatatatatatattaaaaaaaaaactttttttaagtgtacacattttgtaagtgcactttgctattgttaagggtacttacgccaaccgccatgaagtattccaaaggtggagagctccgaaaagatcagcgaactgaaggcatgtgtgcagctggcaaagtaaaagtccgccgatttggcccaacgaccacgacatttatcatgccgatatggtcgctccagggtatcatacgcacta

SEQ ID NO: 28160 - DNA, 176 bp, DROSOPHILA
gcattggctacgccattctgctcctcaatctgggaacgctcacctattacagtatagcagctgtagtgcccctcatatataccgtgaattcaatacacccagtgataccctggatgagttgcaacaatagttggaatacccaggagtgttccttgcacgagaactacgacgtcgat

SEQ ID NO: 28161 - protein, 18 aa, DROSOPHILA
ALATPFCSSIWERSPITV

SEQ ID NO: 28162 - DNA, 2285 bp, DROSOPHILA
tataaccaccactgatctctccatgcgatcccaagccaataaccatgcaaggagccacgccgtcgcaataacgatgaaaggctccagaatcgtagccatgagtggacgctcggaaaactaatctccaggattgcttgcccactccaacccaattattgagaacagtctgtagtgccagattgtcattcttcaggatttgggatccgggaaacatgttgaccgctacagctaggcggggctgaagtctcttatcgttatccatcatcttattggcatgcaaagcggcatagcgatatcgttctagggatagttccataggtacagctcctgtaggttccacttcctccgcgaaaacttggctatcgatgagaagcagacgcacgtgacccattacaccgcttaagtgttggcagacacgagcacgctcctcctcagtccaatgtgcagtgggttgggtgactcctgcctggtatttggcccaggataaaacgcagcgccacacttcctcctcttccaagcagaactattggtagttaacagttttggtaattaaagaaattcagtaaattgagtggttattcattataaactcttacatagtctgaggaaataatcttaataatggcatcctttgttaaagtaaggaaggcattagtcttaacgcactcatttgcattttcccctatgtagatgatgcagcgttccataaacgaggcagcgcatttggcacctgaaatttaaagggaaagtttaaaattaattccttgttttttaaagacactcaacggcttttaccttgagacagcatcctattctatatgtcctgaaatcggatcgtatttgctaccttacccattagaaacacttgattacagaaagtctaccatttatttcaacattcgtcttcagatatcggctttacatttattttacttatattaagggcgttcagcgtttgcaggtggaattcgaaggattcgcaggatggccgctgagtcgcctagtccttcgtgggactgacgttctgtatgagcgtgatgttgtcgcccttgagcatgatcctcccgaggttgcggcgctgccgggtcttcacatagacttcctcggcgtcgtccagcaccagattcatgtactcatcgaatcccacaatgtggccctcgatgcgcagcgatatgttctcgtataaccaaacttgcacgcgggaccggttctgcaggtaacggaagatcaggttgatgggctgcaccatcaccttctgcaccttgggatttcctttgaacgacatttttgctgatttccgacgacttaatttgagttaaacaaattttcgcttctttttgccggcgtcttcttttcgtccaggcgataggcagaaatatcgatggcacagcacagatggtcacacataatcgcggcctaccgaactatcgaccagcctaaagataccaaaatggtaaatcctctggtagcataaccatatcgatagaaacactatcacaatcgcactgttaagtttttgtggttgggcagaagttgttgccatttattcatagctgaattaaactatagtttataaagaaaaccaaacaaatggctatggctaatgtggacaaaggtgaacttatggaccaggttaagcaacagattgctgttgcgaatgcccaggaattgctcacgcaaatgaccgaaaagtgcttcaaaaaatgtgtcaataagccgggaacttccctcgattcgtccgaacaggcaagctatacatatcttattttgcactatagaatatgtatttaaatagtatttcattaatatccaatttagaaatgcatttccatgtgcatggaccggtttatggactcgtggaacctcatttctcgggtgtacggccaaagaatacaacgtgaacaatccaagttctaaacacacgaatcggcttctgcattttggagcagcttgggactaactatatctgccagctattgattagttgttatatctaaagtttgataatgcaataaaaacatgcattgcgtgttacgtgattctgataacacaacgtgcatatgttttttcttatcgatatgtgatgtggtacaaaaaataccaaaactttcagaatggttagtctcaatacatttgacatagcatattatgtagaatgtataaagtgttttggcgcgaatatgcaacttcacataattgcttacttttaaaggtgtgattttctaaaagagctactcaatattactaacctgctttttcgtgtatatccataacggcggttaaaa

SEQ ID NO: 28163 - DNA, 285 bp, DROSOPHILA
atgtcgttcaaaggaaatcccaaggtgcagaaggtgatggtgcagcccatcaacctgatcttccgttacctgcagaaccggtcccgcgtgcaagtttggttatacgagaacatatcgctgcgcatcgagggccacattgtgggattcgatgagtacatgaatctggtgctggacgacgccgaggaagtctatgtgaagacccggcagcgccgcaacctcgggaggatcatgctcaagggcgacaacatcacgctcatacagaacgtcagtcccacgaaggactag

SEQ ID NO: 28164 - protein, 94 aa, DROSOPHILA
MSFKGNPKVQKVMVQPINLIFRYLQNRSRVQVWLYENISLRIEGHIVGFDEYMNLVLDDAEEVYVKTRQRRNLGRIMLKGDNITLIQNVSPTKD

SEQ ID NO: 28165 - DNA, 10159 bp, DROSOPHILA
caatgagaattcgcaaagatgacaactcaaattttcccagtttcagcttcagccacagacattgtcatttcgggcctgcaaaagcacaaggcggctgccgcaggacggcgtgcgggcttaagctgagggatgcggcggctttagcgtctagctgcagagtggctaaatttaaaacggtttcatgttgtgattttgacaaatgataattttccgcatgtgcttgtgccagtctttgtgtttgatatgtcagccgagactcgactgaaatcgagatactcctatctctgtggcccggcgcccatgcctccatggcggtcgatgagttgctcattgtgcagggtagataactgtccggaattccggaaattccggaatcattgccgacaagaaaacgtatctcaaagggtcgttaggttggcacacacgcctctgcaaggcggaatagtttcttttgttacaaggactttttacttactagtcgtaattaccagcaaggagttgggtgctggcaacgctaaattacattatttgtctgggtctggcttttcgatagatatttgggaataaaacgagtaaaaaataaacaaaattttaaaatggtagtttggggcggtttgtgggcgtttaaatgggggtggtaacaagaaatttcagagcttataaaactatgaaaaaatttctaaacatttggaaaaagtttgggagtggtagccttgcctggtttgtggaagttacagtgggcgtggcaacatttgcaagcaaacatgcgcaaacttctattgataaccttataaatcgacttcaagctgatattggcttaacagttctgagttcgattttttggtaaccatggcgttgcttcgtttattattatcgctaaggttaggggaatttttttgtttaaacctcaacgttgcccgatgtgcagcactttggaaaataagtcaaaccaaagcgaagatgagcttgacgataaattaacccaagaagagtataaactcttgtggcccgatttcgtgtcgcgaatttccaatcctaccgttaacagcgttcaacttcattggtctttattaaaaaatgcctcggtatactgtattgataagttccataaaagacttggctggttacagttggattggacttccagttctcccataacagttacaaatctggaagaaaacttcggataccgactacgcataaaagcgctgacagtttctaaggatggacattgttatgtgcctttggctatctcacctgaaatagttgtaaacattattaatattattaaatcgatttatcaaaaacgttctgcttccaaacatgaaactatgcacaatcaaacgtacatatatacatattttctacaaatttctggttctgctggttcgaaatattcatttaatttatattttgacagtagcttaaatggctttttctttcgtttttactccttgaaaagtatgttcaaggcagtaagaagcgtatcgaccgaccatatcaagtgtataagttaacacaatcacaaaacacccgaaatatagtcgtaagcctcaagtgcttttcccatctatagatcgagctttacctataagaaactgtaacttgttaagctttagagataagaactcttgctatacttaagtcagtcgattttggaagattagaagcgtcggtcatcgccacgtacttactattcgtctcattaagtgcagaccgcgcaagccctattgtaattaataaacttacgctaataaatatatggaaaatctactaaaatgataattggcgcccaaacggatataaaaacctacgataactgaataattataaataaataacaaaaggaggatccggagacaaaatcagcggctttggctaattaactctaacctaagaaataaaaatttcgtgattacataaaatataatattaattactaagaccatctaccttaaaattgtttgttaatcactattattatattgtaagtataacgcttattgaacgaattaaaaatattattattattattatattataacctatgcaaagagtattgataataaaaatacatgagtgacagtgataaccttttagacaacctagtgtcaagcttaaataaatggtcagcgcaccaggcaagtaggcaaaacagtgcagaaaaaaataataagtcatcagataattggtggtcaaaaacaaagacaactagcgaaatggaatttgaagctcagttaaaagcgatcgtagagagtgctgttgccggtgcgctcgcagtccaaaaacaatcatttgaaaagcaattgcaggagatgaatgagcgaatcgggaaattaacagtgaacaccccagaggtggaaacttatgtagatgctgaaattagaccaggtgttgtctgtagcgagcctctagatataattaaatctctgccagattttgatggcaaaagtgaaacatatgtgtcgtggagaaaagcggctcatgtcgcttttaaagttttcaaagattacgagggaagttcaacattttaccaagctcttggtattatgcgaaataaaataaaaggtccagcgaatacagtattggcttcttttaatactccgttacatttcaaagcaatgatcagcccgtcttgatttcacatattctgacaaaaggccgatctatctaatcgaacaagagctatcaactttgcgacagggagacatgactcttactgaattctacgatgaagtcgagaaaaaactgaccctacttaccaacaagacaataatgacatttgatagtgccttggcgatgtcactgaatgaaaagtacaggacggacgcgttacgtgtatttgtaaccggagctaagaaatcgttgagcgacattctttttgcaaaaggtccaaaagatttaccaactgctctcgctttagcgcaagaggtcgagtcgaaccatgagcgttaccaattcgcccttatttattctaaaaatattggagacaggggtcagaaaatcgaacaaaggcacagcgataaggatagaaactcaatcatgcccatgcaaactaaaaacccatattttagcaagcgtcaggtgcatacttatgataaccaggaaagacaagatccagtccagttaacaaatcctgatgtatccatgcgatctagaagaactggaaattttggacaaactccatttccgactcagggaaatatttggccatcccaacagcaaaattcttggccatctcaacaacaatattcttggccatcccaacaacaaaattcatttcgaacacaaaatcaattcgcatcgcaaccccaacagcaaaacacaagtcaggctcagggacattttgggtatgcgcaagcatcaaaaagaccaacgagtggcagtgcaaggtttacagggccaaaacagcagaggatcaactacttacctcatgagaaaggtcaatgtgaggaagatacagacggttatcaaaaggaggcagaagcggaggttgatgattatgaggacgaactagtgaattacgatcatgttcattttttagccacaaatccctgctaccgtacatagaaagagagatagcagggagaaccataaaacttttgattgacaccggggcttcgaaaaattacatacagcccctccctgaattaaaaaacataatgccggtacaaaataaattcacggtaaaatcgcttcatggttgcaacaccgtcaaacagaaatgctttattaagctatttaacacatctgttcaattctttattcttccaagtctctctagttttgacgcaataataggacttgaccttttgaaacagggaaatgcaacgttagattttaagaacaaaacgttgaatatcaacaatgaagtggaatctattcagtttttgagatgtgacagcgtaaatttcaccaacatagagaatatttgtggttccaaatcagatatctaataaattccatacaatgcttcgaaaccgattggccgtctttgcggaaccggaagaagcactgccgtataataccaacattggtggcacaatactgtactgaggacgaccaacccatttactcaaaactctatccgtaccccatgggctgtatcggattttgtgaataaggagacacatgctttgttaaaggacggaattatcaggccctcgtcgtcaccttacaacaatccggtttgggtagtcgataaaaaaggtacagatgaagagggaaatactaagaaaaggttggttatagattttagaaaactaaatttaaaaacaatcgacgacaagtaccctataccaaacgtagtatccatcttgtcaaatttgggaaaagccagattctttacaaccccttgaccttaaatcggggtttcaccaaattctgctcgcagaaaaggatagagagaaaactgccttttcagtaggaaatggaaaataccgagttttgccgtttgccagtttggcttgaaaaatgccccaagtatttttcaacagtgctattgatgatgttcttagggaccgtataggaaagtcatgttacgtttacgttgatgacgtaataatattttcaaacggaattgaggaccacgtaaacgacgttgcttgggtactagacagactgtctggggcaaacatgagggtttctaaagagaaatcgtttttcttcaaggaaagcgtcgagtatctcggattcatggtgtcaagtggaggtatcacaaccagtcctagcaaagtagaggctattcagaaatataatcaacctactaatctgtttagtgttcgatcgtttttagggctagcaagttattaccgctgctttattaaggacttcgcctctattgctagaccactcactgacattctgaagggtgaaaacggaaaggtttccgcaagccagtctaaaaagataccaatttctttcgatgaaagacaatgttctgcttttgagaagcttaaaaatgttcttgtctccgaaaatgtaatgttattgtatcccgattatagaaaagcctttgacttaacaacagacgcttcggcttttggcctgggggcagtcttatcacaggatggcaagcctgttacaatgatttcgagaactttacaggatagagaacttaatttcgcaacaaatgaacgagaacttttggccatcgtttgggctttaaagtctcttaggaactatctatatggtgtcaaaaacttaaacatttttacagatcaccagccgttaacatacgccgtgtcagataggaatccaaatgcaaaaatcaagagatggaaggcgtttatagacgaacataatgctaaaattttctataaacctggcaaggagaactatgttgccgatgcactatccaggcaggctattcatgtcctagaggaagaaccccagtcagacattgcaacaatacatagcgaaatttcattgacttttacaatcgaaactatcgacaagccggttaactgttttagaaaccaaattgtgatagatgagggcaccgcagactcaactcgaacttttgttattttcggaagcaagacaaggcatctaatacaatttctagacaaagagaccttaatcggaagaattcgtgatgtggttaagccggatgtagtgaatgcgatacactgcgaattacctgtactagctttcattcaaaacagtcttgtaaatgagtttccagcaacgacccttccgacacactatgaaaatggtcagcgacatttttaatcaaactgagcaacgggaaatagtgtctttggagcacaacagagcgcatagggcagcacaggagaatgtaaaacaaattcttcaatactactttttccctaaaatgtcacaaatagccgctacctttgtttctaactgcttggtttgtcaaaaagccaaatacgaccgccatccgcaaaagcaaatcctcgggagaacacctattccgtcacatgtaggcgagacattgcatattgatatattttctacggacaggaattactttttgacatgtattgacaaattttccaaattcgctattgtgcaaccaatcggctctcgaacgataactgatttagaacctgcaattatgcaactaatgaacttttttccccattcaaagacaatattttgtgacaatgaaccgtccataaattccgagtcaatcaagtcacttttgaaaaatcgttttaatgttgacatagcgaacgcacctccacttcatagtacctcaaacggacaggttgaaaggtttcacagcacgcttttagaaatagctcgatgcctgaaacttgacagtggaatgaatgatacagtcaaccttattcttcaggcaacaatagaatacaataagacggtgcactcagtcaccaatagaagaccgatcgacattattcattcaactcctcccgaattggctaacgagatagtagaaatggttaacgaagctcaggaaaaacagctaagaagagaaaatgtaacaagacgagacagaacctttgaggtgggagaaaccgtcatggtaaaacaaaacaatcgcttgggaaataaactaaccccacggtatagggaagaactaatcgaagcagacctcgggacaacggtcctcataaaagggagggtcgttcataaagataatctacgctaggtttagtatttcttttccttttgtgaccatcgccaagttagcaaaatacaaacgtgaaatctgaacactagtaaaagagtttgcaaacatttttcaattaaatatttgtcaaatccttcttatttaatctttaaacattttgtattatttccgcttcatcctctttagaaaattttaaaggtatgtgatgaaatgctagacccgaatgatttgaaaacttaaagtccacgcaaccacaaatatttcctgaaactactatagaaaataaatgcattaccaaaacggcataataacagtatagcgcactcactctaattagatttcaaattcccgattaaaaaaaaaaataaaacactaatgttatcaataccctttcctgattctgttcaactaaataggaaaatcaatacttgcaatcaataagcgttttactacatactttaatatcaaaaatatctgaatgaactttattataaaattataattgttatacttaattattgtcaaaactttagtattaaaactgtaactacctcttaagtagatgagaagagtagaagagggaattaagatctatcaacgtagtatctgctaaagacgtaaagatgcggcaactatttctgcgcctgggtactgaaacgacgaactgaataatatctgccatcagacgccaaccagagtgcgttcaacacatacgttttgatggtcaactagttcaaccaacatcagcatcatcgtcgtcaacaagtcgacggttacaataaagattttttccaagttcgctacgatcatctccagaaccttgttgcgaacccatgacatggagaatcagcagcatttacgaacttctcggatcatccagacacgcagagctgccttcccttcgatggtttaacgcagtaccaggttggcagtatgggaacttagtgcacaaccaatgttacccgtaagatccgctttcaaatagatttgccaattgtaaaaagtctgtggacagccttcgtcttagaaggggaggagttaacacaatcacaaaacacccgaaatatagtcgtaagcctcaagtgcttttcccatctatagatcgagctttacctataagaaactgtaacttgttaagctttagagataagaactcttgctatacttaagtcagtcgattttggaagattagaagcgtcggtcatcgccacgtacttactattcgtctcattaagtgcagaccgcgcaagccctattgtaattaataaacttacgctaataaatatatggaaaatctactaaaatgataatttatacatatattctggatcaggctcaatagccttgtcgcttctgtcatgtccgtccgtccgcatgaacgtcgagaactatatataacttgtatatataaaagaagctagaatgttgagattcaccatgcagattctaaagacatagacgcagagcaattttgttcacccatgttgcaacggccacaacggccgcccaaaactacctcgcccaaactcccagctcccaaaagctgacacgtccaaaattttaaaatatatgagatatttttgtattttgttaatttgtatcgctaagtcaacaaaatgttaaattaataaggctacattttattagctaggtgtatctgatagtccaaaaagtcgactgttacgttctggttgtttcatatcaatgggatcgtccgcaataacaattcccctttctaaaacattaggcttgcacggctgcagcactcccatctacacactgcttaagccgagccataagaaaagggcagcaattccttgttaaaagaatgctgcgtcgtcgcccgagcctaatggaatatccggcttccaacggattcctgccacttgccaatgccattattcagggcgagatgtgcatcattgacttgctgctctcggccggttgcagcgtccacattggagatccgggaagcggccggaccccgctgcacgttggtgaccgcactagtctaaattgccagttattaacgagttttaaacctcacagctggctttttactacggtcacctgccgtccgctcgcattctgctgaacaagaaggcccgcctggaggcgacggacagtaacggcatgactcccgcccactgcgccgttgatgccaatcaactggaaatagtcaagttcgctctcgaagcgggagcgaatgctgaggccagagacgtctgcggctggacccttcttatgcgcgcaggtaggactagaaggactgaaactgcttaaatcgaatttaaattcgcaccttgcttgcagtggttatgaacgctagcatggagctcatcaaagtccttgttacgcacggcgcagacttggcggctttggatggtgttggcaaaacttgcactgacttggcgaaactttatcacagacaggaggcaaaggattactttgacgaggtgcaaaagtttaggctggagaaatcagtcgcgaccgcagacgcagtgactgcaataacgaggtacaccaaagaagtttgaggaacagtggtggatttcaaagaagaaaaggactctggcacggttcatgattaaagcccacgtgactaagtcatccaataacgacattaatcttaaggtgtatttagtatttcgcttgaaaccccacaatggcctacagttttaccaacaaagcctgcagatcgctgtaaattaaatttttactaaaggtatcaaaagactaaggtcgctatgaatcgttgaaaatatccaaaatggccagagtttggatcaatgaaattcgtttagtgtaaattgaataataccatttactcgtagagtacaagtgtacactagattcattgcaatataaactccgagatctcggattcatctttgttttaagttttatatccatttttataatttgaatacaaagtctagtgtaagacagttatacccgtttctcgtagagtaaaagggtatactagattcgtttaaaagtattttatagatagaaggaaattttttccgaccataaaaagtatattaattcttgatcaggatcaatagccgagtcgatctggcctggtccgtctgtctgtccgtctgtgtgaacgtcgagatctctggtactataaggttgagattaagcatacagattcttaagacatagaggcagcgcaagtttgttgacccatattttgaaaaatgttttgatatgtttttataattttattagacttgtaaatttctatcgatttgccaaaaaaatttgccacgcccactctaacgccctaaaaccgcccaaaactgccacgcccacactattgcaaaatgtttacatttttttcataattttataagtcttgtaatattctatcggttagccaaacaatttttttcacgtccactctaacgaccttaagcttccaaaccggtcacgcccacacttttaagccatttttaatttgtttttcattttattccccatctatcgatatcccagaaaaattatgaaatttcgcgttcgcattcgcac

SEQ ID NO: 28166 - DNA, 760 bp, DROSOPHILA
cttgtggcccgatttcgtgtcgcgaatttccaatcctaccgttaacagcgttcaacttcattggtctttattaaaaaatgcctcggcttgcacggctgcagcactcccatctacacactgcttaagccgagccataagaaaagggcagcaattccttgttaaaagaatgctgcgtcgtcgcccgagcctaatggaatatccggcttccaacggattcctgccacttgccaatgccattattcagggcgagatgtgcatcattgacttgctgctctcggccggttgcagcgtccacattggagatccgggaagcggccggaccccgctgcacctggctttttactacggtcacctgccgtccgctcgcattctgctgaacaagaaggcccgcctggaggcgacggacagtaacggcatgactcccgcccactgcgccgttgatgccaatcaactggaaatagtcaagttcgctctcgaagcgggagcgaatgctgaggccagagacgtctgcggctggacccttcttatgcgcgcagtggttatgaacgctagcatggagctcatcaaagtccttgttacgcacggcgcagacttggcggctttggatggtgttggcaaaacttgcactgacttggcgaaactttatcacagacaggaggcaaaggattactttgacgaggtgcaaaagtttaggctggagaaatcagtcgcgaccgcagacgcagtgactgcaataacgaggtacaccaaagaagtttga

SEQ ID NO: 28167 - protein, 197 aa, DROSOPHILA; identical to SEQ ID NO: 20721

SEQ ID NO: 28168 - DNA, 15419 bp, DROSOPHILA
aaaagtaaaattatgcccctctctctcccgatccgagttcatcactttgtcttcttttagctgtttttattttgcaaataacttgagtagtggatgggaaacaacgcaaaggcctttcacttgcatgtctgttgctcggtttgttgtcattaggtttactgttgttgttgcacacactcatccgcttacatacctcgtttatatacttatttacatttgaagttgccgtcgttggtatgttttactacgtatcagcttgtccgctttgagctgccccttcgcttttcaagcattttgttttgtccgctctgtttttcagctattccaattctcttccttcgttgccctgtgtatgtattcgtaatcgggttcggattcttgtttatttttacaccacttctctttctctttcgcacgaaaattcctcgaattcttttttatccatattttccttttccagcgggaaaaacgagtttttccagcagcgccgcattcttagcctgtcgccttgtctctttcccacttttatagtgtctccgcttcttgcttgtttacagttaggaatgcggtcgtctcccctctctctctctctctctctctctctctcactctctctcttcaaaaagagcgtgcgctctctttggccttatgtagttgtgtggatttcgactgaaacttgttttcgctttgccccgtcgtgtttatttataaaaagtcactggcaaacaattacagtgcaacaattacgctctcaaaagtggcgcgcaacttgttcgccttgtaaaaaaaattgtgacgccagcggcgacacgactgcgctgctttggccccatttaactgagagcgccgagggttagcttggcgggggcggcaacgccaaagagagttctctcgggtggcgctcgtctcccatcggtttcgctgctcgagccaaatgcttggaagtcaaagtctcgcccgaccatagtttcttattggatttcaaaccagtcgcttcgtgcacgcggcgttcgactacgcacacacacacacccatagcgcgctggcattgatatacatacacaggcaaatacacgacgccccaagttcgtgtgatgtagtgctgtagtggtgcgattaaataatactccacaaaaggccaaataaattacataaaatctaaatcggaataaaaataagtgtattctccctccgtgttgtgttcaaagtatttaaccgattgttttcattagtcaaattaatgtagtacaacgtatgagtgtgagccagttcctagaaaaataagagggcataaaaaataacagacacatacagcgtctcgtttcttataaattttcctactgcgtcggaattattgtcttgattattgttgtttctggcgaacttttgtgatttgtttcgagaaacatactgcggcggtttcataattgtgcaaatcaagggaagcacaatacgaatgttaagaatcaaagctaagaattaaataaaattaaagccgcacacatacatatacacaggcacgcgcagagtcgaaaaaatacgcgcgctcgctctgtacagtgtgtgcgtgtacgcggtggctggctcttcttcttcattcgtgtgcccattggaatttgtaccccaaatcgaaattacaacatagacaaacaaagagcgcccgtctgccccagcacctaaacgtaagtgtgtgcgtgcgagagtcgtttcatttgcattcttgtttagcgcactcccgctctctcttcgtgcgtttttcattcataagcacatttttactatttggaactgcaattttttacactaagcttgaggacagacaagaatactgtgaaaatccaatgtagatgaaagcaggccgtgctttttccatcaaagtaatcgcaaaaagtcgagattaacacaagttcaaaattattcgttaaattttagaacagaattttgaaatgaacataattcaggtactgtgtcatccacatataaagaacttttattctaaaaacaaataatcgtccgatcggtgtggtctgtccaataaaaattcacggcaaaggcgttggctaaaaatacaaagacaaacgagtcgggtaaaaaacaaataaatgataaaaaagactaaacaaatttcgcgaattttgtattactgtgaattgtatgcttggtgatgcacactgctatctagcagcattataaacttttcgaccaaaagctgttgaaacgcaacgataaagatattatagcaatcgcataagtatacatacatacgcagttcaacaaaatatttttgtcatatacaatagttcttgaattagtcttagaggctcgtttgccatttaataaatgacaagctagaaaaaacgctaatgatagcttaaccttttttttttttttcttttttgtgtggcctcgacaaaagatttataattttaatgtgtcaaaacaaaaatattttgtgtaaatttatcgtgtacggttttggtgtttctttcgtaataaactttggtcacataccttgagatagacatcgctacccaccgttttctggctatttctaatcaaacgtcctctttgtgctgcattttttgctttcaattggctgcattctgtagacgaaaatcttatttataaatataaattgaacatggacgcaggggcagaggcagtgtcaagacgcgcagaagggggatcggttgggtggctgcaaaacgttcatcggcgttggcctggcaataaaatagattaatttaaatgtcatttttgtctagacgccgcagacgacgccgacaacgagacgtcgagctactctgctctatgtttatagatcggttacatatatccccgacatccccatcccaattcgcatcccccacgtgatatagcggatcttcagttttttttttctctctgcattttctttttccccaatacacgcccactctaggtacactttctcgattcttcgaaatttttccacagcatctttatggacgtggatcttcttcatatcgccatttcaacgctcgtttcgatgcaaatgagcttttcgggttttgggtgacgtggaaatctggttaaacccatgtaatggacaacaatacaattcggaattttgggtatttcctgttttgttatcgctgtcagtgccattcaccaattgcttgactagtttcagccgctgacgcagatcgtcgtcttaattagcgtcgcagacgacaaaaatctcaataaagtgggtaggcaactttttttcaaatgtttcttttttttattttaatacgttaaagcggcagagttcaaatatctgaaaattgtatgtttattttgtttggattgactagtgggtgtatcacagcgcgctgttgaggtcatgttttaacatagaaagaaaagagacggctttttctgattgccaatagtgtcgcgggagctgcgggtataaaaagtaaaccaaccgcattccaatccgagtgacgcacattggacccctcatgacgacaattactattgagggcttcttgttggccgtagataatacacctgttttagggacttggggacggggcttcttggggccttcccagacaaaacgatcaatttttaaatcgatcggattttttcgaaatgaagcttcttttttgtcttttgttcgtctgggttcccacgtcagggtccaaatccccaactccaaagcctagttccattcgtatcttaatctttcgctcgttgttgctctaaaattagccaccagctgaaactttcattgacgcatttgctcaccttgtttttatggttttttgatttttattcacattttgagtttgtgtgtctgagttttatggtttgtccgttgcataattaataatctgggctgaaactgatttctttcttatctgagttgggcttttgccgaataatgtgatgtacaccgtacgctatagttgcgctcacttgatttacttatgtggtcatcactttagcctgtgggctgctgctgattttgtagctaaaggcttccctcgagcttttaattccttaagaaatcacgccacaaaatttatttttcgctaatggtaaactggcgaataaagaaacacaaacgaaccaataaacgagaagcgaacgaaaacaaagccaaagtccagcagcataaacttctaatagaaatgtaaacaggtggcaatgaactttattatatttttatgctccaagtccttgaacccgccaaaatcaaagtcacacaaagtaaaacgcaaagcaaaaacaacacggcaatgaacttgacgtcaatggcggaccattgggccgcctgttgtcgttctgccttttgtggacctgttcttgagttccgctttggagcatcggcttcgaggctttgcggttgttcagcagaaaattagtttatagcatgtcaaatttctcgtttaatataagtctggaaaaatcatgaaaagttagtgagtttcagaggaagttacgaccatttggaattcaagcagtactgagcaaaatatccaaacatttaatcgaaacaagaaggtggaggcaaattatattttatattaaattaaatattgttttaatcgcaaatactttgcatatatttttccagatcaacggtacacagcaacagctccaattgccaggcagcggcgctagcggaatcgcagcggcagccgtaatcacggtagcatcggattgcggcgaaaactgcagcagtaacggcaccgagcatcagcagcacttcaacattgctaccaccacagcaacttcggcgacagaggcaacaatgccggctatggccaaggagaaagcatcagcaacagtgtccttgggcgagtcgaatttcagagatatcaacctaaaagacttggccgtggtcgtcgaagcggcatcgcggctgcaccaccagcaaaacgtatgcggctgcggagcggtatcgtctactgagaacaacaacaacagtcgctacggcagcagcaagtatctgacaaacggtaagcttaattctgagttactcaaatagagtatgtttcaagttgttcttaaaacactgaacattgtccgtttgcaacatgtttttgcttcgacgctaacacaatctctgcttttctctggcaggccacacgtcgcctttggcggcagcggttgctagcaacagttcgtcggtggccacgacaccgcattgcagaatgttgcacaactgcagtctgcagcagtaccagaatgacataaggcagcagacggagatattggacatgttgcggcagcagcatcagcagggctaccagtcgcagcaacagcaacaacagccgcagcagcagcaggaacaacagcagcagcaggagcaatcgcagcagcagcaacagctacagaatcctgcgcccaggaggtctccgaatgatttcattttcggtcgttacataggcgagggcagctatagcatagtttatctggccgtggatatacactctcgccgcgagtatgcaagtaagtcctttttagttttcagtgggtacgataactagttagtaggtcggcgcatcattcgaccgatgcccgcccacggtatttcaacggcacttgtatggcctctgcttggcgccagcgcgagaatgcggtcgcaatgtagacgcggcgcttttgttgccactccgcttagtttgtcacctgcatcgcttattttcaatattgggatgagccccaatacaaacgcgggccgctgcgtcttcggcgtctttccttgggagtgtttgcacgattatctcatattcaaactggtcaacatgggcatacgatttcttgcgctccttgctttcaaacagcattttctacctgctgggcacaaaatgaggaaaaattttggggacgctcacgtgacccttttgttattggtaatttcatcagtcagtctatcaaacttgctcgaaaacgacacgggctgttatcagagtgataagccaaatttcgttctgtagctccttgcttttgttttgcttgtttatcgattaaagccaaagctgacgttggcgactatctggcgtcgggctcgcgcgcaccatcagctgtttagtttttttaatgcaatttaaattaacggcaaataaaccagtctgaaaacgagctgaaaagcagcttttaggtgttcactagatttctagagccattgttttaaaaggctatgcattgccacacaccactagagtgcatttatactgacatatttttccaccttgtgtttatttgtgctaagccaatttgcttaaagattttcagttgtgcttttcagtgggcgtgtacgccgtgagtggcggaataattttgcctcgccagcagctaatcaataccgtcacaagaggagggaggcacgtgttgcataaatgcaaatgcaaacacaatgacgcacacaagcacgcacagaacaatgggagctgagaaggagcacaacggcacgttgtcagcagaacgcatttgcagtgaggggcgaagactttgggggcatttggtaaaactaaataattggaatttcttttgttgaaaaaaaaaattccgatgcgatgcccctgcctaaagctgttattactgctctggccgctttaattgcatgtaaagatgaaggcaataataacaaagtctagttatgtatgtatttaaaaataggaagcgcactcacacaagtcgtaaacagtttccccaaggcgtgtcgctccgttaaattaataaacatattattcatacttttgacattgaatccgatgcagctggtgcactaaatattggcaaactatggttgtgcaatcgggagcagagtcgacgcttgtttgaaggtcagtgttcgtttttcggcaggtttgtgtgtagttgccctcaacctaatgggtttcatagtcagcaacatttcctccaaccacgtacacatcgcagcacccactggtgcagacgcctcccacgcacgagaaatgaacacgcacgcaaattcacgatgaacgcagcagttttcgttttcatgcgccccatctctttcttgcctacccactttaccggcgtcattgttgttgttttccctgttcgatgacgacaacggcgtctatttgacgccatacgaatttcagtttaggcttttcacatttcctgcgcagctatgtatgtatttcaccatctttggcaacaacatatgccacattcttggggttccttcattttccgctcgcttacctgtatttcgaatttttagattcttgcgatggaagattttaacaatgcgtgctcgtgcagataatcctgatttgagcaagggataaggagaggcggagggagagtcaacagcagctgttggtttcctgagttgcttacacttaccatgcagtcgtgtacagttatgtaagctagttttagtcgggaaagctgagaacttccaaaatactggtctgctagtcggatatatgtactatataaacattttcaaagtactccactttctccacctctgtttttgaccattgaacttgtacgcgcaatccttgcctcgaacccgtttgcttccatatcgggcaacgttcggatttaccatcaagtttttcatctcctcgactccatattctttattgggggttgctgtctggtactttcttagcagtcacctatgttccagctccactgcgttatttttaattacacgtttatttttggacagcagctggttctgcgcagccgcagctgcctgaggccgggggtattcaactgaaatagtcacttgcttggctgcctagggggttctgttttggctccgtaacgagatattggatcggagaactgggacgttcaacccatgactcgactcctgtcggtaaaatcctttccagcttactatcaggcttattcataatattctgtcttacaccttgccttatctttcttttttatgtggttgcgacatctgtcgtcgtcggtagaaggtaaaggggtttgtgtggtaaggtgtctcctgcacgtgtcaaggacatttggtgggctattggtccgcccgacgctttagggccaaaattaaatagctttttttattgcactcgcacacactcgcttttcgttgtttctcgtcggtataccgaaaaatcctcccaaagggtcaatacacttttgttagcctggagcaagagaagcatcacacaataataataataaaaaatttgcaagagtacacataataagccaactcgaaaactccgcacccagattactgtgaaagctgctaaattaaaacgcggcgtgggagttttaccatgtcgatcggtgaggtgcacttagggaatgacgagagtattatgctaactgtaggtgagttctttaagaatggcgagtagtagcccagtcatagaacaccaaagcaagagacaaccgtatttgcaggctctaagctctctgtcccactatcgagtcctcgtagtctattttttttttatactttcatccacttctttttaaggactacagaagttgagcttccgcattttggcgggcgctttcccatcctcaaaggtaaaaatcgtgttccgtcttttgaaaagccggattttagacgttgtcttccagtagcaaaaacaacgtgcaaccacgagaaggttgctcaatctttattttgatttatttatagaatatgtattcgtgtcctgctcacgcgcggcactgctttatcgacgagttcacactagctttctggtcggtgtagtcaatctgtgtagctctatctcgctctgtcattctaaaactcgttggattgcattccttgcagcaacaagttgcagtcttggtattttcattgttcgccttgtttttgatttctgcattttatttgtgacttgattaaccagcctatgatacgatttttgtgctatatgtatattagagttgttgtggccaaaataaggcagttgaaaatttggcactgtgaccaaaaacccaaaacaaggaggatgatggtaaaatgttaaaaaacaagtacttctgatttagcgggataaaccgaggtggcaactctaagacctcaagagcaagcttcgggcaaatatttatgcttagacggcgaattgggacgttttttttttttactgctttgcagctgtttgttgggtttttacttatgtgtttactttcggtgatgtttgtgttgttgttgcacatgctacacggcagcggaaaagagaaacggagaacggcagcaagttcaaggctaagattatcaggaggtcaataaacctaaccaatcgggaaaaaacacagaatatcagagtagagccgcaagtgaattaataatgtgactttttttaaattaaggtgaagaaaaaggccaggcatgcgaaagcatccagaaaaaagaaggtgaaataggtaatgtgtttattgcataggatcggaatgataatcatcgtttttttgttacattttgctgcgcaacaaatttttgaaggtcaattctgtttttacgcacccatttgtgctgctctatcgcttgggaaatttaaaacgcgtaaaaaacattttcgttcggttctttttgatttctcgattattgattgttgttgctaccgctgtgctgtgttaatcttttaattgctgtattttgtttttcttctttgtgtttattttgttgctactcgaccgacgacttatcgcccccgatgttttttagacaggattccgattcaatttcgtattctattggatttttccctgttctgtttgccctcttttgccgcgaatagttgttttgatcttgatagagggacctccaaaaaataaatgcaaatttatcttgaactttatttttggcaatagacttataatagtatgaaaagttgacagatatggttggggctaatttattatttttagcattattttcaacagatttgtgattttccgttgcgattgtcagccaaaggctggctattcgtgattggaaaataaaataagggcgggcagaaacaaaagggaaactactgataagcggtcaaaactctctcacaatcattataaccgttaaccccgcacgggagggtgtgggatgcaagtttgaaacaccgtttcatacggcccaactgtgtagttcctcttgcgcctttggatctctcactctccgtctctcccactaactctccctctttactctctctccttccctctctctcttttcgcgaattccagttcaataaccagttttaaatttatttagctctgaacgagatggagttcataagttctgtgcttgctgtggttttctgggggaccggaaagcggaaaaggggcggaagtcaaaaacaagtttctctaagggcgctcgctttcatttgtctcgctgttaattaaacaatttgatctgagttctgacatcaaaattccactctcgtctctttattgtttcaccgtctttctttcataatagaagtctgtccgcactaaaacctttctatttcaacaggtcataaaagggtcgcaagaaatttctgattggaccacaaaaatttagggggaagtccatcagactgaaaatttggtcgcattttgccaaaaaaaaaaaaaaaaatgtgtgctgctagctggtttgtgtgctgttttattattctcacgcgttcactttgtgtgcttatacctacatatatagcatttttaaattcaattatttaatcacttgcattggtatacgtatatctatgcctttgcagttgccaagagctgtttccgcaagcaaaatgtggtttgcccgcaactctgacttaccgatagttgcctgcactaagtaaaaatattgtggatactaggttctagaaacatgaattcttcaattaaatatgtatgtaatttcatctacacttgtagataccatattaactccaatctgaccctatcgttttcgatcttctccttgcagttaaagtatgcgagaagcggctgatcctgcgcgaacggaagcaggactacatcaagcgtgaacgcgaggtgatgcaccagatgaccaacgttcccggcttcgtaaacctgtcgtgcaccttccaggaccagcgttctctttactttgtgatgacgtacgcgcgaaagggcgacatgttgccatacatcaaccgcgtgggtagctttgacgtggcctgcacgcgccactacgctgccgagcttctgctggcctgcgagcacatgcaccgccgtaatgtggtgcaccgcgacctcaagcccgagaacatcctgctcgacgaggacatgcacacgctaatcgccgacttcggttccgccaaggtgatgacagcccacgaaagggctctggccacggagcactgttcggagcagcggcgcagcaactccgatgaagacgatgaagacagcgaccgcctggaaaacgaagacgaagacttctacgatcgcgattcggaggagttggacgacggcgacgacgaacagcagcaggaagagatggactccccacgccatcgtcaaaggcgttacaaccgtcaccgaaaggcaagctttgtgggcactgcccagtacgtttcaccggaagtgctccaaaatggacctataaccccggcggcggacctgtgggcactgggatgtatagtttatcagatgatcgccggcctaccgccattccgtggcagcaacgattatgtcatttttaaagagattcttgactgcgccgtggacttcccgcaaggctttgataaggacgccgaggacctggtgcgcaagctgctccgtgtcgatccgcgagaccgcctgggtgctcaggacgagtttggatattacgaatccattcgggcgcacccattcttcgccggcattgactggcagacgctccgtcaacaaacccctccccccatctacccatacttaccgggcgtaagtcaggatgaggacttcaggtccagctatactgtgcccggggatttggagcctggccttgacgaacggcagatatcgcgactgcttagtgcagaattaggcgttggcagcagcgtggccatgcccgtcaagcgatcgaccgcaaagagtaagtgtccacgtggtgccccagaaaaatacgttggctaatgaatgtattgtttttcttcagactctttcgacctgaacgatgccgagaagctgcagcgtctcgagcaacaaaagactgacaagtggcacgtttttgccgacggcgaagtgatcctcaagaaggggtttgtcaacaagcgcaagggtctgtttgcccgcaagcgaatgctccttctgaccacgggaccgcgactcatctatatcgatcccgtgcagatgatcaaaaaaggagaaattccgtggagcccagatctccgagcggagtacaaaaacttcaaaattttttttgtccatacggtaagtgtttacctatggtgggataaggatgcacgaggcgcaactcggaaaaccgagaaagcataagtttgttgaaccgatgacatcacagcttatagttcgtagccagtcacacgcctactgaaaagcaatttgagcgttagtttatgtcccgggcacgtgttggctatgaaagcaaattaaatgcggcattgaaaactgcacacgcaaggcagataaaaactcaaacttgtttggtgaatgggtttaaaattagcgttgcgctcaactaattttactcttttggtttcattgcagccaaatcgaacctattacctggatgatcccgaaggctatgctatccactggtcggaagctattgagaacatgcgcaagttggcctacggagatccctcctccacatctgcagtgtcctgctccagcggcagcagtaatagcctggctgtcatctcaaattcatccgccgcctcctcaagcaattcgcccacggtgaaacgcagttcccccgtaaacgctcctcaagcttcgacggcgtctgacaaccggacattgggtagcaccagaacggggacgtcacctagcaagaagacggcgtctaagtaaacgtagtcctatttatagcaatgtgaaattaatttagttgaaatttagtgcaaacgaagcgatggcgtagaagagggcgggaatagaagtaagcttagaagtagaagtaagtgatgaaggggaaataatgatcgtgtctctagtgctaattagaaccaaatttctgttttccgatttgtattgtgcttagggcgaaaatataacactagaataaacttatctaaagtaaaatacatctataacgactaagtaaattcaatttaaaatttaaattaaatatttatatacagcatacataaatacaaatatattcgtatttagcgcgtagttagtcgcaattgaaatgaattacacacggaggcaaggtggcattgtaggcttaaattaaaagtaatttcgtgaagcaaactaaaatccgtatttaaatggtataatactaggaaattatctggaaactgtaatatacataatatgtgtatgtacgtcggagaaataatttttgtttctgttatcgtgggaagatcacatatatgttaatataaattttgtaaacagtgtaactatgtacagaactatgtgagctatatgcacacggcaaaaagaccctaagtcgtggggaaggagatgggaatgagccggaaaaccatcgatgtcacaaaatcggtgtttttccagcttcacgctcaactgtttaggtaattctaatatacagtttaacgctaattatcattatttatcattctcattatgcttttcgtttacctatttgccctataatgaaatgtataagacttgagctaccctaataaaagaacgaattttaaattatatttttattttgtaagggctaccactaaaaactcaacagtcgttcaaagattgtcaagattggcggtcgttgtctctccaactgactccaattgaatgtgtgtaaaacaagtcttatacaaagatatatgtaatagatgtaagacagactgcaaagtttcttgaaacaaattagttaaatgttgtaaatgtctaagttgctaccactgctactactagaacgcgcccatcccctcccatatttacctttaagctacagtaattaagtgatgagcagaggtgtagagtaaggagtcgaagttgaaagaaagcaaaaaatacattttgtacatacatatcgccgttggtcgatatacatctaaacataatttaattttttgttacttttaagtaaattatttttggcgacctaagtaaattaaaattaacgcaatatgcaacaacacacataagtatacaattaattaaattaaacgaaaattacgatttattaaacgatgtcatagaacggagagccactgatagtgagagaaatctgtaaaataaatatttaaacaaattatatattatctatatatgagtaccagaacaagaatgtcaaaaaagagaagcatgtaaaaataaaaaatatattacgagtaaaacaaaaaaagataatcgagcgaaaggaacgtatcattaacaggaaaaattaaagaaaaatacaaaaacatttcaaagtaacaaaattacgataaaatttgtttttattttggttcgtttggttattacaattggcaatatctaactgattgggtaataagtgcgcgtatcccagtatccaacgttgcaaaatgatacaacatttcaataggtttcaaaatctacgtaagatacacataaaacgacctgactactttgttctaccctacgcttgtgctgcagtacctaaaatcgaagaaagagtacagtgaacagggctaagatatagaaagacagctctatttctgcaatccaaaaagggcttgccctaattaaaataattgcaaatgcattgcgcttcaaatccagaagccttttttaccttttatagcctacaggaaaaaagaaaaaagaggagataacggaaagacccataaaatcgaaaagtgcataggtaaacctgtaggacgattagtggaatactaaaatcatcatatgttttaatcaataagtattccaattttaccaggggcaagtgtatgcgaattctttcagtacgagtatttaatatatttatttttatcataattgtataaaaacctgaagctccaaaataacttgatcattttgagaaaaatattaataaaaattatttttttgtttattttcttattatttagttacatataattttattttatgtttatgtttttataatttttattttattattcattatattataataaatagattcgttgaatagtattaatattggatttgaatgcagcgatgcgttttacgcatttcaaatccgaaactcgcttagatcacacgacgtaactttataagatatataaatcaaaaataactgttattttgaaagagaaaaaatgatgttgtttgaaataaaggaacaaaaaagcgaaaaacagaaa

SEQ ID NO: 28169 - DNA, 4099 bp, DROSOPHILA
cacgcggcgttcgactacgcacacacacacacccatagcgcgctggcattgatatacatacacaggcaaatacacgacgccccaagttcgtgtgatgtagtgctgtagtggtgcgattaaataatactccacaaaaggccaaataaattacataaaatctaaatcggaataaaaataagtgtattctccctccgtgttgtgttcaaaatcaacggtacacagcaacagctccaattgccaggcagcggcgctagcggaatcgcagcggcagccgtaatcacggtagcatcggattgcggcgaaaactgcagcagtaacggcaccgagcatcagcagcacttcaacattgctaccaccacagcaacttcggcgacagaggcaacaatgccggctatggccaaggagaaagcatcagcaacagtgtccttgggcgagtcgaatttcagagatatcaacctaaaagacttggccgtggtcgtcgaagcggcatcgcggctgcaccaccagcaaaacgtatgcggctgcggagcggtatcgtctactgagaacaacaacaacagtcgctacggcagcagcaagtatctgacaaacggccacacgtcgcctttggcggcagcggttgctagcaacagttcgtcggtggccacgacaccgcattgcagaatgttgcacaactgcagtctgcagcagtaccagaatgacataaggcagcagacggagatattggacatgttgcggcagcagcatcagcagggctaccagtcgcagcaacagcaacaacagccgcagcagcagcaggaacaacagcagcagcaggagcaatcgcagcagcagcaacagctacagaatcctgcgcccaggaggtctccgaatgatttcattttcggtcgttacataggcgagggcagctatagcatagtttatctggccgtggatatacactctcgccgcgagtatgcaattaaagtatgcgagaagcggctgatcctgcgcgaacggaagcaggactacatcaagcgtgaacgcgaggtgatgcaccagatgaccaacgttcccggcttcgtaaacctgtcgtgcaccttccaggaccagcgttctctttactttgtgatgacgtacgcgcgaaagggcgacatgttgccatacatcaaccgcgtgggtagctttgacgtggcctgcacgcgccactacgctgccgagcttctgctggcctgcgagcacatgcaccgccgtaatgtggtgcaccgcgacctcaagcccgagaacatcctgctcgacgaggacatgcacacgctaatcgccgacttcggttccgccaaggtgatgacagcccacgaaagggctctggccacggagcactgttcggagcagcggcgcagcaactccgatgaagacgatgaagacagcgaccgcctggaaaacgaagacgaagacttctacgatcgcgattcggaggagttggacgacggcgacgacgaacagcagcaggaagagatggactccccacgccatcgtcaaaggcgttacaaccgtcaccgaaaggcaagctttgtgggcactgcccagtacgtttcaccggaagtgctccaaaatggacctataaccccggcggcggacctgtgggcactgggatgtatagtttatcagatgatcgccggcctaccgccattccgtggcagcaacgattatgtcatttttaaagagattcttgactgcgccgtggacttcccgcaaggctttgataaggacgccgaggacctggtgcgcaagctgctccgtgtcgatccgcgagaccgcctgggtgctcaggacgagtttggatattacgaatccattcgggcgcacccattcttcgccggcattgactggcagacgctccgtcaacaaacccctccccccatctacccatacttaccgggcgtaagtcaggatgaggacttcaggtccagctatactgtgcccggggatttggagcctggccttgacgaacggcagatatcgcgactgcttagtgcagaattaggcgttggcagcagcgtggccatgcccgtcaagcgatcgaccgcaaagaactctttcgacctgaacgatgccgagaagctgcagcgtctcgagcaacaaaagactgacaagtggcacgtttttgccgacggcgaagtgatcctcaagaaggggtttgtcaacaagcgcaagggtctgtttgcccgcaagcgaatgctccttctgaccacgggaccgcgactcatctatatcgatcccgtgcagatgatcaaaaaaggagaaattccgtggagcccagatctccgagcggagtacaaaaacttcaaaattttttttgtccatacgccaaatcgaacctattacctggatgatcccgaaggctatgctatccactggtcggaagctattgagaacatgcgcaagttggcctacggagatccctcctccacatctgcagtgtcctgctccagcggcagcagtaatagcctggctgtcatctcaaattcatccgccgcctcctcaagcaattcgcccacggtgaaacgcagttcccccgtaaacgctcctcaagcttcgacggcgtctgacaaccggacattgggtagcaccagaacggggacgtcacctagcaagaagacggcgtctaagtaaacgtagtcctatttatagcaatgtgaaattaatttagttgaaatttagtgcaaacgaagcgatggcgtagaagagggcgggaatagaagtaagcttagaagtagaagtaagtgatgaaggggaaataatgatcgtgtctctagtgctaattagaaccaaatttctgttttccgatttgtattgtgcttagggcgaaaatataacactagaataaacttatctaaagtaaaatacatctataacgactaagtaaattcaatttaaaatttaaattaaatatttatatacagcatacataaatacaaatatattcgtatttagcgcgtagttagtcgcaattgaaatgaattacacacggaggcaaggtggcattgtaggcttaaattaaaagtaatttcgtgaagcaaactaaaatccgtatttaaatggtataatactaggaaattatctggaaactgtaatatacataatatgtgtatgtacgtcggagaaataatttttgtttctgttatcgtgggaagatcacatatatgttaatataaattttgtaaacagtgtaactatgtacagaactatgtgagctatatgcacacggcaaaaagaccctaagtcgtggggaaggagatgggaatgagccggaaaaccatcgatgtcacaaaatcggtgtttttccagcttcacgctcaactgtttaggtaattctaatatacagtttaacgctaattatcattatttatcattctcattatgcttttcgtttacctatttgccctataatgaaatgtataagacttgagctaccctaataaaagaacgaattttaaattatatttttattttgtaagggctaccactaaaaactcaacagtcgttcaaagattgtcaagattggcggtcgttgtctctccaactgactccaattgaatgtgtgtaaaacaagtcttatacaaagatatatgtaatagatgtaagacagactgcaaagtttcttgaaacaaattagttaaatgttgtaaatgtctaagttgctaccactgctactactagaacgcgcccatcccctcccatatttacctttaagctacagtaattaagtgatgagcagaggtgtagagtaaggagtcgaagttgaaagaaagcaaaaaatacattttgtacatacatatcgccgttggtcgatatacatctaaacataatttaattttttgttacttttaagtaaattatttttggcgacctaagtaaattaaaattaacgcaatatgcaacaacacacataagtatacaattaattaaattaaacgaaaattacgatttattaaacgatgtcatagaacggagagccactgatagtgagagaaatctgtaaaataaatatttaaacaaattatatattatctatatatgagtaccagaacaagaatgtcaaaaaagagaagcatgtaaa

SEQ ID NO: 28170 - protein, 755 aa, DROSOPHILA
MPAMAKEKASATVSLGESNFRDINLKDLAVVVEAASRLHHQQNVCGCGAVSSTENNNNSRYGSSKYLTNGHTSPLAAAVASNSSSVATTPHCRMLHNCSLQQYQNDIRQQTEILDMLRQQHQQGYQSQQQQQQPQQQQEQQQQQEQSQQQQQLQNPAPRRSPNDFIFGRYIGEGSYSIVYLAVDIHSRREYAIKVCEKRLILRERKQDYIKREREVMHQMTNVPGFVNLSCTFQDQRSLYFVMTYARKGDMLPYINRVGSFDVACTRHYAAELLLACEHMHRRNVVHRDLKPENILLDEDMHTLIADFGSAKVMTAHERALATEHCSEQRRSNSDEDDEDSDRLENEDEDFYDRDSEELDDGDDEQQQEEMDSPRHRQRRYNRHRKASFVGTAQYVSPEVLQNGPITPAADLWALGCIVYQMIAGLPPFRGSNDYVIFKEILDCAVDFPQGFDKDAEDLVRKLLRVDPRDRLGAQDEFGYYESIRAHPFFAGIDWQTLRQQTPPPIYPYLPGVSQDEDFRSSYTVPGDLEPGLDERQISRLLSAELGVGSSVAMPVKRSTAKNSFDLNDAEKLQRLEQQKTDKWHVFADGEVILKKGFVNKRKGLFARKRMLLLTTGPRLIYIDPVQMIKKGEIPWSPDLRAEYKNFKIFFVHTPNRTYYLDDPEGYAIHWSEAIENMRKLAYGDPSSTSAVSCSSGSSNSLAVISNSSAASSSNSPTVKRSSPVNAPQASTASDNRTLGSTRTGTSPSKKTASK

SEQ ID NO: 28171 - DNA, 15434 bp, DROSOPHILA
ctcttgcaagcagccaaaagtaaaattatgcccctctctctcccgatccgagttcatcactttgtcttcttttagctgtttttattttgcaaataacttgagtagtggatgggaaacaacgcaaaggcctttcacttgcatgtctgttgctcggtttgttgtcattaggtttactgttgttgttgcacacactcatccgcttacatacctcgtttatatacttatttacatttgaagttgccgtcgttggtatgttttactacgtatcagcttgtccgctttgagctgccccttcgcttttcaagcattttgttttgtccgctctgtttttcagctattccaattctcttccttcgttgccctgtgtatgtattcgtaatcgggttcggattcttgtttatttttacaccacttctctttctctttcgcacgaaaattcctcgaattcttttttatccatattttccttttccagcgggaaaaacgagtttttccagcagcgccgcattcttagcctgtcgccttgtctctttcccacttttatagtgtctccgcttcttgcttgtttacagttaggaatgcggtcgtctcccctctctctctctctctctctctctctctcactctctctcttcaaaaagagcgtgcgctctctttggccttatgtagttgtgtggatttcgactgaaacttgttttcgctttgccccgtcgtgtttatttataaaaagtcactggcaaacaattacagtgcaacaattacgctctcaaaagtggcgcgcaacttgttcgccttgtaaaaaaaattgtgacgccagcggcgacacgactgcgctgctttggccccatttaactgagagcgccgagggttagcttggcgggggcggcaacgccaaagagagttctctcgggtggcgctcgtctcccatcggtttcgctgctcgagccaaatgcttggaagtcaaagtctcgcccgaccatagtttcttattggatttcaaaccagtcgcttcgtgcacgcggcgttcgactacgcacacacacacacccatagcgcgctggcattgatatacatacacaggcaaatacacgacgccccaagttcgtgtgatgtagtgctgtagtggtgcgattaaataatactccacaaaaggccaaataaattacataaaatctaaatcggaataaaaataagtgtattctccctccgtgttgtgttcaaagtatttaaccgattgttttcattagtcaaattaatgtagtacaacgtatgagtgtgagccagttcctagaaaaataagagggcataaaaaataacagacacatacagcgtctcgtttcttataaattttcctactgcgtcggaattattgtcttgattattgttgtttctggcgaacttttgtgatttgtttcgagaaacatactgcggcggtttcataattgtgcaaatcaagggaagcacaatacgaatgttaagaatcaaagctaagaattaaataaaattaaagccgcacacatacatatacacaggcacgcgcagagtcgaaaaaatacgcgcgctcgctctgtacagtgtgtgcgtgtacgcggtggctggctcttcttcttcattcgtgtgcccattggaatttgtaccccaaatcgaaattacaacatagacaaacaaagagcgcccgtctgccccagcacctaaacgtaagtgtgtgcgtgcgagagtcgtttcatttgcattcttgtttagcgcactcccgctctctcttcgtgcgtttttcattcataagcacatttttactatttggaactgcaattttttacactaagcttgaggacagacaagaatactgtgaaaatccaatgtagatgaaagcaggccgtgctttttccatcaaagtaatcgcaaaaagtcgagattaacacaagttcaaaattattcgttaaattttagaacagaattttgaaatgaacataattcaggtactgtgtcatccacatataaagaacttttattctaaaaacaaataatcgtccgatcggtgtggtctgtccaataaaaattcacggcaaaggcgttggctaaaaatacaaagacaaacgagtcgggtaaaaaacaaataaatgataaaaaagactaaacaaatttcgcgaattttgtattactgtgaattgtatgcttggtgatgcacactgctatctagcagcattataaacttttcgaccaaaagctgttgaaacgcaacgataaagatattatagcaatcgcataagtatacatacatacgcagttcaacaaaatatttttgtcatatacaatagttcttgaattagtcttagaggctcgtttgccatttaataaatgacaagctagaaaaaacgctaatgatagcttaaccttttttttttttttcttttttgtgtggcctcgacaaaagatttataattttaatgtgtcaaaacaaaaatattttgtgtaaatttatcgtgtacggttttggtgtttctttcgtaataaactttggtcacataccttgagatagacatcgctacccaccgttttctggctatttctaatcaaacgtcctctttgtgctgcattttttgctttcaattggctgcattctgtagacgaaaatcttatttataaatataaattgaacatggacgcaggggcagaggcagtgtcaagacgcgcagaagggggatcggttgggtggctgcaaaacgttcatcggcgttggcctggcaataaaatagattaatttaaatgtcatttttgtctagacgccgcagacgacgccgacaacgagacgtcgagctactctgctctatgtttatagatcggttacatatatccccgacatccccatcccaattcgcatcccccacgtgatatagcggatcttcagttttttttttctctctgcattttctttttccccaatacacgcccactctaggtacactttctcgattcttcgaaatttttccacagcatctttatggacgtggatcttcttcatatcgccatttcaacgctcgtttcgatgcaaatgagcttttcgggttttgggtgacgtggaaatctggttaaacccatgtaatggacaacaatacaattcggaattttgggtatttcctgttttgttatcgctgtcagtgccattcaccaattgcttgactagtttcagccgctgacgcagatcgtcgtcttaattagcgtcgcagacgacaaaaatctcaataaagtgggtaggcaactttttttcaaatgtttcttttttttattttaatacgttaaagcggcagagttcaaatatctgaaaattgtatgtttattttgtttggattgactagtgggtgtatcacagcgcgctgttgaggtcatgttttaacatagaaagaaaagagacggctttttctgattgccaatagtgtcgcgggagctgcgggtataaaaagtaaaccaaccgcattccaatccgagtgacgcacattggacccctcatgacgacaattactattgagggcttcttgttggccgtagataatacacctgttttagggacttggggacggggcttcttggggccttcccagacaaaacgatcaatttttaaatcgatcggattttttcgaaatgaagcttcttttttgtcttttgttcgtctgggttcccacgtcagggtccaaatccccaactccaaagcctagttccattcgtatcttaatctttcgctcgttgttgctctaaaattagccaccagctgaaactttcattgacgcatttgctcaccttgtttttatggttttttgatttttattcacattttgagtttgtgtgtctgagttttatggtttgtccgttgcataattaataatctgggctgaaactgatttctttcttatctgagttgggcttttgccgaataatgtgatgtacaccgtacgctatagttgcgctcacttgatttacttatgtggtcatcactttagcctgtgggctgctgctgattttgtagctaaaggcttccctcgagcttttaattccttaagaaatcacgccacaaaatttatttttcgctaatggtaaactggcgaataaagaaacacaaacgaaccaataaacgagaagcgaacgaaaacaaagccaaagtccagcagcataaacttctaatagaaatgtaaacaggtggcaatgaactttattatatttttatgctccaagtccttgaacccgccaaaatcaaagtcacacaaagtaaaacgcaaagcaaaaacaacacggcaatgaacttgacgtcaatggcggaccattgggccgcctgttgtcgttctgccttttgtggacctgttcttgagttccgctttggagcatcggcttcgaggctttgcggttgttcagcagaaaattagtttatagcatgtcaaatttctcgtttaatataagtctggaaaaatcatgaaaagttagtgagtttcagaggaagttacgaccatttggaattcaagcagtactgagcaaaatatccaaacatttaatcgaaacaagaaggtggaggcaaattatattttatattaaattaaatattgttttaatcgcaaatactttgcatatatttttccagatcaacggtacacagcaacagctccaattgccaggcagcggcgctagcggaatcgcagcggcagccgtaatcacggtagcatcggattgcggcgaaaactgcagcagtaacggcaccgagcatcagcagcacttcaacattgctaccaccacagcaacttcggcgacagaggcaacaatgccggctatggccaaggagaaagcatcagcaacagtgtccttgggcgagtcgaatttcagagatatcaacctaaaagacttggccgtggtcgtcgaagcggcatcgcggctgcaccaccagcaaaacgtatgcggctgcggagcggtatcgtctactgagaacaacaacaacagtcgctacggcagcagcaagtatctgacaaacggtaagcttaattctgagttactcaaatagagtatgtttcaagttgttcttaaaacactgaacattgtccgtttgcaacatgtttttgcttcgacgctaacacaatctctgcttttctctggcaggccacacgtcgcctttggcggcagcggttgctagcaacagttcgtcggtggccacgacaccgcattgcagaatgttgcacaactgcagtctgcagcagtaccagaatgacataaggcagcagacggagatattggacatgttgcggcagcagcatcagcagggctaccagtcgcagcaacagcaacaacagccgcagcagcagcaggaacaacagcagcagcaggagcaatcgcagcagcagcaacagctacagaatcctgcgcccaggaggtctccgaatgatttcattttcggtcgttacataggcgagggcagctatagcatagtttatctggccgtggatatacactctcgccgcgagtatgcaagtaagtcctttttagttttcagtgggtacgataactagttagtaggtcggcgcatcattcgaccgatgcccgcccacggtatttcaacggcacttgtatggcctctgcttggcgccagcgcgagaatgcggtcgcaatgtagacgcggcgcttttgttgccactccgcttagtttgtcacctgcatcgcttattttcaatattgggatgagccccaatacaaacgcgggccgctgcgtcttcggcgtctttccttgggagtgtttgcacgattatctcatattcaaactggtcaacatgggcatacgatttcttgcgctccttgctttcaaacagcattttctacctgctgggcacaaaatgaggaaaaattttggggacgctcacgtgacccttttgttattggtaatttcatcagtcagtctatcaaacttgctcgaaaacgacacgggctgttatcagagtgataagccaaatttcgttctgtagctccttgcttttgttttgcttgtttatcgattaaagccaaagctgacgttggcgactatctggcgtcgggctcgcgcgcaccatcagctgtttagtttttttaatgcaatttaaattaacggcaaataaaccagtctgaaaacgagctgaaaagcagcttttaggtgttcactagatttctagagccattgttttaaaaggctatgcattgccacacaccactagagtgcatttatactgacatatttttccaccttgtgtttatttgtgctaagccaatttgcttaaagattttcagttgtgcttttcagtgggcgtgtacgccgtgagtggcggaataattttgcctcgccagcagctaatcaataccgtcacaagaggagggaggcacgtgttgcataaatgcaaatgcaaacacaatgacgcacacaagcacgcacagaacaatgggagctgagaaggagcacaacggcacgttgtcagcagaacgcatttgcagtgaggggcgaagactttgggggcatttggtaaaactaaataattggaatttcttttgttgaaaaaaaaaattccgatgcgatgcccctgcctaaagctgttattactgctctggccgctttaattgcatgtaaagatgaaggcaataataacaaagtctagttatgtatgtatttaaaaataggaagcgcactcacacaagtcgtaaacagtttccccaaggcgtgtcgctccgttaaattaataaacatattattcatacttttgacattgaatccgatgcagctggtgcactaaatattggcaaactatggttgtgcaatcgggagcagagtcgacgcttgtttgaaggtcagtgttcgtttttcggcaggtttgtgtgtagttgccctcaacctaatgggtttcatagtcagcaacatttcctccaaccacgtacacatcgcagcacccactggtgcagacgcctcccacgcacgagaaatgaacacgcacgcaaattcacgatgaacgcagcagttttcgttttcatgcgccccatctctttcttgcctacccactttaccggcgtcattgttgttgttttccctgttcgatgacgacaacggcgtctatttgacgccatacgaatttcagtttaggcttttcacatttcctgcgcagctatgtatgtatttcaccatctttggcaacaacatatgccacattcttggggttccttcattttccgctcgcttacctgtatttcgaatttttagattcttgcgatggaagattttaacaatgcgtgctcgtgcagataatcctgatttgagcaagggataaggagaggcggagggagagtcaacagcagctgttggtttcctgagttgcttacacttaccatgcagtcgtgtacagttatgtaagctagttttagtcgggaaagctgagaacttccaaaatactggtctgctagtcggatatatgtactatataaacattttcaaagtactccactttctccacctctgtttttgaccattgaacttgtacgcgcaatccttgcctcgaacccgtttgcttccatatcgggcaacgttcggatttaccatcaagtttttcatctcctcgactccatattctttattgggggttgctgtctggtactttcttagcagtcacctatgttccagctccactgcgttatttttaattacacgtttatttttggacagcagctggttctgcgcagccgcagctgcctgaggccgggggtattcaactgaaatagtcacttgcttggctgcctagggggttctgttttggctccgtaacgagatattggatcggagaactgggacgttcaacccatgactcgactcctgtcggtaaaatcctttccagcttactatcaggcttattcataatattctgtcttacaccttgccttatctttcttttttatgtggttgcgacatctgtcgtcgtcggtagaaggtaaaggggtttgtgtggtaaggtgtctcctgcacgtgtcaaggacatttggtgggctattggtccgcccgacgctttagggccaaaattaaatagctttttttattgcactcgcacacactcgcttttcgttgtttctcgtcggtataccgaaaaatcctcccaaagggtcaatacacttttgttagcctggagcaagagaagcatcacacaataataataataaaaaatttgcaagagtacacataataagccaactcgaaaactccgcacccagattactgtgaaagctgctaaattaaaacgcggcgtgggagttttaccatgtcgatcggtgaggtgcacttagggaatgacgagagtattatgctaactgtaggtgagttctttaagaatggcgagtagtagcccagtcatagaacaccaaagcaagagacaaccgtatttgcaggctctaagctctctgtcccactatcgagtcctcgtagtctattttttttttatactttcatccacttctttttaaggactacagaagttgagcttccgcattttggcgggcgctttcccatcctcaaaggtaaaaatcgtgttccgtcttttgaaaagccggattttagacgttgtcttccagtagcaaaaacaacgtgcaaccacgagaaggttgctcaatctttattttgatttatttatagaatatgtattcgtgtcctgctcacgcgcggcactgctttatcgacgagttcacactagctttctggtcggtgtagtcaatctgtgtagctctatctcgctctgtcattctaaaactcgttggattgcattccttgcagcaacaagttgcagtcttggtattttcattgttcgccttgtttttgatttctgcattttatttgtgacttgattaaccagcctatgatacgatttttgtgctatatgtatattagagttgttgtggccaaaataaggcagttgaaaatttggcactgtgaccaaaaacccaaaacaaggaggatgatggtaaaatgttaaaaaacaagtacttctgatttagcgggataaaccgaggtggcaactctaagacctcaagagcaagcttcgggcaaatatttatgcttagacggcgaattgggacgttttttttttttactgctttgcagctgtttgttgggtttttacttatgtgtttactttcggtgatgtttgtgttgttgttgcacatgctacacggcagcggaaaagagaaacggagaacggcagcaagttcaaggctaagattatcaggaggtcaataaacctaaccaatcgggaaaaaacacagaatatcagagtagagccgcaagtgaattaataatgtgactttttttaaattaaggtgaagaaaaaggccaggcatgcgaaagcatccagaaaaaagaaggtgaaataggtaatgtgtttattgcataggatcggaatgataatcatcgtttttttgttacattttgctgcgcaacaaatttttgaaggtcaattctgtttttacgcacccatttgtgctgctctatcgcttgggaaatttaaaacgcgtaaaaaacattttcgttcggttctttttgatttctcgattattgattgttgttgctaccgctgtgctgtgttaatcttttaattgctgtattttgtttttcttctttgtgtttattttgttgctactcgaccgacgacttatcgcccccgatgttttttagacaggattccgattcaatttcgtattctattggatttttccctgttctgtttgccctcttttgccgcgaatagttgttttgatcttgatagagggacctccaaaaaataaatgcaaatttatcttgaactttatttttggcaatagacttataatagtatgaaaagttgacagatatggttggggctaatttattatttttagcattattttcaacagatttgtgattttccgttgcgattgtcagccaaaggctggctattcgtgattggaaaataaaataagggcgggcagaaacaaaagggaaactactgataagcggtcaaaactctctcacaatcattataaccgttaaccccgcacgggagggtgtgggatgcaagtttgaaacaccgtttcatacggcccaactgtgtagttcctcttgcgcctttggatctctcactctccgtctctcccactaactctccctctttactctctctccttccctctctctcttttcgcgaattccagttcaataaccagttttaaatttatttagctctgaacgagatggagttcataagttctgtgcttgctgtggttttctgggggaccggaaagcggaaaaggggcggaagtcaaaaacaagtttctctaagggcgctcgctttcatttgtctcgctgttaattaaacaatttgatctgagttctgacatcaaaattccactctcgtctctttattgtttcaccgtctttctttcataatagaagtctgtccgcactaaaacctttctatttcaacaggtcataaaagggtcgcaagaaatttctgattggaccacaaaaatttagggggaagtccatcagactgaaaatttggtcgcattttgccaaaaaaaaaaaaaaaaatgtgtgctgctagctggtttgtgtgctgttttattattctcacgcgttcactttgtgtgcttatacctacatatatagcatttttaaattcaattatttaatcacttgcattggtatacgtatatctatgcctttgcagttgccaagagctgtttccgcaagcaaaatgtggtttgcccgcaactctgacttaccgatagttgcctgcactaagtaaaaatattgtggatactaggttctagaaacatgaattcttcaattaaatatgtatgtaatttcatctacacttgtagataccatattaactccaatctgaccctatcgttttcgatcttctccttgcagttaaagtatgcgagaagcggctgatcctgcgcgaacggaagcaggactacatcaagcgtgaacgcgaggtgatgcaccagatgaccaacgttcccggcttcgtaaacctgtcgtgcaccttccaggaccagcgttctctttactttgtgatgacgtacgcgcgaaagggcgacatgttgccatacatcaaccgcgtgggtagctttgacgtggcctgcacgcgccactacgctgccgagcttctgctggcctgcgagcacatgcaccgccgtaatgtggtgcaccgcgacctcaagcccgagaacatcctgctcgacgaggacatgcacacgctaatcgccgacttcggttccgccaaggtgatgacagcccacgaaagggctctggccacggagcactgttcggagcagcggcgcagcaactccgatgaagacgatgaagacagcgaccgcctggaaaacgaagacgaagacttctacgatcgcgattcggaggagttggacgacggcgacgacgaacagcagcaggaagagatggactccccacgccatcgtcaaaggcgttacaaccgtcaccgaaaggcaagctttgtgggcactgcccagtacgtttcaccggaagtgctccaaaatggacctataaccccggcggcggacctgtgggcactgggatgtatagtttatcagatgatcgccggcctaccgccattccgtggcagcaacgattatgtcatttttaaagagattcttgactgcgccgtggacttcccgcaaggctttgataaggacgccgaggacctggtgcgcaagctgctccgtgtcgatccgcgagaccgcctgggtgctcaggacgagtttggatattacgaatccattcgggcgcacccattcttcgccggcattgactggcagacgctccgtcaacaaacccctccccccatctacccatacttaccgggcgtaagtcaggatgaggacttcaggtccagctatactgtgcccggggatttggagcctggccttgacgaacggcagatatcgcgactgcttagtgcagaattaggcgttggcagcagcgtggccatgcccgtcaagcgatcgaccgcaaagagtaagtgtccacgtggtgccccagaaaaatacgttggctaatgaatgtattgtttttcttcagactctttcgacctgaacgatgccgagaagctgcagcgtctcgagcaacaaaagactgacaagtggcacgtttttgccgacggcgaagtgatcctcaagaaggggtttgtcaacaagcgcaagggtctgtttgcccgcaagcgaatgctccttctgaccacgggaccgcgactcatctatatcgatcccgtgcagatgatcaaaaaaggagaaattccgtggagcccagatctccgagcggagtacaaaaacttcaaaattttttttgtccatacggtaagtgtttacctatggtgggataaggatgcacgaggcgcaactcggaaaaccgagaaagcataagtttgttgaaccgatgacatcacagcttatagttcgtagccagtcacacgcctactgaaaagcaatttgagcgttagtttatgtcccgggcacgtgttggctatgaaagcaaattaaatgcggcattgaaaactgcacacgcaaggcagataaaaactcaaacttgtttggtgaatgggtttaaaattagcgttgcgctcaactaattttactcttttggtttcattgcagccaaatcgaacctattacctggatgatcccgaaggctatgctatccactggtcggaagctattgagaacatgcgcaagttggcctacggagatccctcctccacatctgcagtgtcctgctccagcggcagcagtaatagcctggctgtcatctcaaattcatccgccgcctcctcaagcaattcgcccacggtgaaacgcagttcccccgtaaacgctcctcaagcttcgacggcgtctgacaaccggacattgggtagcaccagaacggggacgtcacctagcaagaagacggcgtctaagtaaacgtagtcctatttatagcaatgtgaaattaatttagttgaaatttagtgcaaacgaagcgatggcgtagaagagggcgggaatagaagtaagcttagaagtagaagtaagtgatgaaggggaaataatgatcgtgtctctagtgctaattagaaccaaatttctgttttccgatttgtattgtgcttagggcgaaaatataacactagaataaacttatctaaagtaaaatacatctataacgactaagtaaattcaatttaaaatttaaattaaatatttatatacagcatacataaatacaaatatattcgtatttagcgcgtagttagtcgcaattgaaatgaattacacacggaggcaaggtggcattgtaggcttaaattaaaagtaatttcgtgaagcaaactaaaatccgtatttaaatggtataatactaggaaattatctggaaactgtaatatacataatatgtgtatgtacgtcggagaaataatttttgtttctgttatcgtgggaagatcacatatatgttaatataaattttgtaaacagtgtaactatgtacagaactatgtgagctatatgcacacggcaaaaagaccctaagtcgtggggaaggagatgggaatgagccggaaaaccatcgatgtcacaaaatcggtgtttttccagcttcacgctcaactgtttaggtaattctaatatacagtttaacgctaattatcattatttatcattctcattatgcttttcgtttacctatttgccctataatgaaatgtataagacttgagctaccctaataaaagaacgaattttaaattatatttttattttgtaagggctaccactaaaaactcaacagtcgttcaaagattgtcaagattggcggtcgttgtctctccaactgactccaattgaatgtgtgtaaaacaagtcttatacaaagatatatgtaatagatgtaagacagactgcaaagtttcttgaaacaaattagttaaatgttgtaaatgtctaagttgctaccactgctactactagaacgcgcccatcccctcccatatttacctttaagctacagtaattaagtgatgagcagaggtgtagagtaaggagtcgaagttgaaagaaagcaaaaaatacattttgtacatacatatcgccgttggtcgatatacatctaaacataatttaattttttgttacttttaagtaaattatttttggcgacctaagtaaattaaaattaacgcaatatgcaacaacacacataagtatacaattaattaaattaaacgaaaattacgatttattaaacgatgtcatagaacggagagccactgatagtgagagaaatctgtaaaataaatatttaaacaaattatatattatctatatatgagtaccagaacaagaatgtcaaaaaagagaagcatgtaaaaataaaaaatatattacgagtaaaacaaaaaaagataatcgagcgaaaggaacgtatcattaacaggaaaaattaaagaaaaatacaaaaacatttcaaagtaacaaaattacgataaaatttgtttttattttggttcgtttggttattacaattggcaatatctaactgattgggtaataagtgcgcgtatcccagtatccaacgttgcaaaatgatacaacatttcaataggtttcaaaatctacgtaagatacacataaaacgacctgactactttgttctaccctacgcttgtgctgcagtacctaaaatcgaagaaagagtacagtgaacagggctaagatatagaaagacagctctatttctgcaatccaaaaagggcttgccctaattaaaataattgcaaatgcattgcgcttcaaatccagaagccttttttaccttttatagcctacaggaaaaaagaaaaaagaggagataacggaaagacccataaaatcgaaaagtgcataggtaaacctgtaggacgattagtggaatactaaaatcatcatatgttttaatcaataagtattccaattttaccaggggcaagtgtatgcgaattctttcagtacgagtatttaatatatttatttttatcataattgtataaaaacctgaagctccaaaataacttgatcattttgagaaaaatattaataaaaattatttttttgtttattttcttattatttagttacatataattttattttatgtttatgtttttataatttttattttattattcattatattataataaatagattcgttgaatagtattaatattggatttgaatgcagcgatgcgttttacgcatttcaaatccgaaactcgcttagatcacacgacgtaactttataagatatataaatcaaaaataactgttattttgaaagagaaaaaatgatgttgtttgaaataaaggaacaaaaaagcgaaaaacagaaa

SEQ ID NO: 28172 - DNA, 4589 bp, DROSOPHILA
accagtcgcttcgtgcacgcggcgttcgactacgcacacacacacacccatagcgcgctggcattgatatacatacacaggcaaatacacgacgccccaagttcgtgtgatgtagtgctgtagtggtgcgattaaataatactccacaaaaggccaaataaattacataaaatctaaatcggaataaaaataagtgtattctccctccgtgttgtgttcaaagtatttaaccgattgttttcattagtcaaattaatgtagtacaacgtatgagtgtgagccagttcctagaaaaataagagggcataaaaaataacagacacatacagcgtctcgtttcttataaattttcctactgcgtcggaattattgtcttgattattgttgtttctggcgaacttttgtgatttgtttcgagaaacatactgcggcggtttcataattgtgcaaatcaagggaagcacaatacgaatgttaagaatcaaagctaagaattaaataaaattaaagccgcacacatacatatacacaggcacgcgcagagtcgaaaaaatacgcgcgctcgctctgtacagtgtgtgcgtgtacgcggtggctggctcttcttcttcattcgtgtgcccattggaatttgtaccccaaatcgaaattacaacatagacaaacaaagagcgcccgtctgccccagcacctaaacatcaacggtacacagcaacagctccaattgccaggcagcggcgctagcggaatcgcagcggcagccgtaatcacggtagcatcggattgcggcgaaaactgcagcagtaacggcaccgagcatcagcagcacttcaacattgctaccaccacagcaacttcggcgacagaggcaacaatgccggctatggccaaggagaaagcatcagcaacagtgtccttgggcgagtcgaatttcagagatatcaacctaaaagacttggccgtggtcgtcgaagcggcatcgcggctgcaccaccagcaaaacgtatgcggctgcggagcggtatcgtctactgagaacaacaacaacagtcgctacggcagcagcaagtatctgacaaacggccacacgtcgcctttggcggcagcggttgctagcaacagttcgtcggtggccacgacaccgcattgcagaatgttgcacaactgcagtctgcagcagtaccagaatgacataaggcagcagacggagatattggacatgttgcggcagcagcatcagcagggctaccagtcgcagcaacagcaacaacagccgcagcagcagcaggaacaacagcagcagcaggagcaatcgcagcagcagcaacagctacagaatcctgcgcccaggaggtctccgaatgatttcattttcggtcgttacataggcgagggcagctatagcatagtttatctggccgtggatatacactctcgccgcgagtatgcaattaaagtatgcgagaagcggctgatcctgcgcgaacggaagcaggactacatcaagcgtgaacgcgaggtgatgcaccagatgaccaacgttcccggcttcgtaaacctgtcgtgcaccttccaggaccagcgttctctttactttgtgatgacgtacgcgcgaaagggcgacatgttgccatacatcaaccgcgtgggtagctttgacgtggcctgcacgcgccactacgctgccgagcttctgctggcctgcgagcacatgcaccgccgtaatgtggtgcaccgcgacctcaagcccgagaacatcctgctcgacgaggacatgcacacgctaatcgccgacttcggttccgccaaggtgatgacagcccacgaaagggctctggccacggagcactgttcggagcagcggcgcagcaactccgatgaagacgatgaagacagcgaccgcctggaaaacgaagacgaagacttctacgatcgcgattcggaggagttggacgacggcgacgacgaacagcagcaggaagagatggactccccacgccatcgtcaaaggcgttacaaccgtcaccgaaaggcaagctttgtgggcactgcccagtacgtttcaccggaagtgctccaaaatggacctataaccccggcggcggacctgtgggcactgggatgtatagtttatcagatgatcgccggcctaccgccattccgtggcagcaacgattatgtcatttttaaagagattcttgactgcgccgtggacttcccgcaaggctttgataaggacgccgaggacctggtgcgcaagctgctccgtgtcgatccgcgagaccgcctgggtgctcaggacgagtttggatattacgaatccattcgggcgcacccattcttcgccggcattgactggcagacgctccgtcaacaaacccctccccccatctacccatacttaccgggcgtaagtcaggatgaggacttcaggtccagctatactgtgcccggggatttggagcctggccttgacgaacggcagatatcgcgactgcttagtgcagaattaggcgttggcagcagcgtggccatgcccgtcaagcgatcgaccgcaaagaactctttcgacctgaacgatgccgagaagctgcagcgtctcgagcaacaaaagactgacaagtggcacgtttttgccgacggcgaagtgatcctcaagaaggggtttgtcaacaagcgcaagggtctgtttgcccgcaagcgaatgctccttctgaccacgggaccgcgactcatctatatcgatcccgtgcagatgatcaaaaaaggagaaattccgtggagcccagatctccgagcggagtacaaaaacttcaaaattttttttgtccatacgccaaatcgaacctattacctggatgatcccgaaggctatgctatccactggtcggaagctattgagaacatgcgcaagttggcctacggagatccctcctccacatctgcagtgtcctgctccagcggcagcagtaatagcctggctgtcatctcaaattcatccgccgcctcctcaagcaattcgcccacggtgaaacgcagttcccccgtaaacgctcctcaagcttcgacggcgtctgacaaccggacattgggtagcaccagaacggggacgtcacctagcaagaagacggcgtctaagtaaacgtagtcctatttatagcaatgtgaaattaatttagttgaaatttagtgcaaacgaagcgatggcgtagaagagggcgggaatagaagtaagcttagaagtagaagtaagtgatgaaggggaaataatgatcgtgtctctagtgctaattagaaccaaatttctgttttccgatttgtattgtgcttagggcgaaaatataacactagaataaacttatctaaagtaaaatacatctataacgactaagtaaattcaatttaaaatttaaattaaatatttatatacagcatacataaatacaaatatattcgtatttagcgcgtagttagtcgcaattgaaatgaattacacacggaggcaaggtggcattgtaggcttaaattaaaagtaatttcgtgaagcaaactaaaatccgtatttaaatggtataatactaggaaattatctggaaactgtaatatacataatatgtgtatgtacgtcggagaaataatttttgtttctgttatcgtgggaagatcacatatatgttaatataaattttgtaaacagtgtaactatgtacagaactatgtgagctatatgcacacggcaaaaagaccctaagtcgtggggaaggagatgggaatgagccggaaaaccatcgatgtcacaaaatcggtgtttttccagcttcacgctcaactgtttaggtaattctaatatacagtttaacgctaattatcattatttatcattctcattatgcttttcgtttacctatttgccctataatgaaatgtataagacttgagctaccctaataaaagaacgaattttaaattatatttttattttgtaagggctaccactaaaaactcaacagtcgttcaaagattgtcaagattggcggtcgttgtctctccaactgactccaattgaatgtgtgtaaaacaagtcttatacaaagatatatgtaatagatgtaagacagactgcaaagtttcttgaaacaaattagttaaatgttgtaaatgtctaagttgctaccactgctactactagaacgcgcccatcccctcccatatttacctttaagctacagtaattaagtgatgagcagaggtgtagagtaaggagtcgaagttgaaagaaagcaaaaaatacattttgtacatacatatcgccgttggtcgatatacatctaaacataatttaattttttgttacttttaagtaaattatttttggcgacctaagtaaattaaaattaacgcaatatgcaacaacacacataagtatacaattaattaaattaaacgaaaattacgatttattaaacgatgtcatagaacggagagccactgatagtgagagaaatctgtaaaataaatatttaaacaaattatatattatctatatatgagtaccagaacaagaatgtcaaaaaagagaagcatgtaaa

SEQ ID NO: 28173 - protein, 752 aa, DROSOPHILA; identical to SEQ ID NO: 138

SEQ ID NO: 28174 - DNA, 5947 bp, DROSOPHILA
tttacgcacccatttgtgctgctctatcgcttgggaaatttaaaacgcgtaaaaaacattttcgttcggttctttttgatttctcgattattgattgttgttgctaccgctgtgctgtgttaatcttttaattgctgtattttgtttttcttctttgtgtttattttgttgctactcgaccgacgacttatcgcccccgatgttttttagacaggattccgattcaatttcgtattctattggatttttccctgttctgtttgccctcttttgccgcgaatagttgttttgatcttgatagagggacctccaaaaaataaatgcaaatttatcttgaactttatttttggcaatagacttataatagtatgaaaagttgacagatatggttggggctaatttattatttttagcattattttcaacagatttgtgattttccgttgcgattgtcagccaaaggctggctattcgtgattggaaaataaaataagggcgggcagaaacaaaagggaaactactgataagcggtcaaaactctctcacaatcattataaccgttaaccccgcacgggagggtgtgggatgcaagtttgaaacaccgtttcatacggcccaactgtgtagttcctcttgcgcctttggatctctcactctccgtctctcccactaactctccctctttactctctctccttccctctctctcttttcgcgaattccagttcaataaccagttttaaatttatttagctctgaacgagatggagttcataagttctgtgcttgctgtggttttctgggggaccggaaagcggaaaaggggcggaagtcaaaaacaagtttctctaagggcgctcgctttcatttgtctcgctgttaattaaacaatttgatctgagttctgacatcaaaattccactctcgtctctttattgtttcaccgtctttctttcataatagaagtctgtccgcactaaaacctttctatttcaacaggtcataaaagggtcgcaagaaatttctgattggaccacaaaaatttagggggaagtccatcagactgaaaatttggtcgcattttgccaaaaaaaaaaaaaaaaatgtgtgctgctagctggtttgtgtgctgttttattattctcacgcgttcactttgtgtgcttatacctacatatatagcatttttaaattcaattatttaatcacttgcattggtatacgtatatctatgcctttgcagttgccaagagctgtttccgcaagcaaaatgtggtttgcccgcaactctgacttaccgatagttgcctgcactaagtaaaaatattgtggatactaggttctagaaacatgaattcttcaattaaatatgtatgtaatttcatctacacttgtagataccatattaactccaatctgaccctatcgttttcgatcttctccttgcagttaaagtatgcgagaagcggctgatcctgcgcgaacggaagcaggactacatcaagcgtgaacgcgaggtgatgcaccagatgaccaacgttcccggcttcgtaaacctgtcgtgcaccttccaggaccagcgttctctttactttgtgatgacgtacgcgcgaaagggcgacatgttgccatacatcaaccgcgtgggtagctttgacgtggcctgcacgcgccactacgctgccgagcttctgctggcctgcgagcacatgcaccgccgtaatgtggtgcaccgcgacctcaagcccgagaacatcctgctcgacgaggacatgcacacgctaatcgccgacttcggttccgccaaggtgatgacagcccacgaaagggctctggccacggagcactgttcggagcagcggcgcagcaactccgatgaagacgatgaagacagcgaccgcctggaaaacgaagacgaagacttctacgatcgcgattcggaggagttggacgacggcgacgacgaacagcagcaggaagagatggactccccacgccatcgtcaaaggcgttacaaccgtcaccgaaaggcaagctttgtgggcactgcccagtacgtttcaccggaagtgctccaaaatggacctataaccccggcggcggacctgtgggcactgggatgtatagtttatcagatgatcgccggcctaccgccattccgtggcagcaacgattatgtcatttttaaagagattcttgactgcgccgtggacttcccgcaaggctttgataaggacgccgaggacctggtgcgcaagctgctccgtgtcgatccgcgagaccgcctgggtgctcaggacgagtttggatattacgaatccattcgggcgcacccattcttcgccggcattgactggcagacgctccgtcaacaaacccctccccccatctacccatacttaccgggcgtaagtcaggatgaggacttcaggtccagctatactgtgcccggggatttggagcctggccttgacgaacggcagatatcgcgactgcttagtgcagaattaggcgttggcagcagcgtggccatgcccgtcaagcgatcgaccgcaaagagtaagtgtccacgtggtgccccagaaaaatacgttggctaatgaatgtattgtttttcttcagactctttcgacctgaacgatgccgagaagctgcagcgtctcgagcaacaaaagactgacaagtggcacgtttttgccgacggcgaagtgatcctcaagaaggggtttgtcaacaagcgcaagggtctgtttgcccgcaagcgaatgctccttctgaccacgggaccgcgactcatctatatcgatcccgtgcagatgatcaaaaaaggagaaattccgtggagcccagatctccgagcggagtacaaaaacttcaaaattttttttgtccatacggtaagtgtttacctatggtgggataaggatgcacgaggcgcaactcggaaaaccgagaaagcataagtttgttgaaccgatgacatcacagcttatagttcgtagccagtcacacgcctactgaaaagcaatttgagcgttagtttatgtcccgggcacgtgttggctatgaaagcaaattaaatgcggcattgaaaactgcacacgcaaggcagataaaaactcaaacttgtttggtgaatgggtttaaaattagcgttgcgctcaactaattttactcttttggtttcattgcagccaaatcgaacctattacctggatgatcccgaaggctatgctatccactggtcggaagctattgagaacatgcgcaagttggcctacggagatccctcctccacatctgcagtgtcctgctccagcggcagcagtaatagcctggctgtcatctcaaattcatccgccgcctcctcaagcaattcgcccacggtgaaacgcagttcccccgtaaacgctcctcaagcttcgacggcgtctgacaaccggacattgggtagcaccagaacggggacgtcacctagcaagaagacggcgtctaagtaaacgtagtcctatttatagcaatgtgaaattaatttagttgaaatttagtgcaaacgaagcgatggcgtagaagagggcgggaatagaagtaagcttagaagtagaagtaagtgatgaaggggaaataatgatcgtgtctctagtgctaattagaaccaaatttctgttttccgatttgtattgtgcttagggcgaaaatataacactagaataaacttatctaaagtaaaatacatctataacgactaagtaaattcaatttaaaatttaaattaaatatttatatacagcatacataaatacaaatatattcgtatttagcgcgtagttagtcgcaattgaaatgaattacacacggaggcaaggtggcattgtaggcttaaattaaaagtaatttcgtgaagcaaactaaaatccgtatttaaatggtataatactaggaaattatctggaaactgtaatatacataatatgtgtatgtacgtcggagaaataatttttgtttctgttatcgtgggaagatcacatatatgttaatataaattttgtaaacagtgtaactatgtacagaactatgtgagctatatgcacacggcaaaaagaccctaagtcgtggggaaggagatgggaatgagccggaaaaccatcgatgtcacaaaatcggtgtttttccagcttcacgctcaactgtttaggtaattctaatatacagtttaacgctaattatcattatttatcattctcattatgcttttcgtttacctatttgccctataatgaaatgtataagacttgagctaccctaataaaagaacgaattttaaattatatttttattttgtaagggctaccactaaaaactcaacagtcgttcaaagattgtcaagattggcggtcgttgtctctccaactgactccaattgaatgtgtgtaaaacaagtcttatacaaagatatatgtaatagatgtaagacagactgcaaagtttcttgaaacaaattagttaaatgttgtaaatgtctaagttgctaccactgctactactagaacgcgcccatcccctcccatatttacctttaagctacagtaattaagtgatgagcagaggtgtagagtaaggagtcgaagttgaaagaaagcaaaaaatacattttgtacatacatatcgccgttggtcgatatacatctaaacataatttaattttttgttacttttaagtaaattatttttggcgacctaagtaaattaaaattaacgcaatatgcaacaacacacataagtatacaattaattaaattaaacgaaaattacgatttattaaacgatgtcatagaacggagagccactgatagtgagagaaatctgtaaaataaatatttaaacaaattatatattatctatatatgagtaccagaacaagaatgtcaaaaaagagaagcatgtaaaaataaaaaatatattacgagtaaaacaaaaaaagataatcgagcgaaaggaacgtatcattaacaggaaaaattaaagaaaaatacaaaaacatttcaaagtaacaaaattacgataaaatttgtttttattttggttcgtttggttattacaattggcaatatctaactgattgggtaataagtgcgcgtatcccagtatccaacgttgcaaaatgatacaacatttcaataggtttcaaaatctacgtaagatacacataaaacgacctgactactttgttctaccctacgcttgtgctgcagtacctaaaatcgaagaaagagtacagtgaacagggctaagatatagaaagacagctctatttctgcaatccaaaaagggcttgccctaattaaaataattgcaaatgcattgcgcttcaaatccagaagccttttttaccttttatagcctacaggaaaaaagaaaaaagaggagataacggaaagacccataaaatcgaaaagtgcataggtaaacctgtaggacgattagtggaatactaaaatcatcatatgttttaatcaataagtattccaattttaccaggggcaagtgtatgcgaattctttcagtacgagtatttaatatatttatttttatcataattgtataaaaacctgaagctccaaaataacttgatcattttgagaaaaatattaataaaaattatttttttgtttattttcttattatttagttacatataattttattttatgtttatgtttttataatttttattttattattcattatattataataaatagattcgttgaatagtattaatattggatttgaatgcagcgatgcgttttacgcatttcaaatccgaaactcgcttagatcacacgacgtaactttataagatatataaatcaaaaataactgttattttgaaagagaaaaaatgatgttgtttgaaataaaggaacaaaaaagcgaaaaacagaaa

SEQ ID NO: 28175 - DNA, 3258 bp, DROSOPHILA
tcataaaagggtcgcaagaaatttctgattggaccacaaaaatttagggggaagtccatcagactgaaaatttggtcgcattttgccaaaaaaaaaaaaaaaaatgtgtgctgctagctgttaaagtatgcgagaagcggctgatcctgcgcgaacggaagcaggactacatcaagcgtgaacgcgaggtgatgcaccagatgaccaacgttcccggcttcgtaaacctgtcgtgcaccttccaggaccagcgttctctttactttgtgatgacgtacgcgcgaaagggcgacatgttgccatacatcaaccgcgtgggtagctttgacgtggcctgcacgcgccactacgctgccgagcttctgctggcctgcgagcacatgcaccgccgtaatgtggtgcaccgcgacctcaagcccgagaacatcctgctcgacgaggacatgcacacgctaatcgccgacttcggttccgccaaggtgatgacagcccacgaaagggctctggccacggagcactgttcggagcagcggcgcagcaactccgatgaagacgatgaagacagcgaccgcctggaaaacgaagacgaagacttctacgatcgcgattcggaggagttggacgacggcgacgacgaacagcagcaggaagagatggactccccacgccatcgtcaaaggcgttacaaccgtcaccgaaaggcaagctttgtgggcactgcccagtacgtttcaccggaagtgctccaaaatggacctataaccccggcggcggacctgtgggcactgggatgtatagtttatcagatgatcgccggcctaccgccattccgtggcagcaacgattatgtcatttttaaagagattcttgactgcgccgtggacttcccgcaaggctttgataaggacgccgaggacctggtgcgcaagctgctccgtgtcgatccgcgagaccgcctgggtgctcaggacgagtttggatattacgaatccattcgggcgcacccattcttcgccggcattgactggcagacgctccgtcaacaaacccctccccccatctacccatacttaccgggcgtaagtcaggatgaggacttcaggtccagctatactgtgcccggggatttggagcctggccttgacgaacggcagatatcgcgactgcttagtgcagaattaggcgttggcagcagcgtggccatgcccgtcaagcgatcgaccgcaaagaactctttcgacctgaacgatgccgagaagctgcagcgtctcgagcaacaaaagactgacaagtggcacgtttttgccgacggcgaagtgatcctcaagaaggggtttgtcaacaagcgcaagggtctgtttgcccgcaagcgaatgctccttctgaccacgggaccgcgactcatctatatcgatcccgtgcagatgatcaaaaaaggagaaattccgtggagcccagatctccgagcggagtacaaaaacttcaaaattttttttgtccatacgccaaatcgaacctattacctggatgatcccgaaggctatgctatccactggtcggaagctattgagaacatgcgcaagttggcctacggagatccctcctccacatctgcagtgtcctgctccagcggcagcagtaatagcctggctgtcatctcaaattcatccgccgcctcctcaagcaattcgcccacggtgaaacgcagttcccccgtaaacgctcctcaagcttcgacggcgtctgacaaccggacattgggtagcaccagaacggggacgtcacctagcaagaagacggcgtctaagtaaacgtagtcctatttatagcaatgtgaaattaatttagttgaaatttagtgcaaacgaagcgatggcgtagaagagggcgggaatagaagtaagcttagaagtagaagtaagtgatgaaggggaaataatgatcgtgtctctagtgctaattagaaccaaatttctgttttccgatttgtattgtgcttagggcgaaaatataacactagaataaacttatctaaagtaaaatacatctataacgactaagtaaattcaatttaaaatttaaattaaatatttatatacagcatacataaatacaaatatattcgtatttagcgcgtagttagtcgcaattgaaatgaattacacacggaggcaaggtggcattgtaggcttaaattaaaagtaatttcgtgaagcaaactaaaatccgtatttaaatggtataatactaggaaattatctggaaactgtaatatacataatatgtgtatgtacgtcggagaaataatttttgtttctgttatcgtgggaagatcacatatatgttaatataaattttgtaaacagtgtaactatgtacagaactatgtgagctatatgcacacggcaaaaagaccctaagtcgtggggaaggagatgggaatgagccggaaaaccatcgatgtcacaaaatcggtgtttttccagcttcacgctcaactgtttaggtaattctaatatacagtttaacgctaattatcattatttatcattctcattatgcttttcgtttacctatttgccctataatgaaatgtataagacttgagctaccctaataaaagaacgaattttaaattatatttttattttgtaagggctaccactaaaaactcaacagtcgttcaaagattgtcaagattggcggtcgttgtctctccaactgactccaattgaatgtgtgtaaaacaagtcttatacaaagatatatgtaatagatgtaagacagactgcaaagtttcttgaaacaaattagttaaatgttgtaaatgtctaagttgctaccactgctactactagaacgcgcccatcccctcccatatttacctttaagctacagtaattaagtgatgagcagaggtgtagagtaaggagtcgaagttgaaagaaagcaaaaaatacattttgtacatacatatcgccgttggtcgatatacatctaaacataatttaattttttgttacttttaagtaaattatttttggcgacctaagtaaattaaaattaacgcaatatgcaacaacacacataagtatacaattaattaaattaaacgaaaattacgatttattaaacgatgtcatagaacggagagccactgatagtgagagaaatctgtaaaataaatatttaaacaaattatatattatctatatatgagtaccagaacaagaatgtcaaaaaagagaagcatgtaaa

SEQ ID NO: 28176 - protein, 539 aa, DROSOPHILA
MHQMTNVPGFVNLSCTFQDQRSLYFVMTYARKGDMLPYINRVGSFDVACTRHYAAELLLACEHMHRRNVVHRDLKPENILLDEDMHTLIADFGSAKVMTAHERALATEHCSEQRRSNSDEDDEDSDRLENEDEDFYDRDSEELDDGDDEQQQEEMDSPRHRQRRYNRHRKASFVGTAQYVSPEVLQNGPITPAADLWALGCIVYQMIAGLPPFRGSNDYVIFKEILDCAVDFPQGFDKDAEDLVRKLLRVDPRDRLGAQDEFGYYESIRAHPFFAGIDWQTLRQQTPPPIYPYLPGVSQDEDFRSSYTVPGDLEPGLDERQISRLLSAELGVGSSVAMPVKRSTAKNSFDLNDAEKLQRLEQQKTDKWHVFADGEVILKKGFVNKRKGLFARKRMLLLTTGPRLIYIDPVQMIKKGEIPWSPDLRAEYKNFKIFFVHTPNRTYYLDDPEGYAIHWSEAIENMRKLAYGDPSSTSAVSCSSGSSNSLAVISNSSAASSSNSPTVKRSSPVNAPQASTASDNRTLGSTRTGTSPSKKTASK

SEQ ID NO: 28177 - DNA, 6172 bp, DROSOPHILA
acctaaccaatcgggaaaaaacacagaatatcagagtagagccgcaagtgaattaataatgtgactttttttaaattaaggtgaagaaaaaggccaggcatgcgaaagcatccagaaaaaagaaggtgaaataggtaatgtgtttattgcataggatcggaatgataatcatcgtttttttgttacattttgctgcgcaacaaatttttgaaggtcaattctgtttttacgcacccatttgtgctgctctatcgcttgggaaatttaaaacgcgtaaaaaacattttcgttcggttctttttgatttctcgattattgattgttgttgctaccgctgtgctgtgttaatcttttaattgctgtattttgtttttcttctttgtgtttattttgttgctactcgaccgacgacttatcgcccccgatgttttttagacaggattccgattcaatttcgtattctattggatttttccctgttctgtttgccctcttttgccgcgaatagttgttttgatcttgatagagggacctccaaaaaataaatgcaaatttatcttgaactttatttttggcaatagacttataatagtatgaaaagttgacagatatggttggggctaatttattatttttagcattattttcaacagatttgtgattttccgttgcgattgtcagccaaaggctggctattcgtgattggaaaataaaataagggcgggcagaaacaaaagggaaactactgataagcggtcaaaactctctcacaatcattataaccgttaaccccgcacgggagggtgtgggatgcaagtttgaaacaccgtttcatacggcccaactgtgtagttcctcttgcgcctttggatctctcactctccgtctctcccactaactctccctctttactctctctccttccctctctctcttttcgcgaattccagttcaataaccagttttaaatttatttagctctgaacgagatggagttcataagttctgtgcttgctgtggttttctgggggaccggaaagcggaaaaggggcggaagtcaaaaacaagtttctctaagggcgctcgctttcatttgtctcgctgttaattaaacaatttgatctgagttctgacatcaaaattccactctcgtctctttattgtttcaccgtctttctttcataatagaagtctgtccgcactaaaacctttctatttcaacaggtcataaaagggtcgcaagaaatttctgattggaccacaaaaatttagggggaagtccatcagactgaaaatttggtcgcattttgccaaaaaaaaaaaaaaaaatgtgtgctgctagctggtttgtgtgctgttttattattctcacgcgttcactttgtgtgcttatacctacatatatagcatttttaaattcaattatttaatcacttgcattggtatacgtatatctatgcctttgcagttgccaagagctgtttccgcaagcaaaatgtggtttgcccgcaactctgacttaccgatagttgcctgcactaagtaaaaatattgtggatactaggttctagaaacatgaattcttcaattaaatatgtatgtaatttcatctacacttgtagataccatattaactccaatctgaccctatcgttttcgatcttctccttgcagttaaagtatgcgagaagcggctgatcctgcgcgaacggaagcaggactacatcaagcgtgaacgcgaggtgatgcaccagatgaccaacgttcccggcttcgtaaacctgtcgtgcaccttccaggaccagcgttctctttactttgtgatgacgtacgcgcgaaagggcgacatgttgccatacatcaaccgcgtgggtagctttgacgtggcctgcacgcgccactacgctgccgagcttctgctggcctgcgagcacatgcaccgccgtaatgtggtgcaccgcgacctcaagcccgagaacatcctgctcgacgaggacatgcacacgctaatcgccgacttcggttccgccaaggtgatgacagcccacgaaagggctctggccacggagcactgttcggagcagcggcgcagcaactccgatgaagacgatgaagacagcgaccgcctggaaaacgaagacgaagacttctacgatcgcgattcggaggagttggacgacggcgacgacgaacagcagcaggaagagatggactccccacgccatcgtcaaaggcgttacaaccgtcaccgaaaggcaagctttgtgggcactgcccagtacgtttcaccggaagtgctccaaaatggacctataaccccggcggcggacctgtgggcactgggatgtatagtttatcagatgatcgccggcctaccgccattccgtggcagcaacgattatgtcatttttaaagagattcttgactgcgccgtggacttcccgcaaggctttgataaggacgccgaggacctggtgcgcaagctgctccgtgtcgatccgcgagaccgcctgggtgctcaggacgagtttggatattacgaatccattcgggcgcacccattcttcgccggcattgactggcagacgctccgtcaacaaacccctccccccatctacccatacttaccgggcgtaagtcaggatgaggacttcaggtccagctatactgtgcccggggatttggagcctggccttgacgaacggcagatatcgcgactgcttagtgcagaattaggcgttggcagcagcgtggccatgcccgtcaagcgatcgaccgcaaagagtaagtgtccacgtggtgccccagaaaaatacgttggctaatgaatgtattgtttttcttcagactctttcgacctgaacgatgccgagaagctgcagcgtctcgagcaacaaaagactgacaagtggcacgtttttgccgacggcgaagtgatcctcaagaaggggtttgtcaacaagcgcaagggtctgtttgcccgcaagcgaatgctccttctgaccacgggaccgcgactcatctatatcgatcccgtgcagatgatcaaaaaaggagaaattccgtggagcccagatctccgagcggagtacaaaaacttcaaaattttttttgtccatacggtaagtgtttacctatggtgggataaggatgcacgaggcgcaactcggaaaaccgagaaagcataagtttgttgaaccgatgacatcacagcttatagttcgtagccagtcacacgcctactgaaaagcaatttgagcgttagtttatgtcccgggcacgtgttggctatgaaagcaaattaaatgcggcattgaaaactgcacacgcaaggcagataaaaactcaaacttgtttggtgaatgggtttaaaattagcgttgcgctcaactaattttactcttttggtttcattgcagccaaatcgaacctattacctggatgatcccgaaggctatgctatccactggtcggaagctattgagaacatgcgcaagttggcctacggagatccctcctccacatctgcagtgtcctgctccagcggcagcagtaatagcctggctgtcatctcaaattcatccgccgcctcctcaagcaattcgcccacggtgaaacgcagttcccccgtaaacgctcctcaagcttcgacggcgtctgacaaccggacattgggtagcaccagaacggggacgtcacctagcaagaagacggcgtctaagtaaacgtagtcctatttatagcaatgtgaaattaatttagttgaaatttagtgcaaacgaagcgatggcgtagaagagggcgggaatagaagtaagcttagaagtagaagtaagtgatgaaggggaaataatgatcgtgtctctagtgctaattagaaccaaatttctgttttccgatttgtattgtgcttagggcgaaaatataacactagaataaacttatctaaagtaaaatacatctataacgactaagtaaattcaatttaaaatttaaattaaatatttatatacagcatacataaatacaaatatattcgtatttagcgcgtagttagtcgcaattgaaatgaattacacacggaggcaaggtggcattgtaggcttaaattaaaagtaatttcgtgaagcaaactaaaatccgtatttaaatggtataatactaggaaattatctggaaactgtaatatacataatatgtgtatgtacgtcggagaaataatttttgtttctgttatcgtgggaagatcacatatatgttaatataaattttgtaaacagtgtaactatgtacagaactatgtgagctatatgcacacggcaaaaagaccctaagtcgtggggaaggagatgggaatgagccggaaaaccatcgatgtcacaaaatcggtgtttttccagcttcacgctcaactgtttaggtaattctaatatacagtttaacgctaattatcattatttatcattctcattatgcttttcgtttacctatttgccctataatgaaatgtataagacttgagctaccctaataaaagaacgaattttaaattatatttttattttgtaagggctaccactaaaaactcaacagtcgttcaaagattgtcaagattggcggtcgttgtctctccaactgactccaattgaatgtgtgtaaaacaagtcttatacaaagatatatgtaatagatgtaagacagactgcaaagtttcttgaaacaaattagttaaatgttgtaaatgtctaagttgctaccactgctactactagaacgcgcccatcccctcccatatttacctttaagctacagtaattaagtgatgagcagaggtgtagagtaaggagtcgaagttgaaagaaagcaaaaaatacattttgtacatacatatcgccgttggtcgatatacatctaaacataatttaattttttgttacttttaagtaaattatttttggcgacctaagtaaattaaaattaacgcaatatgcaacaacacacataagtatacaattaattaaattaaacgaaaattacgatttattaaacgatgtcatagaacggagagccactgatagtgagagaaatctgtaaaataaatatttaaacaaattatatattatctatatatgagtaccagaacaagaatgtcaaaaaagagaagcatgtaaaaataaaaaatatattacgagtaaaacaaaaaaagataatcgagcgaaaggaacgtatcattaacaggaaaaattaaagaaaaatacaaaaacatttcaaagtaacaaaattacgataaaatttgtttttattttggttcgtttggttattacaattggcaatatctaactgattgggtaataagtgcgcgtatcccagtatccaacgttgcaaaatgatacaacatttcaataggtttcaaaatctacgtaagatacacataaaacgacctgactactttgttctaccctacgcttgtgctgcagtacctaaaatcgaagaaagagtacagtgaacagggctaagatatagaaagacagctctatttctgcaatccaaaaagggcttgccctaattaaaataattgcaaatgcattgcgcttcaaatccagaagccttttttaccttttatagcctacaggaaaaaagaaaaaagaggagataacggaaagacccataaaatcgaaaagtgcataggtaaacctgtaggacgattagtggaatactaaaatcatcatatgttttaatcaataagtattccaattttaccaggggcaagtgtatgcgaattctttcagtacgagtatttaatatatttatttttatcataattgtataaaaacctgaagctccaaaataacttgatcattttgagaaaaatattaataaaaattatttttttgtttattttcttattatttagttacatataattttattttatgtttatgtttttataatttttattttattattcattatattataataaatagattcgttgaatagtattaatattggatttgaatgcagcgatgcgttttacgcatttcaaatccgaaactcgcttagatcacacgacgtaactttataagatatataaatcaaaaataactgttattttgaaagagaaaaaatgatgttgtttgaaataaaggaacaaaaaagcgaaaaacagaaa

SEQ ID NO: 28178 - DNA, 3443 bp, DROSOPHILA
aagttctgtgcttgctgtggttttctgggggaccggaaagcggaaaaggggcggaagtcataaaagggtcgcaagaaatttctgattggaccacaaaaatttagggggaagtccatcagactgaaaatttggtcgcattttgccaaaaaaaaaaaaaaaaatgtgtgctgctagctgttgccaagagctgtttccgcaagcaaaatgtggtttgcccgcaactctgacttaccgatagttgcctgcactaagtaaaaatattgtggatactaggttctagaaacatgaattcttcaattaaatatttaaagtatgcgagaagcggctgatcctgcgcgaacggaagcaggactacatcaagcgtgaacgcgaggtgatgcaccagatgaccaacgttcccggcttcgtaaacctgtcgtgcaccttccaggaccagcgttctctttactttgtgatgacgtacgcgcgaaagggcgacatgttgccatacatcaaccgcgtgggtagctttgacgtggcctgcacgcgccactacgctgccgagcttctgctggcctgcgagcacatgcaccgccgtaatgtggtgcaccgcgacctcaagcccgagaacatcctgctcgacgaggacatgcacacgctaatcgccgacttcggttccgccaaggtgatgacagcccacgaaagggctctggccacggagcactgttcggagcagcggcgcagcaactccgatgaagacgatgaagacagcgaccgcctggaaaacgaagacgaagacttctacgatcgcgattcggaggagttggacgacggcgacgacgaacagcagcaggaagagatggactccccacgccatcgtcaaaggcgttacaaccgtcaccgaaaggcaagctttgtgggcactgcccagtacgtttcaccggaagtgctccaaaatggacctataaccccggcggcggacctgtgggcactgggatgtatagtttatcagatgatcgccggcctaccgccattccgtggcagcaacgattatgtcatttttaaagagattcttgactgcgccgtggacttcccgcaaggctttgataaggacgccgaggacctggtgcgcaagctgctccgtgtcgatccgcgagaccgcctgggtgctcaggacgagtttggatattacgaatccattcgggcgcacccattcttcgccggcattgactggcagacgctccgtcaacaaacccctccccccatctacccatacttaccgggcgtaagtcaggatgaggacttcaggtccagctatactgtgcccggggatttggagcctggccttgacgaacggcagatatcgcgactgcttagtgcagaattaggcgttggcagcagcgtggccatgcccgtcaagcgatcgaccgcaaagaactctttcgacctgaacgatgccgagaagctgcagcgtctcgagcaacaaaagactgacaagtggcacgtttttgccgacggcgaagtgatcctcaagaaggggtttgtcaacaagcgcaagggtctgtttgcccgcaagcgaatgctccttctgaccacgggaccgcgactcatctatatcgatcccgtgcagatgatcaaaaaaggagaaattccgtggagcccagatctccgagcggagtacaaaaacttcaaaattttttttgtccatacgccaaatcgaacctattacctggatgatcccgaaggctatgctatccactggtcggaagctattgagaacatgcgcaagttggcctacggagatccctcctccacatctgcagtgtcctgctccagcggcagcagtaatagcctggctgtcatctcaaattcatccgccgcctcctcaagcaattcgcccacggtgaaacgcagttcccccgtaaacgctcctcaagcttcgacggcgtctgacaaccggacattgggtagcaccagaacggggacgtcacctagcaagaagacggcgtctaagtaaacgtagtcctatttatagcaatgtgaaattaatttagttgaaatttagtgcaaacgaagcgatggcgtagaagagggcgggaatagaagtaagcttagaagtagaagtaagtgatgaaggggaaataatgatcgtgtctctagtgctaattagaaccaaatttctgttttccgatttgtattgtgcttagggcgaaaatataacactagaataaacttatctaaagtaaaatacatctataacgactaagtaaattcaatttaaaatttaaattaaatatttatatacagcatacataaatacaaatatattcgtatttagcgcgtagttagtcgcaattgaaatgaattacacacggaggcaaggtggcattgtaggcttaaattaaaagtaatttcgtgaagcaaactaaaatccgtatttaaatggtataatactaggaaattatctggaaactgtaatatacataatatgtgtatgtacgtcggagaaataatttttgtttctgttatcgtgggaagatcacatatatgttaatataaattttgtaaacagtgtaactatgtacagaactatgtgagctatatgcacacggcaaaaagaccctaagtcgtggggaaggagatgggaatgagccggaaaaccatcgatgtcacaaaatcggtgtttttccagcttcacgctcaactgtttaggtaattctaatatacagtttaacgctaattatcattatttatcattctcattatgcttttcgtttacctatttgccctataatgaaatgtataagacttgagctaccctaataaaagaacgaattttaaattatatttttattttgtaagggctaccactaaaaactcaacagtcgttcaaagattgtcaagattggcggtcgttgtctctccaactgactccaattgaatgtgtgtaaaacaagtcttatacaaagatatatgtaatagatgtaagacagactgcaaagtttcttgaaacaaattagttaaatgttgtaaatgtctaagttgctaccactgctactactagaacgcgcccatcccctcccatatttacctttaagctacagtaattaagtgatgagcagaggtgtagagtaaggagtcgaagttgaaagaaagcaaaaaatacattttgtacatacatatcgccgttggtcgatatacatctaaacataatttaattttttgttacttttaagtaaattatttttggcgacctaagtaaattaaaattaacgcaatatgcaacaacacacataagtatacaattaattaaattaaacgaaaattacgatttattaaacgatgtcatagaacggagagccactgatagtgagagaaatctgtaaaataaatatttaaacaaattatatattatctatatatgagtaccagaacaagaatgtcaaaaaagagaagcatgtaaa

SEQ ID NO: 28179 - protein, 539 aa, DROSOPHILA; identical to SEQ ID NO: 28176

SEQ ID NO: 28180 - DNA, 3993 bp, DROSOPHILA
accaggtaaacgatggcacgtaccaagcaaacagcccgtaaatcgaccggaggcaaggcgccccgcaagcagctggccaccaaggcggcccgtaaatcggcgccatccaccggcggagtgaagaagccacatcgctaccgtcctggaacggtggccctgcgtgagattcgtcgctaccagaagtccacggagctgctcatccgcaagctgccgttccagcgtctggtgcgcgagatagcccaggacttcaagaccgatctgcgcttccagtcggcggccattggagccctacaggtatggtgtacagcactccctgcaccgtgactatttcatacggtcatgtaataatgcgtctctcccccatttcaaatgcgcaatttgcaggaggccagcgaggcgtacctggtcggtctgttcgaggacaccaatctgtgcgccattcacgccaagcgcgtcaccattatgcccaaggacatccagctggccagacgcatccgtggcgagcgggcctaaatgcccatgaccgccatcttggattggaaaagcagtggcggcaaaactaccaacccacagctgtcgcttggaggggggaactcggagctagaggtggaggtggagaagcggaaaaccaaacccccggccgcagctgccgccgcttagtacttaggtctatctatacttaccgataagtaatcaatacacaatgttctaataaaatcgaattcatttttgtttgtaaatgtttaaccacaaaggaaagcgttcattcatatattttgttcagactgtacattattagttgtgtctcttaaattgtaattgttgtcttgctgtctcggcaacaattgaacattaatttgaatggtttcgtacaaaaatacatatattctattgtatcattttgtaaaatgaggtagaccatgtagtaaatgcattcatttttcgttattctagtacatatgtatatctagcatgtactggaatgaaaagtatctttaaactatgtagatttctgtgtggtggtgagctgctcccctggagccaagcagttgaaggtccggacaaaaacaggcagccttgtcagggaatttatgggtgaaccgccctcgacgaaatcgctgccgaaatacagggtttggccgaaggaactctggccaaatctgaagaagaacaattccctcagagacatggtggtgaagttgggctgcctctggctgaacttggaaccttctgcgaagtaggcttcgtggaccaaatggagcacgacgaggtactggtcgcgttggctaagcaaattatcttgggtccatgcgcttacacactcatcgccggcggtagtaatttggttatcgtcgaacaattggagcatattgaccttatgatgtttgcaattaaaaagatcgaaactttttaacatctcaaggccaaagcgaatgcccaagggtgtcactttgaagatatcgtggctgtcgggatcaaatgaagcatctgccagaaagtcgtatgccacataaatcgtatttccattttcctcatacgcagtttcgaagaagaaattcgaaatgggatatgaatggagcatgtatcgccggtctttgaagttcggttggtccagtaagcttagttcggcacgcgttcggtgctccagaacctttaggtgagcagtcgcaagttcctcgtcgtccgcaaattcaagctccttgtagtatcgggttacgaaacgtcgatggcccgcctttcccggcagattgccgatgctcaggctcaggccattcaacttcttctgcagtaaggaaatctcagcgggcggcagcttaagaacgttcctttcgagccggatgtttagctgctggcgtatggcatcaaatatcttgccggcctggttttgatagctacgcagcttcttgcgtcccagaattcgctcctcgaacagcagattgctggcgaattccatggattggcgcattgtagtcacgcatgaatctccatgcttcatgaacgtgaacattatatagaagctgaagcgtgccgttagataattggccaccacctggctcggaacggcagtcatcaaattctggagcccccgtaagtagtacagattctccacatgcactacaaaatccggcgaaaaggggcgtccgaagacgatctccagatacttggttagggacaccccataaatttccaactgccctagactaatccgtttcactggtgctgcatctcgtgcatagtgttcaaatttcatatctgatttgtacatttcttgtatggcattatccagaggcgctatctcctttgccaattttggtggcagaccaatattttgcagcgactctatgaaacggaatagagaatcgtactttttttcaaaaactactatgggttggccactgtcactgttcggatcctgtcttatactcattccaaacatgatgtcattgaagccgtaccgacgcagtcgagccagtgcctccatccactgaaacttctccttgggccacttgcctcctcggggcgtcagaaagggccagttgagatcttctcccggcttcaccagctcaaaatacctcagaagactgggtctctccatggtcgaacagattttgtatagacgctgcaacttttcctcgaagctgtgcttctcgaacacctcgttctcaattccgtcgaagaggagttggaactgatcgctcaccgtcgcaaatgcatgccacttgagattcttttgggaggagttgtagaaattgtgacatggttcgactttttcatccatgtcgtctagcattcgcttcatgatctcgagattgggatttgcagaacatactgtactgcacagaagaagaagcagccagcttaggctgaggtacgatctggattccatcatcttaactcatcaactgatgcggcatttggaagtaatcagcaatgacttctaagaaacctgatgaaattatacgaaattttaaatctgttgttttggcgaattgcggtgtgaccctaaatcgttttgtaccatatgcttaattatgctttttcgtgtcacgacgcacttttttttttccaaactcaccaatcattttatacttgaattatgaaaactataaacaaaactcccagttgttgtaacgaaataaaaaacgaaattcactttgtgtaaaactctgctctgaacaaaagcctttttttttatcagttaatacgtttagcttagcgatttgtgggtatgaagggaaattggtttgaggagagcaaatgcataaattcacttaaagactatggtgtccagcatggcgcccaggcactgcacaatattgttctgcataaccttgtccaccttctcctccaaatgccgcttggggtcctgcttgcccacgttcttgatcgccagctgctcgggcgtcattttctcctcgtcctccagtgactgcaagaaaatgagggaaatcaatgaaaatccaaaaaaattctagtttttcattaaattggctaaccaaccaataaattaatatctaatgagatgatgaatcacccaccttgttgtagttcttggcgagatccagcatctcggccacggtgtcctcgttgatggaacagtgctcattgtagtcggacaacgtgaggccgtccttccacgactttttgtgcagattgagaagcatcttctgctccagttcgttcttgcggtagtttatgctaatcgagtagtagtggcgattgagcccgtggatcagggcctgtacggagggcttttgcagatgacccaaattggaggttgtctgccggggctcctgtcccagcacaagcatgttgggattgatcaggcggaaggcatcgatgaccactttgcccttgacagactgaatgggatcgacgacgacggctacggctcgctccgacagcgcctcgaaggattgctgcgtattgatgtccacgccggacagccagcagccgaaaccgggatgcgagtgataccagccgacgaccatt

SEQ ID NO: 28181 - DNA, 1993 bp, DROSOPHILA
caattcgccaaaacaacagatttaaaatttcgtataatttcatcaggtttcttagaagtcattgctgattacttccaaatgccgcatcagttgatgagttaagatgatggaatccagatcgtacctcagcctaagctggctgcttcttcttctgtgcagtacagtatgttctgcaaatcccaatctcgagatcatgaagcgaatgctagacgacatggatgaaaaagtcgaaccatgtcacaatttctacaactcctcccaaaagaatctcaagtggcatgcatttgcgacggtgagcgatcagttccaactcctcttcgacggaattgagaacgaggtgttcgagaagcacagcttcgaggaaaagttgcagcgtctatacaaaatctgttcgaccatggagagacccagtcttctgaggtattttgagctggtgaagccgggagaagatctcaactggccctttctgacgccccgaggaggcaagtggcccaaggagaagtttcagtggatggaggcactggctcgactgcgtcggtacggcttcaatgacatcatgtttggaatgagtataagacaggatccgaacagtgacagtggccaacccatagtagtttttgaaaaaaagtacgattctctattccgtttcatagagtcgctgcaaaatattggtctgccaccaaaattggcaaaggagatagcgcctctggataatgccatacaagaaatgtacaaatcagatatgaaatttgaacactatgcacgagatgcagcaccagtgaaacggattagtctagggcagttggaaatttatggggtgtccctaaccaagtatctggagatcgtcttcggacgccccttttcgccggattttgtagtgcatgtggagaatctgtactacttacgggggctccagaatttgatgactgccgttccgagccaggtggtggccaattatctaacggcacgcttcagcttctatataatgttcacgttcatgaagcatggagattcatgcgtgactacaatgcgccaatccatggaattcgccagcaatctgctgttcgaggagcgaattctgggacgcaagaagctgcgtagctatcaaaaccaggccggcaagatatttgatgccatacgccagcagctaaacatccggctcgaaaggaacgttcttaagctgccgcccgctgagatttccttactgcagaagaagttgaatggcctgagcctgagcatcggcaatctgccgggaaaggcgggccatcgacgtttcgtaacccgatactacaaggagcttgaatttgcggacgacgaggaacttgcgactgctcacctaaaggttctggagcaccgaacgcgtgccgaactaagcttactggaccaaccgaacttcaaagaccggcgatacatgctccattcatatcccatttcgaatttcttcttcgaaactgcgtatgaggaaaatggaaatacgatttatgtggcatacgactttctggcagatgcttcatttgatcccgacagccacgatatcttcaaagtgacacccttgggcattcgctttggccttgagatgttaaaaagtttcgatctttttaattgcaaacatcataaggtcaatatgctccaattgttcgacgataaccaaattactaccgccggcgatgagtgtgtaagcgcatggacccaagataatttgcttagccaacgcgaccagtacctcgtcgtgctccatttggtccacgaagcctacttcgcagaaggttccaagttcagccagaggcagcccaacttcaccaccatgtctctgagggaattgttcttcttcagatttggccagagttccttcggccaaaccctgtatttcggcagcgatttcgtcgagggcggttcacccataaattccctgacaaggctgcctgtttttgtccggaccttcaactgcttggctccaggggagcagctcaccaccacacagaaatctacatag

SEQ ID NO: 28182 - protein, 629 aa, DROSOPHILA
MMESRSYLSLSWLLLLLCSTVCSANPNLEIMKRMLDDMDEKVEPCHNFYNSSQKNLKWHAFATVSDQFQLLFDGIENEVFEKHSFEEKLQRLYKICSTMERPSLLRYFELVKPGEDLNWPFLTPRGGKWPKEKFQWMEALARLRRYGFNDIMFGMSIRQDPNSDSGQPIVVFEKKYDSLFRFIESLQNIGLPPKLAKEIAPLDNAIQEMYKSDMKFEHYARDAAPVKRISLGQLEIYGVSLTKYLEIVFGRPFSPDFVVHVENLYYLRGLQNLMTAVPSQVVANYLTARFSFYIMFTFMKHGDSCVTTMRQSMEFASNLLFEERILGRKKLRSYQNQAGKIFDAIRQQLNIRLERNVLKLPPAEISLLQKKLNGLSLSIGNLPGKAGHRRFVTRYYKELEFADDEELATAHLKVLEHRTRAELSLLDQPNFKDRRYMLHSYPISNFFFETAYEENGNTIYVAYDFLADASFDPDSHDIFKVTPLGIRFGLEMLKSFDLFNCKHHKVNMLQLFDDNQITTAGDECVSAWTQDNLLSQRDQYLVVLHLVHEAYFAEGSKFSQRQPNFTTMSLRELFFFRFGQSSFGQTLYFGSDFVEGGSPINSLTRLPVFVRTFNCLAPGEQLTTTQKST

SEQ ID NO: 28183 - DNA, 4155 bp, DROSOPHILA
tgatacgatttggattgaaccgcgacgggagcaggaaaaatgggatgatcagccgagaactcaaaatatactaagggaacattgaaatgcaaggaataagcgtggagatgataatctcgagctcgctactgtattcaggtttggaatttaaacaacaacataaaacatgacactttttacactcccagtatctggaattacgcatagcacgcgaattattcgaactgcaggccatcaaagttgaacgaaagacgaaaagaagaccgcctagcggccggactttaatgcgatgtctgtgtcggacagcccaacccaaacggctacccaaatgcgctagttatattgaaaactctgatgcttgccgtgccaaagttgtttatttggcacaacaatcacataggcacaacagagaggaaaaggcactcaaacggcaggggaaaagattcccaaaacgtgggtcatataaacccaatacttagctcctgctgagccacgttcgctttcagtttttgaggtaggcctacttataggtggtctagttgtctttctaaattctgctagacgactagcttggtctcagctgcccggaccgttacccgctgattacatagtggtatcctttcggatccttatcctggactgtagctgcagctctttgaatttatttcggtatgtaacaggacattttgttggactattggttcaaccgaatcgaatcacgttaaggacgtaggactttggggtaaggtcctgtctcatcaaagttatgaaaattaataaagcaaaataaaagttgtatgcggaattgctttatgttactttgtttttaatcttggacatttcggacttaccgtccattgccttgacactgaacagcttgaagtgttcctgtatatcctaaacggccattgcgcatgcccgaaaaaatttccctgccattttcccgactttcacattcctactcagtcatctttggtccgcaatcgcagtcaaattttcgtctttcggcgacaaggttttccaattgggaattttcaattgtgcagaccatttttgataatagtacatttaagcaagatgtgaaagcaaaagagacggaggaagggcccaaaatagtgagtgccacacccgattgtattctacgactgcctctgtattttttttaaattgccacatgcatagtagaggaaaatcaataaaccacttagctgcaggcagtgtgttgtgtgtgtacttacagtctgttaactgaattaaaccacgtaaagggagtaaaaccaaattatactaatgctcttcatttgcaggtaatcacaccacagcgacacggtgatgtatacatctacaattactcgccaggatcagcgactggatctggagcaagagccgcgcccagcacgccgcagcagcagatctatagcaaccaaagcatctaccagaactttgcaatgatgtccagtcctcgccaaaacgcaagtggcagcgagtttgagacctatgacatacccaagccggccacgcccgttccgctgaactacgacagtcccagaagcggtcttccgaaggcttctaactctacaacgacctccagctccagcctaggcacccggtttgagacactcaagagcgtggccgcatccattgcggaggagtcttacgatgtgccacgacccctgatcttaggcagcaaccagctccagcagcaaatgtcacagatgacgccaagcagttccgcctcctcactgctgaccagcgacagcctctccctgagcttttccagctcgaaccgttcatcgctggccaacatgccggattacgacatccctcgacgaaatccgcttcctgtgcgccgtcaacaaagtgggctgacctacgactttccgctgcctccgttgcaggagcaggttccgcgggtgctgtgcacaccctctaccgtcaccactaccaaagaactgcctctagagctctcctccgcactagaaacactcgcaaagctgcaactgcagactactgcggccattaatcgattgctaagtttcgtagtacccaattggcgcacccgcgctcaactcgagccggccatcatggatctgaagctggccgccctgcgtctgcgcacaacactccacgacctggcagagttcggggagggagccctgggaaacgccacgcgttcggaggaccgaaacctggccctcaagctgcggcccttggtgcgggctttgcgagatgccaacaagctgattcacgactcttccgaatccctcgatgcccagggagcctggtctatagatcagctggccagaagcgacgagaagcacggctgccgacccccggacgcactggaccaactgatggtttgtgcccagacgctcactgaggacgtgcgctcaaccaccagtttcatacagggcaacgcctcgctactttttaagcggcagctgacggtgggtcacaacggaggatcaggaacgggagtgttagagggcagtcggggcagcgctgaatggttggaggactacgactatgtggcctttgagtccaaggatgcagctgccaggaaaaacgaggcgctacgtgaggctattcccgccgacctgaaaacgcagttcgatacggttatccggactgctgagagttcagccatgggcgctgggtctggatcaattccaaccacgcccacggcacgcacgacacctactacgccctgcaagtcgccagagatgaccgacaaagacaagaagctggtgcgctactatgcccaacagatctctactcatatgggaaacttgatgcaggccattgattccttcctggagacagtagaaaagaaccagccgcccaagttcttcattgcatacggaaagtttgtggtcgtgagcgcccacaacttggtgaccataggcgacaacgtttaccgaaatatttcgaaggaggcactgcgggagaaaatcctgcgctgcaccaacgccctctccgatgccctaaaaacgtgcgtcttgaagtcaaagaaggcggcagcccacttccccagcggtagtgcagtccaggaaatggtcgattcggtggtccacatcaacaacctagcccgggacctcaagtcggtcatgctgcaggcagttcatctgtcaacggcggcaggagtgggtgcatgaatggatttcagacaaccagtattagttgagaggcgtgtagccaggtcttccagcattgtccgcggtttggtagatgtagcacatgcattgcatgtgtatctgacatcgacatatcctggcatcagcaaccgagcgccaattgccgcttatattttgcattgtgatattttgagcaaaacatctgaaaatgcacagcaccacagccacaatcgcccgatcgccatcccggccagaactcaggttcgggcaagcataagttacgatattgtacataggacgatgtaaattagcgtattcccaaacccctgtcatgtccgctagcaatattgtattagtgaagcatttcaacatagttttgtatacttatatactctatactctagagcataaacttagccgtaccaccacataaacatctgcctaagttaagcacgcattattatacttgcatagtcagaatctgaaagatttacccccaacattttgaataacgcgccttggcgctactacagtcagcgatatacaagcatatatatataaattgtaaacaaccaagaaattagtatgtaatatgaacaataaactaaagacttcgaataaaataacaataaaccttaaaatattgaaatctgaacgcatcaatttggttacattttatatacatacctgacttttttcttgagactactgatccaacagaaagatctttaacttaaaagcatttcttacaaggtaatttcagcgccgacttttataaaaaagccatcgatggcttagtatgtatcgatagtaatcgatagctctttttgctcttttctttaaacaattgacattcccaatttttccttgagctaaaaacttaataatcgacagtttcagttcaaaatgtacggatttaaagtaattcctaatttgtgacgtttttatttaaaaaattgtaatagaaaaatcagtattgaatgaaatttcagttattcaaatgaagccctattgccttatt

SEQ ID NO: 28184 - DNA, 2074 bp, DROSOPHILA
tctttcggcgacaaggttttccaattgggaattttcaattgtgcagaccatttttgataatagtacatttaagcaagatgtgaaagcaaaagagacggaggaagggcccaaaatagtgagtgccacacccgattgtattctacgactgcctctgtattttttttaaattgccacatgcatagtagaggaaaatcaataaaccacttagctgcaggcagtgtgttgtgtaatcacaccacagcgacacggtgatgtatacatctacaattactcgccaggatcagcgactggatctggagcaagagccgcgcccagcacgccgcagcagcagatctatagcaaccaaagcatctaccagaactttgcaatgatgtccagtcctcgccaaaacgcaagtggcagcgagtttgagacctatgacatacccaagccggccacgcccgttccgctgaactacgacagtcccagaagcggtcttccgaaggcttctaactctacaacgacctccagctccagcctaggcacccggtttgagacactcaagagcgtggccgcatccattgcggaggagtcttacgatgtgccacgacccctgatcttaggcagcaaccagctccagcagcaaatgtcacagatgacgccaagcagttccgcctcctcactgctgaccagcgacagcctctccctgagcttttccagctcgaaccgttcatcgctggccaacatgccggattacgacatccctcgacgaaatccgcttcctgtgcgccgtcaacaaagtgggctgacctacgactttccgctgcctccgttgcaggagcaggttccgcgggtgctgtgcacaccctctaccgtcaccactaccaaagaactgcctctagagctctcctccgcactagaaacactcgcaaagctgcaactgcagactactgcggccattaatcgattgctaagtttcgtagtacccaattggcgcacccgcgctcaactcgagccggccatcatggatctgaagctggccgccctgcgtctgcgcacaacactccacgacctggcagagttcggggagggagccctgggaaacgccacgcgttcggaggaccgaaacctggccctcaagctgcggcccttggtgcgggctttgcgagatgccaacaagctgattcacgactcttccgaatccctcgatgcccagggagcctggtctatagatcagctggccagaagcgacgagaagcacggctgccgacccccggacgcactggaccaactgatggtttgtgcccagacgctcactgaggacgtgcgctcaaccaccagtttcatacagggcaacgcctcgctactttttaagcggcagctgacggtgggtcacaacggaggatcaggaacgggagtgttagagggcagtcggggcagcgctgaatggttggaggactacgactatgtggcctttgagtccaaggatgcagctgccaggaaaaacgaggcgctacgtgaggctattcccgccgacctgaaaacgcagttcgatacggttatccggactgctgagagttcagccatgggcgctgggtctggatcaattccaaccacgcccacggcacgcacgacacctactacgccctgcaagtcgccagagatgaccgacaaagacaagaagctggtgcgctactatgcccaacagatctctactcatatgggaaacttgatgcaggccattgattccttcctggagacagtagaaaagaaccagccgcccaagttcttcattgcatacggaaagtttgtggtcgtgagcgcccacaacttggtgaccataggcgacaacgtttaccgaaatatttcgaaggaggcactgcgggagaaaatcctgcgctgcaccaacgccctctccgatgccctaaaaacgtgcgtcttgaagtcaaagaaggcggcagcccacttccccagcggtagtgcagtccaggaaatggtcgattcggtggtccacatcaacaacctagcccgggacctcaagtcggtcatgctgcaggcagttcatctgtcaacggcggcaggagtgggtgcatga

SEQ ID NO: 28185 - protein, 568 aa, DROSOPHILA
MMSSPRQNASGSEFETYDIPKPATPVPLNYDSPRSGLPKASNSTTTSSSSLGTRFETLKSVAASIAEESYDVPRPLILGSNQLQQQMSQMTPSSSASSLLTSDSLSLSFSSSNRSSLANMPDYDIPRRNPLPVRRQQSGLTYDFPLPPLQEQVPRVLCTPSTVTTTKELPLELSSALETLAKLQLQTTAAINRLLSFVVPNWRTRAQLEPAIMDLKLAALRLRTTLHDLAEFGEGALGNATRSEDRNLALKLRPLVRALRDANKLIHDSSESLDAQGAWSIDQLARSDEKHGCRPPDALDQLMVCAQTLTEDVRSTTSFIQGNASLLFKRQLTVGHNGGSGTGVLEGSRGSAEWLEDYDYVAFESKDAAARKNEALREAIPADLKTQFDTVIRTAESSAMGAGSGSIPTTPTARTTPTTPCKSPEMTDKDKKLVRYYAQQISTHMGNLMQAIDSFLETVEKNQPPKFFIAYGKFVVVSAHNLVTIGDNVYRNISKEALREKILRCTNALSDALKTCVLKSKKAAAHFPSGSAVQEMVDSVVHINNLARDLKSVMLQAVHLSTAAGVGA

SEQ ID NO: 28186 - DNA, 3303 bp, DROSOPHILA
gggtagccttcctagcactgctaaatcgacgcagtgcgaaagtaaaggaaaccattgataatatcctagtgattatactacgcttttgcaagtgagtttacgtcttaaatagtctgctgattcattttattctttaatttaaatgtttttcagagtcattcagtcgcagtcctttattgtggatcaagataattactttgtgcacccccgcttcaaacgtctgcagcaggaagaggctgagttcgagaaattcttgcagtatctcatctatttgggcaacaaggcggccgcttctggttaccaggaggaaatcggtgacctgatttgtattattaactttaaccactattacaaggtatctgggaaccatactggttcctcaatggaggacaaaaagtgctagccaataattgttagatagggaatttatcttgccattaagctgagcttagaacattttaaaaaatatttatgcatgcatggcgtctcctaaatgtaaagcttcggtgaagaaaatcagctttaaaggcatttatttcttagtactatttctttagtttcggttaacagttttgttgtgttgtaagttaatattaattttcaaataaccggctcaaattaaaagaaaataatttaattagtaacatctaatagtgttttaattgaactcgtattaaatgccgaaaaaactgttttgaatatttatccatatcattaatagatttctgtttaatatttaagaaaaacttttaaaagagacaattgtctctaaagtagaatgtacgtattaaatattgtaatgaaaccaatgtcgacatgatttcttgaaactgttgattcgaatttataaataaatgtgcttatttatgtatgtcttaccatatttaatatttaatatttaatatttaattcaaacgtatgtaaggtatcgcttccctatcatctctaagtgactgtgcgcgtacgatgtatcggtattcgctccatccctggtcatgagtcacttcgtgtagaataattcagttttatttttagtttataaaagcgctgcacgcgatcaagaattttatatttttaagtaatttatttcatcgaactataatcaaaaaacatgcaggtaagatggactgttataagcaaattatatttattatccgaacaataaggtttttccatttcgataaatggtaatggtgggtgtgttttggtgcatccaaaaataaaccccatatttggtattgaaaatcatgaatgaaatgaaactcacgtggccttgttgtccataggacccaaacgaagataccgagtggaatgatgtgctccgagccaagggaataattgggcccaaggcgaaggaggcggagatcacagaggatcagatccagaagctgatggacgatgccatccagcggcgcacagatctgccactgaatgaaggccagcgcgacaagaagatcgacgacatgtcgctggacgaactcgacgaactggaggattccgaggacgaggctgttctagagcagtatcgccagcgacgcatcgccgagatgagggccaccgctgaaaaggcgcgatttggatcagtgcgcgagatctcaggacaggattatgtcaacgaggtaaccaaggccggcgagggcatctgggtggtactccacctgtatgccaacggcgtaccgctgtgcgcactgatccaccatcacatgcagcagctggccgtccgctttccacagaccaagttcgtgcgctccgttgccaccacctgcataccaaacttccccgagaagaacctgcccaccatctttatctaccacgagggtgcgctgcgcaagcagtacataggcccactggagctgcgcggcgacaagttgaccgctgaggagctggagtttatgctgggtcaggcgggagcagtgcccaccgagatcacggaggatccacggccgcagatcagggacaagatgcttgccgatctcgaagacaaaagctcggacttctactgagtcatagccaaagcatagccctcatccaactttaagttcagtggggtgggtaaatatttttaggatgaatcatcaagtaaagcccaatccaaaaccggcaagcggatctttttttgcggattcacttaactaacaaatcaaacatttaaacgcagtttgaaacgtaaacatccgccgttgagagcgaacgttattgatttatatattaaccagtcctcaggaatttcccttgcacgttttcatttcattgttttttggcatttatgtaccctcataaataaattgtttacttttctacagaaagtcactatttatgattttgtttggtgctggtagccgttgcttttgccacgctttttggtttaccccgaaaaatgttcggatcaatgatattgtacggatgctcgcaagcgggattcagtactcgtccacgtcgtggctcgtgctcctcgagaagatgaggtgctagcaaaagaaacagctgctctgtccaagagggcaggccacaggtggagaagcacagctcccagtacggcagtcccaagtgcgcgatggccatccgaaggtattcactaaaggtgtccgccaaaaactgccagctcagggtgctcagctctagcagatagaacttgggattgttggaactggtagattcgtacagcatacacacctatcagaggagtattttggaattaatcatcagccttctcttgcgtctgaactacttcgattaagtacacaccttggccacctcgtttacgttgttgatctcaaatattttcgatttggccgttataataggcgtggcattgccccacttgtcttttccggtggcaataggtgctggaagggattgagagctcccggctgctcccacaacatccgagttgctattgggcacagccgtcgaattgctggagtggctcgatgtggtttctatgttctcccgcaaaagggtcacttgcagcaagtgcggaaagtgaatgtgacccacgcgcctaatatcgttggctggaatcaaagcgatatataaaggaaccagaaaactacggagacgaccccactcacgagcatattggtagctccagtttaagataaagccatcagaagataggtagaacttcttcatatcttccgggaggtagacgcagtgcctctgctcccaattcaccaactggcaggcattcagaggttgtcgtcgctccaacgtcacattacatacccttggcacattggctgcatgtttgagaggatccactcttacaggacttcaatcttttgttggtttcatactcacata

SEQ ID NO: 28187 - DNA, 1134 bp, DROSOPHILA
tcacttcgtgtagaataattcagttttatttttagtttataaaagcgctgcacgcgatcaagaattttatatttttaagtaatttatttcatcgaactataatcaaaaaacatgcaggacccaaacgaagataccgagtggaatgatgtgctccgagccaagggaataattgggcccaaggcgaaggaggcggagatcacagaggatcagatccagaagctgatggacgatgccatccagcggcgcacagatctgccactgaatgaaggccagcgcgacaagaagatcgacgacatgtcgctggacgaactcgacgaactggaggattccgaggacgaggctgttctagagcagtatcgccagcgacgcatcgccgagatgagggccaccgctgaaaaggcgcgatttggatcagtgcgcgagatctcaggacaggattatgtcaacgaggtaaccaaggccggcgagggcatctgggtggtactccacctgtatgccaacggcgtaccgctgtgcgcactgatccaccatcacatgcagcagctggccgtccgctttccacagaccaagttcgtgcgctccgttgccaccacctgcataccaaacttccccgagaagaacctgcccaccatctttatctaccacgagggtgcgctgcgcaagcagtacataggcccactggagctgcgcggcgacaagttgaccgctgaggagctggagtttatgctgggtcaggcgggagcagtgcccaccgagatcacggaggatccacggccgcagatcagggacaagatgcttgccgatctcgaagacaaaagctcggacttctactgagtcatagccaaagcatagccctcatccaactttaagttcagtggggtgggtaaatatttttaggatgaatcatcaagtaaagcccaatccaaaaccggcaagcggatctttttttgcggattcacttaactaacaaatcaaacatttaaacgcagtttgaaacgtaaacatccgccgttgagagcgaacgttattgatttatatattaaccagtcctcaggaatttcccttgcacgttttcatttcattgttttttggcatttatgtaccctcataaataaattgtttacttttctacag

SEQ ID NO: 28188 - protein, 203 aa, DROSOPHILA
MDDAIQRRTDLPLNEGQRDKKIDDMSLDELDELEDSEDEAVLEQYRQRRIAEMRATAEKARFGSVREISGQDYVNEVTKAGEGIWVVLHLYANGVPLCALIHHHMQQLAVRFPQTKFVRSVATTCIPNFPEKNLPTIFIYHEGALRKQYIGPLELRGDKLTAEELEFMLGQAGAVPTEITEDPRPQIRDKMLADLEDKSSDFY

SEQ ID NO: 28189 - DNA, 3929 bp, DROSOPHILA
ccacgccatttggatgtcgccagttcacgccggccactttgtaccaccagacagcgctcgccactcggaagtcctctaggttcttctgctccaatgggctcaaaaggctcttaaacagaaaactgtcgccatatcgctcagcctccgtggtgtagttagtgtgcagaacaaacttcgcaaaggcttcgttggaaacctcatacttgtcgatgtagaagtcattcagcttcacctgccgttccggagcctcgcggtcggccggaaagtgcggtttgtcagtacccatgtaaaccgtgcctcccggaagcagtgacatgtccgcaatatttggctccagttcgccatagtaatcccggtagtggctgtgtgcaccctgtgctcgttgctggcacacttgtccggaaatggacggcatatccggggccttccggtcgagcttttggcagccacagtcgctggatacgtcattgaataaaactatccaaataaagaggactaatataattgttgtcatcttaacgtgcagtgtggccctttttagttttggaatcaatacttaatttcgcgaatttaaattccgaacaagccagctttttaatagcatactttaggctgtaacgttttaaacaatttatttcaatttcaacaaccatacttttgggattattattattattataaccatttagtagtagttagaaggttaatgagtgcagttttaccattttaataatatataacctacaatatttaggttttataaaaagttatgtatatgagctaattataatttatcaaagtctggtctttatgttaactttcgtttgtatttgttataaattcttcaatcatgaacaaatttttgggaacggaagacctacaaatgcaaagaccagaaacattaaaaaacgttaagtataagttaaataagtttaaattgttgtatggcgcaaatcggtcttaacaagttgtgatacacagcaatcctaaaagctgcgggctatgcctcgataggcttctcgtgcagccagggccggaatatgggtagtgtggacggatagtgggtgtgcgtgtccggcttaagcaccgattccggccaggtgttggcattgaccgcatcaccggagtgtcgaaaggggtacgtcgcaagcacgataggaagctgtagcttaatctccttctccatggacttgggttcgatcacgaagaagacgtcgtaggatattttgatcaggtggcagccatgaagattggtcggcggcaggggtggaacgtaaagctcgttgtgccactcgtctttggcccccggacggatcttgccacgaactaaaacagccagctcccgtttttccgtttgcaccaccttcccccgcgccaaatactcgatggtctaaataaaatccaaataagatcaaaatggatgaattgtaactagccacttgaaagcgataccgacctcagtgagggatgccttagtccgtttaatggacacattactgtagttggatataaatgcggtgaccagaatattctcgccgggcacatacccaccgcgatcaagggacactctgcactttatctgacctccaccaacacagacgacgcctagcttgtgctcaacttcgcaggtgaacggttgctgagtcaggcgaaaggttagtttttttaaacagggtttttaaagctacttactgctaagatgggcttttcaaggtttaggtcgatgggattcatcacaatgaagacctggtggttcttatggataatgccattgttctcgcggagcgccgccttgcagtagaactgaatccagccgtaccgaccgagaaatgtagatggaagacccagtggcaagccgagtttgaaggggaagctgtgaattcctggcgagagtatagctggacctccttggtctacgtcccccagaagtcgcatccgaaagtcgatatagttctccttatcgtatgtccgctcctgtcgccgcccgttgcgcacgaccccttcgcctaccacatggaaatgaagtcccaaagcaggcgtctcatcctgcaattcgattagaacccgtccggagagaaactggcccgggaagtacaggagggaagtgttgtcgaagatgataaggaatttaagcaacttgcgcggcatcgtgcctctgttttgttgccgatttcattcgtacgcctaaggaaaaaccaacgaaattcgttagaacacggttgccaaatatttgacccgctccgcacgcgtcattatggttaatgacaacttatccgtcatagctggctaggtctgagaccatgtactacggactacggtctcacatacatacggcgcttgtttgcatatttatgtgggtagcatctaggcgggcaaaggaaacaaaaccagtttcgtacggccaagagatggctgcgtgcacaactatgcagcacgaaagccccgaacacttaagcatcaactgcaaggtcggcgcatgaagcatgtcgggcgtgtcacgcccgcgcctacaaatttgggcaaaactccagtatgtacatctttaccaaaagcgtaagctgcaactgcgactgtcggcaagcctgtttggtgcactggtgacaatgttgatgattcctgattgggaaacagaaaccgaaaagaaaactgacgtaatttcctagtggaaagcggattcccaaccgtacactgccattggaatgattacattcaaattgttcaacatttttgtttttatccacaacagatcaattgttttctcttcatccctgtgggcgcacttgaaataatgatcgcttttcaaatacctgtacacacaaaggtgttttttggccagatcggaacaccagtccaaaccgaaccgatttaacccgttctgcctttgagcgatattcgtttggcaagatctcgtccacgctctcgagcgtttgtttggcaactgatcaccgtcgtcgtcatcgtcgtcgtcgttatgcatcagtttgcggacgagagctcgactgaaaaacttgttttgagcgcgtttttgcgagggatcgtttgagagaggcccagccggagccagctgatgtcgtaatgccaataagtagcccgcttttgtttttactatcttttgcattcatgtaatacatggctgaatttacctttccagcgggcttacaggatacgcaaagcgcgtatcttcttgaataaattcaaacggaaaaaactggaacggcaccacagacaacagaagaccaaacgagcatgagaaccaaattgtcacctcaacggttagctaagctgttcaaactgaatcgattataggagcaatttgctaataatatggcaatgctcgcagagtcgccccgctatagctcagcaggtgtatcttgtgttactcggttgcacctagaaaataaatctgtatttccaacaccaagcccatattttacaggtatttatccatagtcgacaaatcgtgtgcagactaaaatggataaagtggcacacatttatgcattatgcatgcatttaataccggttatttgttgttttaaggtacccaaatcgaagaacctcaactgtagctcatgaaaatgaaaggccaaaagccaagcaaactatcactggctgcgaaaaccgaatcggtgaatggctcggcagcctgtggcaagctgtggcaagctatggctataccctgaaaattagtcaaaaaatgagtcctgtggcagataccttgaaaactttattaaaaggaatctgtaggttatccttatgatcgacaaagtataagataatattagaaagagtagagatgcaacgatggtcaaactatatatggactgaagaaatcaatcgttttgaagactatgctggctataagagaaaacaaatcactttcgtatttaacttttccagcttttcatatttcttccaacggcattagt

SEQ ID NO: 28190 - DNA, 1187 bp, DROSOPHILA
aaacgctcgagagcgtggacgagatcttgccaaacgaatatcgctcaaaggcagaacgggttaaatcggttcggtttggactggtgttccgatctggccaaaaaacacctttgtgtgtacaggcgtacgaatgaaatcggcaacaaaacagaggcacgatgccgcgcaagttgcttaaattccttatcatcttcgacaacacttccctcctgtacttcccgggccagtttctctccggacgggttctaatcgaattgcaggatgagacgcctgctttgggacttcatttccatgtggtaggcgaaggggtcgtgcgcaacgggcggcgacaggagcggacatacgataaggagaactatatcgactttcggatgcgacttctgggggacgtagaccaaggaggtccagctatactctcgccaggaattcacagcttccccttcaaactcggcttgccactgggtcttccatctacatttctcggtcggtacggctggattcagttctactgcaaggcggcgctccgcgagaacaatggcattatccataagaaccaccaggtcttcattgtgatgaatcccatcgacctaaaccttgaaaagcccatcttagcacaaccgttcacctgcgaagttgagcacaagctaggcgtcgtctgtgttggtggaggtcagataaagtgcagagtgtcccttgatcgcggtgggtatgtgcccggcgagaatattctggtcaccgcatttatatccaactacagtaatgtgtccattaaacggactaaggcatccctcactgagaccatcgagtatttggcgcgggggaaggtggtgcaaacggaaaaacgggagctggctgttttagttcgtggcaagatccgtccgggggccaaagacgagtggcacaacgagctttacgttccacccctgccgccgaccaatcttcatggctgccacctgatcaaaatatcctacgacgtcttcttcgtgatcgaacccaagtccatggagaaggagattaagctacagcttcctatcgtgcttgcgacgtacccctttcgacactccggtgatgcggtcaatgccaacacctggccggaatcggtgcttaagccggacacgcacacccactatccgtccacactacccatattccggccctggctgcacgagaagcctatcgaggcatag

SEQ ID NO: 28191 - protein, 342 aa, DROSOPHILA; identical to SEQ ID NO: 15519

SEQ ID NO: 28192 - DNA, 3367 bp, DROSOPHILA
ggccgcacttaaatattgtacaccgcctaaacgtaccccagatgatttgcacaccttaacgaaattagcgaatgagcgcaagtacaatgcgaaaaaggccggagaggactctggtaacttgtacttcaaacgatatgttcacaacaagcagggcatatacatgcgagctgtggtcattgaaatatttcagcatatgatgaacgtagttactctggagtcgggccacgttataagcattaactacaaaatgcaaaaggtcctcgtagacacacacggcgtacccaattacattcttattgccgagcgcaacttaaagcagtcacctaggaagttgcagctgctttccgtggtccccatatgtctgatcatttgggaccaaaaactaactggatttttaaagatggaagaacaaatttaggaaaaaaaggagcagacgagcagatgtaattcttcgcataggaacaacccaaagcaactgcaccgtattttttcaataagccaaaaaagtttataactacacacagagggaacatcaattttgtttaagagattccttctgtttcagtgtcgttaaatgaaaaatcaaaaaaatcgaaaaatacttgttagtccaaactcacttttttgaaccacattgtgggtccgagctttatgcttgacaaaaattgactctgtgatgcttcctttttcggtttgcatatcataataagcttgtaaaaatgtatgtacatatgtgctatgtaaaatcaaggcttaactgcttatcaataaaacaatcaagttaaccgaaaatgatttggatcatgctgacaaatgttaatcgaaaataaaggtcaattggggtcattggcgataatgttaacggcgaaagtttaaagcatgaggttttttaaattaaatttgcattgacgcagaagtatcgtctgaaatgtctagattcggaatatttgttaggctgtccaggtcgtataatcaccgattgcagctgacgatttttttaaggcattttcctgctgttagttggacttattcaaagccaccctcatccgataatataagaaaactacagtctaggctccaatgcacgcaatcctgcctaaccacccctgagtacaatcccgtctggagtagtgatatggtgagctacgacaataaaagcaaattgaactgcgcaatcaagtgcgggttaagtaagtacacacacaatatctgcacaagtctccagatcggatcgttctaaaactacatccacttgtatcgttgtaaaactacatccatgtctaatctaaaccggcccggacgagtacgctagttatcctgatttggaatatatgtatatatacaagccgtaaagaaagcacttgccttacttttagtaagttaaatttggagctgcacatatgtattctcctgaacatgtaagtacctcaggtacaattcgcactaaatgttaacataaagacatgtatgtatgtatgtgcatggataaatatgcatgtgcatattttttttaaaacattgttcacagaatgcgtgtactggttttaaattccaattcctgaatttacggattttgctaacagtcgaaagcgaaaggcgctttcaagtttcaaagaatcaattgcgttaatctggtaggcaaccggcctataaataggcgtcactgggtttccggggacctcagaagtgcctggtagctcaagcgaagcggaaccaacaaactcccgaaatggattggatcaaaatatttggtagatgttgtgacgacttgagatcagcgatattaacttagactctagtttcaggtcttgccctgctattgattgggatggcgcagtgctacccgcagttcgatagcgaaaacccctggttgaggcctcggcaacccactgaacctacgatatctccgaatgcggggggcagtaccccggccaacgctgctccaccaaccacccagtcaccgcgctatttcgcctgtttccattcatgcccggccaccagcgagtacaatccaatctgcggcagtgataacgtgaactactacaatgaaaacaagttcaactgcgccttgaactgcggcctaagtgagtatataggctgcgtgcctccccagattcctttctaaaacgatgtatgtacacatggatgccttcttcattatagacatccggaaggtgcacaagggaatttgtcagacttagtctagatcgcttgaattcagttcacttgtgtatgtaagcatgaacgtattgcaaatactctattcatcgtctgatcgatgacatcagcgaatataaatatgtatatatgtacgtacataaataaaaacttagcgctgttactggtatatggacggtgtatgaccccaaaaaactcagaatctcttgcttccaatcagtcacagtcgggttgcttgtctgttcgcctgtagcgctaaagtctccatcatctattacctatttattgaggctttgtaaaattaaagaaaatggtttacatatgcagtaagtcgaggccatacattaatatatacataagatgtatatgtacatattgcatatatacgtaccttgcgttcatcccactagcagctcttgtggtgttgatctttcccgtcttgttgttgggtgcaccatgggaagggtcgcatcctaagtctcaggtggaatacatcagcaacgacaagagagttgattctggcttcgccaaccccaatatcgtgcccatcacccagccgtcggtcgtaacgcaaacagctcctcctccgccgccaaattccaaaaactttgcatatagtccgatgacgcagagctggaccctcattgcgccaggcgatccgctgcccaataatgacaccctcgtctggaaccagagcaatgacaaatggctcactcgctaagcaatgcaaccatcgatggctttgctttaatcattgtgtattactattgaaataaatataactaattcactgtaggacttagcggtggcgacggatgtggctggaggccacagactgaccctgctgccgcagccggcacaactcgtcggtactgtagttcagcttgcgggttgcgttttctgagaaacgctcgaacttggccactaggtccaccagttgcgtcttgatcgcctgcacctcggcgagcactgcgcttaggacattagcctgattcttcatctgtactgttccctccgcctcctggcggaactgctgcggcacatttgtagcggatcgggggcgcaaaagctcgtgcatgtgaaataaattctgtggagtcttctttgtggtccccgtggcaggttctggcttgaggaaatccgtgtggagcggctgctgctgacgctgtagactgcggctgaaaatgtt

SEQ ID NO: 28193 - DNA, 1130 bp, DROSOPHILA
aggcattttcctgctgttagttggacttattcaaagccaccctcatccgataatataagaaaactacagtctaggctccaatgcacgcaatcctgcctaaccacccctgagtacaatcccgtctggagtagtgatatggtgagctacgacaataaaagcaaattgaactgcgcaatcaagtgcgggttaagtaagtacacacacaatatctgcacaagtctccagatcggatcgttctaaaactacatccacttgtatcgttgtaaaactacatccatgtctaatctaaaccggcccggacgagtacgctagttatcctgatttggaatatatgtatatatacaagccgtaaagaaagcacttgccttacttttagtaagttaaatttggagctgcacatatgtattctcctgaacataatgcgtgtactggttttaaattccaattcctgaatttacggattttgctaacagtcgaaagcgaaaggcgctttcaagtttcaaagaatcaattgcgttaatctggtaggcaaccggcctataaataggcgtcactgggtttccggggacctcagaagtgcctggtagctcaagcgaagcggaaccaacaaactcccgaaatggattggatcaaaatatttgtttcaggtcttgccctgctattgattgggatggcgcagtgctacccgcagttcgatagcgaaaacccctggttgaggcctcggcaacccactgaacctacgatatctccgaatgcggggggcagtaccccggccaacgctgctccaccaaccacccagtcaccgcgctatttcgcctgtttccattcatgcccggccaccagcgagtacaatccaatctgcggcagtgataacgtgaactactacaatgaaaacaagttcaactgcgccttgaactgcggcctaaacatccggaaggtgcacaagggaatttgtcagacttagtctagatcgcttgaattcagttcacttgtgtatgtaagcatgaacgtattgcaaatactctattcatcgtctgatcgatgacatcagcgaatataaatatgtatatatgtacgtacataaataaaaacttagcgctgttactggtatatggacggtgtatgacccc

SEQ ID NO: 28194 - protein, 114 aa, DROSOPHILA; identical to SEQ ID NO: 456

SEQ ID NO: 28195 - DNA, 2674 bp, DROSOPHILA
ttgcatatcataataagcttgtaaaaatgtatgtacatatgtgctatgtaaaatcaaggcttaactgcttatcaataaaacaatcaagttaaccgaaaatgatttggatcatgctgacaaatgttaatcgaaaataaaggtcaattggggtcattggcgataatgttaacggcgaaagtttaaagcatgaggttttttaaattaaatttgcattgacgcagaagtatcgtctgaaatgtctagattcggaatatttgttaggctgtccaggtcgtataatcaccgattgcagctgacgatttttttaaggcattttcctgctgttagttggacttattcaaagccaccctcatccgataatataagaaaactacagtctaggctccaatgcacgcaatcctgcctaaccacccctgagtacaatcccgtctggagtagtgatatggtgagctacgacaataaaagcaaattgaactgcgcaatcaagtgcgggttaagtaagtacacacacaatatctgcacaagtctccagatcggatcgttctaaaactacatccacttgtatcgttgtaaaactacatccatgtctaatctaaaccggcccggacgagtacgctagttatcctgatttggaatatatgtatatatacaagccgtaaagaaagcacttgccttacttttagtaagttaaatttggagctgcacatatgtattctcctgaacatgtaagtacctcaggtacaattcgcactaaatgttaacataaagacatgtatgtatgtatgtgcatggataaatatgcatgtgcatattttttttaaaacattgttcacagaatgcgtgtactggttttaaattccaattcctgaatttacggattttgctaacagtcgaaagcgaaaggcgctttcaagtttcaaagaatcaattgcgttaatctggtaggcaaccggcctataaataggcgtcactgggtttccggggacctcagaagtgcctggtagctcaagcgaagcggaaccaacaaactcccgaaatggattggatcaaaatatttggtagatgttgtgacgacttgagatcagcgatattaacttagactctagtttcaggtcttgccctgctattgattgggatggcgcagtgctacccgcagttcgatagcgaaaacccctggttgaggcctcggcaacccactgaacctacgatatctccgaatgcggggggcagtaccccggccaacgctgctccaccaaccacccagtcaccgcgctatttcgcctgtttccattcatgcccggccaccagcgagtacaatccaatctgcggcagtgataacgtgaactactacaatgaaaacaagttcaactgcgccttgaactgcggcctaagtgagtatataggctgcgtgcctccccagattcctttctaaaacgatgtatgtacacatggatgccttcttcattatagacatccggaaggtgcacaagggaatttgtcagacttagtctagatcgcttgaattcagttcacttgtgtatgtaagcatgaacgtattgcaaatactctattcatcgtctgatcgatgacatcagcgaatataaatatgtatatatgtacgtacataaataaaaacttagcgctgttactggtatatggacggtgtatgaccccaaaaaactcagaatctcttgcttccaatcagtcacagtcgggttgcttgtctgttcgcctgtagcgctaaagtctccatcatctattacctatttattgaggctttgtaaaattaaagaaaatggtttacatatgcagtaagtcgaggccatacattaatatatacataagatgtatatgtacatattgcatatatacgtaccttgcgttcatcccactagcagctcttgtggtgttgatctttcccgtcttgttgttgggtgcaccatgggaagggtcgcatcctaagtctcaggtggaatacatcagcaacgacaagagagttgattctggcttcgccaaccccaatatcgtgcccatcacccagccgtcggtcgtaacgcaaacagctcctcctccgccgccaaattccaaaaactttgcatatagtccgatgacgcagagctggaccctcattgcgccaggcgatccgctgcccaataatgacaccctcgtctggaaccagagcaatgacaaatggctcactcgctaagcaatgcaaccatcgatggctttgctttaatcattgtgtattactattgaaataaatataactaattcactgtaggacttagcggtggcgacggatgtggctggaggccacagactgaccctgctgccgcagccggcacaactcgtcggtactgtagttcagcttgcgggttgcgttttctgagaaacgctcgaacttggccactaggtccaccagttgcgtcttgatcgcctgcacctcggcgagcactgcgcttaggacattagcctgattcttcatctgtactgttccctccgcctcctggcggaactgctgcggcacatttgtagcggatcgggggcgcaaaagctcgtgcatgtgaaataaattctgtggagtcttctttgtggtccccgtggcaggttctggcttgaggaaatccgtgtggagcggctgctgctgacgctgtagactgcggctgaaaatgtt

SEQ ID NO: 28196 - DNA, 626 bp, DROSOPHILA
gtagctcaagcgaagcggaaccaacaaactcccgaaatggattggatcaaaatatttgtttcaggtcttgccctgctattgattgggatggcgcagtgctacccgcagttcgatagcgaaaacccctggttgaggcctcggcaacccactgaacctacgatatctccgaatgcggggggcagtaccccggccaacgctgctccaccaaccacccagtcaccgcgctatttcgcctgtttccattcatgcccggccaccagcgagtacaatccaatctgcggcagtgataacgtgaactactacaatgaaaacaagttcaactgcgccttgaactgcggcctaagtgagtatataggctgcgtgcctccccagattcctttctaaaacgatgtatgtacacatggatgccttcttcattatagacatccggaaggtgcacaagggaatttgtcagacttagtctagatcgcttgaattcagttcacttgtgtatgtaagcatgaacgtattgcaaatactctattcatcgtctgatcgatgacatcagcgaatataaatatgtatatatgtacgtacataaataaaaacttagcgctgttactggtatatggacggtgtatgacccc

SEQ ID NO: 28197 - protein, 115 aa, DROSOPHILA
MDWIKIFVSGLALLLIGMAQCYPQFDSENPWLRPRQPTEPTISPNAGGSTPANAAPPTTQSPRYFACFHSCPATSEYNPICGSDNVNYYNENKFNCALNCGLSEYIGCVPPQIPF

SEQ ID NO: 28198 - DNA, 2598 bp, DROSOPHILA
gactggtttcgccatccagatactaattaattggactggaaattttaataaatccgtagatatccgctgaatcagagtgaagcttttgctttgttatcacccagctggcttggtcagcagagtgataacgccacgaaaaaaaaaccgtattatcatctttttgggctgacacgctacacgtaacatggatgacatagtacccgatgtgctggatgcggttcccgctggcaccattaaggtcatctatggcgatgacttggaggtcaagcagggcaacgagctaacccccacccaggtgaaggaccaaccgattgtcagctggtctgggctggagggaaagtccaacctattgaccctgctcatggtggatcccgatgcaccgactcgtcaagatcccaagtaccgtgagattctgcactggtctgtggtcaacattcccggcagcaatgagaatccttctggtggccactccctagcggactacgttggatctggaccgcccaaggacactggcctgcatcggtatattttcctcctctatcgccaggagaacaagatcgaggagacgcccactatatccaatacgtatgatatatattaagatatttatcagtttactgtgacactgatcaattcccattcacagtactcgcacaggccgtttgaacttcaacgcccgggactttgccgccaaacatggattgggcgagcccattgccgccaattattaccaggcccagtatgatgactatgtgccaattcggaataaaacgatcgtaggctagatttgtgcatatatcatgcagggttttcaattccccgtcaataaagtttaaccaattgcttatctcgctatctatgcgttggggtattaactgaaaagtgcacggaactgattaggcggcggactccgtcgataaaaggccagacatcagggatccgggccagagtcaactcgctaacgctacaccgagcagaagcaacagaactaccagctaacatggacaccgccggcattattcccgacatcatcgacgtcaagcccgcctccaaggccaccatcacctatccttccggcgttcaggttgagctgggcaaggagctgactcccactcaggtgaaggaccagcccactgtcgtcttcgatgccgagcccaactccctgtacaccatcctgttggtggaccccgacgcacccagccgcgaggaccccaagttccgtgagctgctccactggctggtgatcaacattcccggcaacaaggtgtccgagggccagaccatcgccgagtacatcggtgctggaccccgcgagggaaccggcctgcaccgctacgtcttcctggtgttcaagcagaacgacaagatcaccaccgagaagttcgtgtccaagaccagccgcactggccgcatcaacgtcaaggcccgcgactacatccagaagtacagcttcggcggtcccgtggccggcaacttcttccaggcccaatacgatgactacgtgaagaccctcatcgagacggtccagtaatctggccaccaactgatcagctctctgtgaaataataaatattaaatatgtactagttctcataaaagttatctcatacatgcttgtgggcgggtcttttgctatgcgatttccataagcagctgaagtatatttttataagaattacttttgataacatttccggaattaatttaaacttgcccgaggctttgatatctttctttgaagttaagtttataaaagcgagagaaagaaatgtttataattaatcatttatttccctttcgctaagttaggagatatggttatttttcaatttatttcgaaatgattcattgaatagataacaatattctttaacttagatatgaatttgattcatcaaaactatcagtttccttttaaaattcgaactttgaacacctgcatgctcatttctgataactgctttcacatataacgaatatccatccaacttcaagttaccattgttaaacaagtaatgagtttggatccatgaaagcttaaatatattggttaatctagttatttttgttaaagaaatcggccaccagtttgttaaactcctccgcataacgtaaatggatattatgcttcccctcggggaactcataatattccgcatgaggcaaacgctccctcagccaaggaatgtgctccgctgctatcatgggatccttctttccgtggagtataaaagtaggtatctttattttctcaacttcggtgcgacagaagtctccatcccgttggtcatagaaggcgcatgcggcgtccacccattcggcccacaattgggggaatctttcgacgccgtaaaccttttccatgggctcacgcatgcgcggcgaccacttggccacatcccgaatgttcttaagagccttgacttcgtcagcgttcaagtaggcacctgctccccagattgctaggcgatccacagcttccgcatggcgacctgcgactatgagcgccgtgatgcccccatcgctccagcccaaaatggagaagcgtggtctgtccagggcacgcatcaaatccacggctgcctgggcatcctcccg

SEQ ID NO: 28199 - DNA, 598 bp, DROSOPHILA
atggacaccgccggcattattcccgacatcatcgacgtcaagcccgcctccaaggccaccatcacctatccttccggcgttcaggttgagctgggcaaggagctgactcccactcaggtgaaggaccagcccactgtcgtcttcgatgccgagcccaactccctgtacaccatcctgttggtggaccccgacgcacccagccgcgaggaccccaagttccgtgagctgctccactggctggtgatcaacattcccggcaacaaggtgtccgagggccagaccatcgccgagtacatcggtgctggaccccgcgagggaaccggcctgcaccgctacgtcttcctggtgttcaagcagaacgacaagatcaccaccgagaagttcgtgtccaagaccagccgcactggccgcatcaacgtcaaggcccgcgactacatccagaagtacagcttcggcggtcccgtggccggcaacttcttccaggcccaatacgatgactacgtgaagaccctcatcgagacggtccagtaatctggccaccaactgatcagctctctgtgaaataataaatattaaatatgtactagttctcataaaa

SEQ ID NO: 28200 - protein, 176 aa, DROSOPHILA
MDTAGIIPDIIDVKPASKATITYPSGVQVELGKELTPTQVKDQPTVVFDAEPNSLYTILLVDPDAPSREDPKFRELLHWLVINIPGNKVSEGQTIAEYIGAGPREGTGLHRYVFLVFKQNDKITTEKFVSKTSRTGRINVKARDYIQKYSFGGPVAGNFFQAQYDDYVKTLIETVQ

SEQ ID NO: 28201 - DNA, 4105 bp, DROSOPHILA
atgtccaggcggtgacccagggaaacggtcttctcgtaggtcttgcggaaggcagtctctgcggcagccttgtcgccgatgcggcacaagtactctgacttcttaagattcgcctcgcgcacttccatctcgcccagattcttctccgcatcctcgattgccgcatctagctgctccacctctacgcggttgttctccttcattcgcgccagcagatccttgtctacggtccagccgagttccgagcagatgtgctcgtaccacggggccatattctccgtgcgaatcgcctccagaagcttcgccttcaatgccgcatcctgcttgtattccgccagggtaagcaggaacttcgtctgggccagctccaggttcgggttcttctccagaccctgctcctccaagttttcggcaggcattttggtcggatttgttggcttcggttttttaaacacagaaaaatagttgattttcttgacaaaactcaattttgtttttgtcaaatcgcagagtcatgtactaccagtgtgaccccaaaattatcgataaattataccgcatatttttacattgccaaaaataccagagcgatgtccatcaagatagcgacgaaattagaacagtgcaattgccaattgggaatttgtattttaatttatttttaaattctgaaagtaatttaaatttaaaaaaaaaacttgagagctgtctagaaaagaactgatgtttcatgataactttgtcgaagaattaagaaatatttagttgtaaaataattgttgaatctatttttttccaataacacgacttatatattttttgaaaatattcgagctaaatcccaagaagtaaactcaatctgggatttgaagtgcccagaactcgaataaacacttctttttaaataattgtaagaccgtatcacttatggtatatactgacctcgaagggccacactaagggggagtgaaaattgattttctgataaaaattttcgcttgaagctacagcatcgtccactgtccatgtatatatcttatatttgcatataaatatatatattacaccgacttggactaaccatcagatagcgcacaagatgattggcggcctgttcgtctacaaccacaagggcgaggtgctgatctcgcgagtttaccgcgacgacatcggtcggaatgccgtggacgcctttcgggtcaacgtcatccacgcccgccagcaggtccgctcgccagtgaccaatattgcgaggaccagcttcttccacatcaaggtcggtgaacaaagttcctatgtcacaatcaccaaccctcccacttatcatcaaaactcctttcacagagagcaaacatttggctggcggctgtgaccaagcagaatgtgaacgccgcgatggtgtttgagttccttttgaagatcatcgaggtgatgcaatcctacttcggcaagatctcggaggagaacatcaagaataacttcgtgctcatctacgagctgctggatgagatcctcgactttggctacccgcagaacacggactccggcaccctgaagaccttcatcacacagcagggcatcaagtcggccaccaaggaggagcagatgcagataacctcgcaggttaccggccagattggctggcgtcgcgagggcatcaagtaccggcgcaacgagcttttcctggacgtattggagtacgtgaacctgctgatgagcccgcagggtcaggttttgtctgcccacgtggccggcaaggtggtaatgaagtcgtatttgtcgggtaagttagcataaataatctagacattattccttttaataatcgccatgttgtaggcatgcccgagtgcaagttcgggattaacgacaagatcgtgatggagtctaagggacgcggtctctccggaaattcagaggcggaaacctcacgctccggcaagcccgtcgtggtcatcgatgactgccagttccatcagtgcgtcaagctaagcaaattcgagacggagcattcgatcagcttcatcccgccggacggggagttcgagctgatgcgttaccgtaccaccaaagacatttcgctgccattccgagtcatcccgctggtgcgggaggtgggccgcaccaagatggaggttaaggttgtgctgaagtccaactttaagccctcactgctgggccaaaagatcgaggtgaagataccaaccccgctcaatacatcgggcgtgcagctcatctgcctaaagggcaaagccaaatataaggcttcggagaacgcgatcgtgtggaagattaagcgcatggcgggcatgaaggagacacagctgtccgcggaaatcgaacttttggagacggacaccaagaagaagtggactcggccgcccatctccatgaactttgaggtgccattcgcgccgtccggcttcaaggtacgctacctgaaggtgttcgagcccaagctcaactactccgaccacgatgtggtcaaatgggtgcgctacatcggacgcagtggcttgtatgagacgcgctgctagggcgcccaagcatccccatcacggagcaagattatcacaattgaatttaacgagatgaatggagaaagtgttaccgcatctattggtatttcctcaatcaaattgaaccagcagcttatgtattccaagattagttccagcaagtccggaggacgcccgagtagcggatccaccccggacaccctatgccgtataccgcacacactgcctccgcgagcactggttatgcgggcggggcgtgttccccatagacataccactactaggtactatgatttaccctactatgtaaatgtaaactatgttgtttttatatgcgtcgcgggacgtctcacaaatctcacgctcacgtttcacaactctaattattatttgtattatcgtattataaatatatatatatatgtatatttaatcattattttcattgtgcaaagaacaaaggcgataaatgcaactaagcgtatttaatagaccaaaactctgtcagcgctatcaatattgatattcaagtgttaataatattcgaattgtttaataaataaattagcatgatatatactaaaaatgatgtgtttctcattggtgaaagggtatcgttatatggcttttccctatatcgaactgatatgcccaacaatagaacggaaaggtacgattacaacctcataaatgggtgatatacaactttatgatcagcccacaagtgctgtcttcgctatcacgtgtgcacattggttcaagatcagctaaatcctgaaattaacgtcacaattattgatgatgttcaacgaagtgaaaactagtttctagccatgaatcatcgcaccaatggaagtgatctttgcgttttgggaaagcaaaaaagggcctaaaaatgccagttggcataaaagcttgcttatcgtggaaggggcttttcacaattttccatcggcgctagaaatcaacattgtccaatcagttcacccactgcgataaagtttattccgctgtgtccattaaactattatttctaggtgttagctgttgccagcgctggatagccttgactggtttcgccatccagatactaattaattggactggaaattttaataaatccgtagatatccgctgaatcagagtgaagcttttgctttgttatcacccagctggcttggtcagcagagtgataacgccacgaaaaaaaaaccgtattatcatctttttgggctgacacgctacacgtaacatggatgacatagtacccgatgtgctggatgcggttcccgctggcaccattaaggtcatctatggcgatgacttggaggtcaagcagggcaacgagctaacccccacccaggtgaaggaccaaccgattgtcagctggtctgggctggagggaaagtccaacctattgaccctgctcatggtggatcccgatgcaccgactcgtcaagatcccaagtaccgtgagattctgcactggtctgtggtcaacattcccggcagcaatgagaatccttctggtggccactccctagcggactacgttggatctggaccgcccaaggacactggcctgc

SEQ ID NO: 28202 - DNA, 1921 bp, DROSOPHILA
gaagctacagcatcgtccactgtccatatagcgcacaagatgattggcggcctgttcgtctacaaccacaagggcgaggtgctgatctcgcgagtttaccgcgacgacatcggtcggaatgccgtggacgcctttcgggtcaacgtcatccacgcccgccagcaggtccgctcgccagtgaccaatattgcgaggaccagcttcttccacatcaagagagcaaacatttggctggcggctgtgaccaagcagaatgtgaacgccgcgatggtgtttgagttccttttgaagatcatcgaggtgatgcaatcctacttcggcaagatctcggaggagaacatcaagaataacttcgtgctcatctacgagctgctggatgagatcctcgactttggctacccgcagaacacggactccggcaccctgaagaccttcatcacacagcagggcatcaagtcggccaccaaggaggagcagatgcagataacctcgcaggttaccggccagattggctggcgtcgcgagggcatcaagtaccggcgcaacgagcttttcctggacgtattggagtacgtgaacctgctgatgagcccgcagggtcaggttttgtctgcccacgtggccggcaaggtggtaatgaagtcgtatttgtcgggcatgcccgagtgcaagttcgggattaacgacaagatcgtgatggagtctaagggacgcggtctctccggaaattcagaggcggaaacctcacgctccggcaagcccgtcgtggtcatcgatgactgccagttccatcagtgcgtcaagctaagcaaattcgagacggagcattcgatcagcttcatcccgccggacggggagttcgagctgatgcgttaccgtaccaccaaagacatttcgctgccattccgagtcatcccgctggtgcgggaggtgggccgcaccaagatggaggttaaggttgtgctgaagtccaactttaagccctcactgctgggccaaaagatcgaggtgaagataccaaccccgctcaatacatcgggcgtgcagctcatctgcctaaagggcaaagccaaatataaggcttcggagaacgcgatcgtgtggaagattaagcgcatggcgggcatgaaggagacacagctgtccgcggaaatcgaacttttggagacggacaccaagaagaagtggactcggccgcccatctccatgaactttgaggtgccattcgcgccgtccggcttcaaggtacgctacctgaaggtgttcgagcccaagctcaactactccgaccacgatgtggtcaaatgggtgcgctacatcggacgcagtggcttgtatgagacgcgctgctagggcgcccaagcatccccatcacggagcaagattatcacaattgaatttaacgagatgaatggagaaagtgttaccgcatctattggtatttcctcaatcaaattgaaccagcagcttatgtattccaagattagttccagcaagtccggaggacgcccgagtagcggatccaccccggacaccctatgccgtataccgcacacactgcctccgcgagcactggttatgcgggcggggcgtgttccccatagacataccactactaggtactatgatttaccctactatgtaaatgtaaactatgttgtttttatatgcgtcgcgggacgtctcacaaatctcacgctcacgtttcacaactctaattattatttgtattatcgtattataaatatatatatatatgtatatttaatcattattttcattgtgcaaagaacaaaggcgataaatgcaactaagcgtatttaatagaccaaaactctgtcagcgctatcaatattgatattcaagtgttaataatattcgaattgtttaataaataaattagcatgatatatactaaaaa

SEQ ID NO: 28203 - protein, 437 aa, DROSOPHILA
MIGGLFVYNHKGEVLISRVYRDDIGRNAVDAFRVNVIHARQQVRSPVTNIARTSFFHIKRANIWLAAVTKQNVNAAMVFEFLLKIIEVMQSYFGKISEENIKNNFVLIYELLDEILDFGYPQNTDSGTLKTFITQQGIKSATKEEQMQITSQVTGQIGWRREGIKYRRNELFLDVLEYVNLLMSPQGQVLSAHVAGKVVMKSYLSGMPECKFGINDKIVMESKGRGLSGNSEAETSRSGKPVVVIDDCQFHQCVKLSKFETEHSISFIPPDGEFELMRYRTTKDISLPFRVIPLVREVGRTKMEVKVVLKSNFKPSLLGQKIEVKIPTPLNTSGVQLICLKGKAKYKASENAIVWKIKRMAGMKETQLSAEIELLETDTKKKWTRPPISMNFEVPFAPSGFKVRYLKVFEPKLNYSDHDVVKWVRYIGRSGLYETRC

SEQ ID NO: 28204 - DNA, 4840 bp, DROSOPHILA
aacagatgtgcaaattagctgaagaaaaaaggaaagaagctgaaaaatgcaggaaagcggacgaagaacgaaggaaagaggaagctgaaaagtgcaggaaattggaagaagataggaaatgcaaattggctgaagagaagaaaaggaatgaagaagaacttaagataatagaagcagaagtggccaaactggaagctgctgagaaggccaagcgtttgaaggaggaagagaaaaagaaggaagaactaatgaagtgcaagcaacgaaatgaagcgaaaaaaaagagggaagaggctgaaaggtgcaagagaaaggaaagagaaagggagctagctgaaatggaaaacaaatggaaacaggttgcggagaaaagaaagagaaagaaggcagcagagatgtgcaggaaaatagaggatgcaaaagaaaaagccgcggcagaatcggctgataagattctgaaagctgtgtgcgaaaaactaaagcaatctctctcggatccggacaaatcaaaaaagggcaagaaataaagtgaaagctaatggcagatttatatggaacattttaacttttaatacggtgttacacaccgaattccaaattattatataaaactattggaattttttaaattttctagtaaaacaatgtaaagaacgctattgtcgagttatttgactataggcgcgaacggaaaattttcaaatttgggcatatcgataaatattggaaaatacacatttgcttatcggttctttgaaaagtaataatttcatacctgctaaccaaattaaactatgtcattatgcacgttcacacctccactgataagatcgaagtcattgtaatcattggacatcacctctaaaagtcatattttatagagtcaacttttcgaaattaatcgcctacaattgatttcaccacatgatgaagataatgaaatattcgatattaatcgtatgcaagtgatttcaccacatgatgaggaatggcgaaattctaattctcccagctgcttgatgttgacagtatttaaaccaaacaaagggttagtttagagggttcttcatcgcgagaaaaaggtactaccatgtcattgcccacgaccagagccaccacggccacgaccactcacgctgtggtccaggctgtggaaacgtatattcagaaccagaatttgcttggcgagatcgctgagctggacgacatgctgtacgatttggtgtccatgcacaaagacaacgagctggccctgaagcgtgtgctgcagtgcatccacaacctgttgcagacgaacagcaagtataacgtccgctttggcccaaaagtttttcacaaactggtctccgtggtgattgccgacagtcgtgaggattcggccagccggcgtcaactggtggccaatttactggtctgcgtgcagcttcatatacggaagtttccgcgtatcgaagccaagttcgtgctgcagcagctctggtcgctgagtcagagcaatgagcggcaaccacatgcggcccagatcctggtacaccttttcgatgatttcgtcaacaacttgggaacggaatgcgcccaggaactgcttgtgctaacgcggaatcttctacagtctgatgtgcgcgatgatcgacgctcagcgtattttcttatgcacaagctgcaggagatcgacgaagtgcttgccgctctccagtgcagtgaggttcagtggagcgcgtatgtgggcatcatggagaacctcgaggagcagcagtcccatcttgtgctgcccactttaagcaccctgctgccgcgcatgggcctgatgtctaacaatttgagtgaggattggctggattggctaaggattctgtgcatacgcctcctgggcgacaacaacatcctcgtgttgcgctggaccctgaagtacttcctatcccattttagcctagaacagatatcgcgtttcaatcttctaacacaattccttgctgctaccaatcggacgcaattgtacaatccagaggtgcccgattgcctcactaagcagcaaataactgattttagtgcacaattcccggcagagatattgctggaagcgcttgtctgcgttccgtggcatgcagttcccctgatccactggcttcaagcatgggagctaaagcagctgccggtggtttccaaggagctgctgtttaagttgggcgctcgcgttcgttccctccaaaatccggttttgcgtggtgaagccatcaattatgtgattttctccttaagtgtaagtttaacttatatagaagttttaacaattttttgactttaatcccattaaaggcgacgattgacagcctgtcattgggagattacctcctcttcatggagtctttgtacaataccatcgaccggtatcaatctcattcacaactagcacagaaaataagaaattgcagcaatttagaaaaacatattgctagtttcaacattcgttgctgtgaacttgtatctcaaatggactataaacacgatgtatttgttgcgttcttggagaaattacgaacagttccaaaatccaaacatggctggtggcgacttttacccatatttctgcatcgggaactggatcatccagaacagtatttagatttctatcgctctgtctatgatttagatacatcttttcttgaaagtggtgtgagtctagagcagatgcagcagcaccttcttaatcgattggattgccagaccagagaagagaagtcctttgtgctcgagcactctgtggatcttttcgtacagataaatcttccaacgtggagcaagttagaagtacttaacctaaatcccctggaacttttggatcggggtactgaagaaacatttgccaccttgtcgaatatattgtccacgcatgatgaacaattggctgaccaaaatgtattgcccgcctttatatcccgtttgggaaaactaaaggtcagggaaacgtgagtaatatattcgctatatttttgtaagtcaagttattaattcattgattcccagacaagccatcctaaaatatgcagtgcaaaatctttcgtcagaagagtatgaaaagtgcgtagtggacgttttggagaaaaacacctttcttttgggtacaatggactgtgaagaatatattaaggcacccacctcgtttgttataaaaagaatgctgcagggagaaaccactactggcgatgcacggcaagagaataaatatttttttcgtgaaattactatatacaacgttaataataactccgcagcattgaacgcgcatttgagcaaatctcggatactggagccatggatcgtgtgcaatttattcaatatgcgaagaacagcactggtttggatatcagcttcatctgtgacgatttgcttagaatgaacaatgagctgtccagaaaaaaaccacgctattttgcaaactgcaaagagcacagaatgaaaatgcgaataggcaaagctttgctcgacctaagcgacagatggaagtggtcggacaacctgtgggaagccgtcttgtgccctagcgatcagcctaacattagctttatgtacgagtaccttgtctccaaaatgctgccaagcatcgatctattgctggagcagttaaagctactggcaactctaaaaccgagccagcaaatttcgcttgtctctgtagtccacatatactgcttgactcgctgggaaagcatacaacatgaacagcttgtcgaagtatttgccgtcctgttgcctctcacaatgggagcaaattttcagactcgtttgctggcccaattggttttgcatcggatttgtagcgagtgcgaggatcgaaggtaatgaaattagtattatatactacttgttgccgaattttattaatattttgatatttttagcattcaaatgccaatagctgatgcattgaagaaatccatcaaggttacattgagcgaaaaattaactgagtttcagtgcgaagctcgacttttgttaccagaactaggcaaacaatgcccgacatccgtttcggattgcattctgatgatgacgaatgcaccatttgatgaaaacatcagttttattagttgttcctatgactttcgaatgaaactaaagcgcgcccttgaaacgtttaaacggaaacaatcggttttgatacctgagcttgcaacgtccttggctgcattaaacggaaatgtgcagcgaaaaatgaatcccgtcggagatatatatccggagagtgactttgttgtttcgaacaaagctagagatgaccacgaactcattgtggtggcctcgctcatagacaaattgccaaatctgggcggattggcgcgtacctgtgaagttctgggcgttaataccctaatattgggtttaaaatcacaggcggagaaaagcgattttacaaacttgaggtatgcacgtcaaacatcgcggtagccctattatattgctttatataattataattatattattttagcatgactgctgagaaaactttaaacatacttgaagtgaatccagaatcgcttgctggatttctgctggaaaagcaaatggagggttataaaatcgttggcgccgagcaaactgcacacagcacaaactttgttgactttaagtttcccaagaaaagcattcttcttttggggttcgtaatcaacatcttgggcgtattttttgaaaacttattgttctgcatccctcctcaggcatgaaaaacatggaataccagcgaaccttattggattcttggactacgccgtcgaaattccccagtatggcttagtgcgctctctaaatgtacatgtggctggatcactatttattt

SEQ ID NO: 28205 - DNA, 2109 bp, DROSOPHILA
taattctcccagctgcttgatgttgacagtatttaaaccaaacaaagggttagtttagagggttcttcatcgcgagaaaaaggtactaccatgtcattgcccacgaccagagccaccacggccacgaccactcacgctgtggtccaggctgtggaaacgtatattcagaaccagaatttgcttggcgagatcgctgagctggacgacatgctgtacgatttggtgtccatgcacaaagacaacgagctggccctgaagcgtgtgctgcagtgcatccacaacctgttgcagacgaacagcaagtataacgtccgctttggcccaaaagtttttcacaaactggtctccgtggtgattgccgacagtcgtgaggattcggccagccggcgtcaactggtggccaatttactggtctgcgtgcagcttcatatacggaagtttccgcgtatcgaagccaagttcgtgctgcagcagctctggtcgctgagtcagagcaatgagcggcaaccacatgcggcccagatcctggtacaccttttcgatgatttcgtcaacaacttgggaacggaatgcgcccaggaactgcttgtgctaacgcggaatcttctacagtctgatgtgcgcgatgatcgacgctcagcgtattttcttatgcacaagctgcaggagatcgacgaagtgcttgccgctctccagtgcagtgaggttcagtggagcgcgtatgtgggcatcatggagaacctcgaggagcagcagtcccatcttgtgctgcccactttaagcaccctgctgccgcgcatgggcctgatgtctaacaatttgagtgaggattggctggattggctaaggattctgtgcatacgcctcctgggcgacaacaacatcctcgtgttgcgctggaccctgaagtacttcctatcccattttagcctagaacagatatcgcgtttcaatcttctaacacaattccttgctgctaccaatcggacgcaattgtacaatccagaggtgcccgattgcctcactaagcagcaaataactgattttagtgcacaattcccggcagagatattgctggaagcgcttgtctgcgttccgtggcatgcagttcccctgatccactggcttcaagcatgggagctaaagcagctgccggtggtttccaaggagctgctgtttaagttgggcgctcgcgttcgttccctccaaaatccggttttgcgtgatacatcttttcttgaaagtggtgtgagtctagagcagatgcagcagcaccttcttaatcgattggattgccagaccagagaagagaagtcctttgtgctcgagcactctgtggatcttttcgtacagataaatcttccaacgtggagcaagttagaagtacttaacctaaatcccctggaacttttggatcggggtactgaagaaacatttgccaccttgtcgaatatattgtccacgcatgatgaacaattggctgaccaaaatgtattgcccgcctttatatcccgtttgggaaaactaaaggtcagggaaaccattgaacgcgcatttgagcaaatctcggatactggagccatggatcgtgtgcaatttattcaatatgcgaagaacagcactggtttggatatcagcttcatctgtgacgatttgcttagaatgaacaatgagctgtccagaaaaaaaccacgctattttgcaaactgcaaagagcacagaatgaaaatgcgaataggcaaagctttgctcgacctaagcgacagatggaagtggtcggacaacctgtgggaagccgtcttgtgccctagcgatcagcctaacattagctttatgtacgagtaccttgtctccaaaatgctgccaagcatcgatctattgctggagcagttaaagctactggcaactctaaaaccgagccagcaaatttcgcttgtctctgtagtccacatatactgcttgactcgctgggaaagcatacaacatgaacagcttgtcgaagtatttgccgtcctgttgcctctcacaatgggagcaaattttcagactcgtttgctggcccaattggttttgcatcggatttgtagcgagtgcgaggatcgaaggtaa

SEQ ID NO: 28206 - protein, 672 aa, DROSOPHILA
MSLPTTRATTATTTHAVVQAVETYIQNQNLLGEIAELDDMLYDLVSMHKDNELALKRVLQCIHNLLQTNSKYNVRFGPKVFHKLVSVVIADSREDSASRRQLVANLLVCVQLHIRKFPRIEAKFVLQQLWSLSQSNERQPHAAQILVHLFDDFVNNLGTECAQELLVLTRNLLQSDVRDDRRSAYFLMHKLQEIDEVLAALQCSEVQWSAYVGIMENLEEQQSHLVLPTLSTLLPRMGLMSNNLSEDWLDWLRILCIRLLGDNNILVLRWTLKYFLSHFSLEQISRFNLLTQFLAATNRTQLYNPEVPDCLTKQQITDFSAQFPAEILLEALVCVPWHAVPLIHWLQAWELKQLPVVSKELLFKLGARVRSLQNPVLRDTSFLESGVSLEQMQQHLLNRLDCQTREEKSFVLEHSVDLFVQINLPTWSKLEVLNLNPLELLDRGTEETFATLSNILSTHDEQLADQNVLPAFISRLGKLKVRETIERAFEQISDTGAMDRVQFIQYAKNSTGLDISFICDDLLRMNNELSRKKPRYFANCKEHRMKMRIGKALLDLSDRWKWSDNLWEAVLCPSDQPNISFMYEYLVSKMLPSIDLLLEQLKLLATLKPSQQISLVSVVHIYCLTRWESIQHEQLVEVFAVLLPLTMGANFQTRLLAQLVLHRICSECEDRR

SEQ ID NO: 28207 - DNA, 8966 bp, DROSOPHILA
ctatctgctacccgatctttttctttgctgcctatgcggtgccaaaatatagtgacaatatattgaaagataatgatgtaccaaaacagggacagcctaatgctataatagtctcccctccctttcacaagaagcgatggaaataactttaaggctcctgccagtcagtcaatttcaacgcgctcttaactaattattaaaaacagatagaactatcttatctacatcgcagagaaaacgaaaacaaattgcaaatcttgttgtgcatataattctggtcaactgaaactcaaacctgtgtcgtgactgaattgccgagggaaactcccttgggaattattttctacccttcccaattgtgtttacgactctcgactaaacaagaggttgtaaacattaatcgcttgtacatatatgacgacaatatagatcttatccggagtgccaccgattctgggatgcaagcaaagtgggttgcaatgatttccagcaaatagaactagtttaaaggttttaaatttacgttcttaatgtttgaacggacttatcaggccaatgacggctaaatgataaaaaaaaaaaccaattattggtagcttcatcgcggcttaagttcttatcaactggagttgaacagaagtcgtaagtaaatgtaagtcatttagcatgattacatttagcacaacttttagactgatttaaaactataaactaaacgaaagttttacttttgaaatgaaagaatccaacacgagcagtttgtccccgtccgctatttttaatatgttttattttaatcgtaaagcgcaaacccgatataagccctctctgcataattataataggtataatatacctggctctctctttcgccgagcaaactcacgacttgaactgagttaatttgagcgagcggcaaataaatatattttcgctgacggctaataaaaacgcttggtctgaatccgcgggcagttggcttttgaacgcggtacgccaaagtcggtcaagtcggcggagttaatctccacagcatctcagttcctccagagcaacgaacagattctgataccgattcggattctgcctcacattcagattctgatcaacaattgtgccgagcacgtgccgaagtggcgtatacttaatattgcgcatacgccacctgcgccgtcgcgtgtgtaaaaactgtgtgcgggcagaagaaactcagaccatttgattgaaagtgacaacacaggcagtgccaaactaaatgaagatgtgcgaattaattgtcagccatggactcgaccgcgaggtaaaaatatcattagtgcgaacacatgaacacatgactcatgtgatttcccagctgttcaatatggtttttcattattttcgaaagagtttattttacgctcaacatttgagctcaactcaggcttaactgagctcgtgttttgaagtgctgggcaaatatatataaacctacatatatgcgatgtaccagccattgtcactgtcattgacgtttgactttggctctctccttcaaaaaacacactctgatctgggactgactgctgaccctcgttgaagtgcgttaaaaatcgctttttattttatttcggagtctgtgaaattgcgttctgttttttaattgttggggtcctctgaatatcgctgtcacgcctcaattactgcactcttttgtttccattgagttgtcgcaaaaaacggcgcatacatgtatgaaattggcgctgtctggtgatcaaaatgactttccgatctgtttcactgacccaaattgatctgaacgcacacatatgtttgttgtgccattcagatctctcgacctttcatgcggcttagctagctatctgcgactatttgattttatcgcagatttcatatcagactaattgccggcaaggccgtccatcgtagtcgagagcgctcggaagttccttcctaattcaatttggattgccccctagtgtttcgacactcgatggcgtatcaaagtcatggcgcaatattcgctgagcgccactcaggggttcttcaactcgagtggtggcgaaaaactaatcaatcatccgcagattatcaagatttaatcaaaccaccaactgcgacgtcgaattacatacgactacgctgctgttgtgatataagcggggccggtatttacgagctggttttgtttttgggccttatcaagacttgctaatggctgaatcacggccgccaaagaccgagagtcgatgagagactgccttgaatttaagatggtttcgggaacgcgaatgatctcacatttgaatggcagcaggtgtgggtggttggtaactgaacagtgtgggtgctgtctgaaaactcccatcctaaccatcagcagtagcagtgctacgtgtgtgcaaaacttttgccaatgcctgacatgagggagagcttattttggtaattcatacaattagcacaatcattgacgtcactagctaaatgttcacacgctggcaaaggcgacattgtcacacccagcacaatgtactatatcaagtaaaaacaaagtccgcacacacaattagtcaatgctccgaaatgtatttcacatgaaggtggtactatcaatcgatggcagcataagcagctttgcccgatcagaaactgagatttctggcagattagattgcattgaacttaaataagaggacactagtaccaggtttttcgagtgatatggctcagttctctgaagaagccccaatcaatcggttgcccatcatgggattgcacgaaaagctgcgaaagtttcaccatcatcaacggagtccctgccagcgaattttaggggtgagcttagggaatctatatggttctcttcaattgctgcaatttttaaattttctgcatatatttataatcatgccaaataaagggcggctaaaatgatgtaatagttattggaaacgaagaatgtggttccatgactatgacatttgagtgttgtgaaaaagcatttgcatgctgtggtaagcacttatctaaaaaaaaaggtattctaaattatttcccatcaagcagtcgttgtctctgccttcaacgcctttcatatggggattcgttgagcactttcatttcgttgccagtcgttgttttatttcgtttcgtacagagctctccaaaatagaaaattcgaatttatttattcagtgttttgttggtcttacgagtccgtgaaatcgagttctttagtccgtgaagaaacgtgcttcgttttcgcaggtttttgctaaattgttcgtgtatccattggttcacattatgagtactcatcagtatagcctggggaggctggcccgccgaggcttcagcctgcggatgaatccgctggccggcacactgcaaaggctttaccacacccgtagcaggccatgtgtggcccagagtgtgagccaggtgggtgaacggtccaagccaacgttgcagccctacgacttcgaccgaagccgggtgcgtaaaattgccggcgagaggaagacgctggtcgaccaggtgcggggcatgagcacaagcctgggacatgccaagttggtgccccaaaagatgtacggcaagacgaggctgttctcctccggaagcaccctctacagtcgcttgcagcatctggaacagcagaacgaggaatattcgagtcgagagtcccagccgacgcacaccacagcctcattgtcggccacccagcagaggtacaatcaggcggcaggattcggcaagggcatggccatacagacggccaaagacatcagccagtccatccaggaggagctgatggtggtggacgccgacacgcgcgacatgcttacctgcgataccagtcgcaaggcgatgcgcgactaccacgaccatatggccaagcggtcgaagaactctgtcgatcccatgcagggttggaagcatccaaagaaccttaagtatctctccgatatcccggccgatagcagtaccagtagccaagcagcccaacatgacgatgaagcccaacggcagatgaggccacgtcgccgccagatggtcatgggtcatgccattcgcaatttcgacgccctagccaatcccccgcttcatctcggcaccggacccaggtacgagatgtatacctccaatgctaaggagatgttctcagagcatcgcagcgagctgcgtccgcagacaagttggcacaagccaaagccagccgccgaggacaagcccgaggatcagcttatggacgtgtcgatgatccgaccagagcgtccggatattacagtggccaggggcctctggaagaacgaggaggacacacccgagccggattcgtggtacgagcagcccaaagcagagcgcgagttcttaaagcaggccttcctcggcggagccaagagtcgccggaaggtgggacagtcccagttggacgaactctaccacgagtcgtcggacaatgcggcccagattagtgcctcacagcaggtgattaaacagaagtacgccggcttccgcgggtcggcaaggggaaatcagaagcaaattgtagagtcagtgaatccgacgccgcagcttaagcctcatcaaaggacctttccggagccccgggacaagcgcaaaagacgtggaactgcaaaccaggccgtcgaacgacaggctgcaccacgcttttatgcggggaacagccaaccagctgcgaaagaagatgaggataataaggaggggaactccagagagtccaattggccgtcgcccagtaactcggtgctcccgtcatcctcgcgaagcgagtctcgccttcaaactgagcgcagggcacgtgggcagggtgtcatgggcgagaggcgaaccaccaagaactcgatggagactgaaaccgccgcggaggatagcgatatcgctatgtcgccaggttacaagaaggagtcggcagtccaacgcctgggaaaagctgcttccaggcacaacagccgcgccttcaacagctactgagtctccaagttccatcgcaggtgtgaggtcgtgacctctgccttctgaaaattcactctaattccgattcacggtcataattctcccggtcctacaaaagaaacttttacattcgctgtcaaaatccttaaatgtcaacaaaattgaggcccggaaatcctgctggctaagtgtagtattataatcgcataactaaagtaatttaaataaaaccttttacagttgcgaaaaaaatgcaagggtggcgatatatataaatatacatatatatatctgttctgtttagataatggtcggttatcacaacatcttctccgtatttttttactcttttttttccccctttttttgtaggggcattatagaaccggtcggttcaattttcataagcatctttcagcattgtaaaatatacatccttcctcgtgtaattgtgctctattttacttttgttcactcagctactgccttggcatcggcgagccgttttaatttgtagttaaattttaaaccactacaagggacacccacaaagtaggcagactcagaaaactagcactgcactcaaagtattaaagtatattactttcaattgaaaacccaaccactaaagcaaaccaccgaacttgaaatgctaaattccacaaaccccatttccaaaaaacagcagaaacgtatttaagcatattttagatatgtaatttgattttgatttggaattgattacatgtttcactactagattatgtttaatagttgtacattcaagtcttgcatcttgtgctaatatctgctgttttcatcaatcgtcctccaggtgctgtcaatgagcacagatgaatatcgcaagacctcgctctttgccaccggttccttcgacctggacttccccataccagacctgatcggcaagacagaaatccttacagaggagcatcggtaagtagcgcagggcctttaatagaccctttggttgaatcttagcttatgatggtttttctgctctacagcgagaagctctgttcacatctgccggctagagccgagggatactcctggtccctgatcttcagcacctcacaacatggtttcgcactgaactccctgtaccgcaaaatggcgcgtctggagagtccagttctgattgtcattgaggatacggagcacaacgtaagttgaagttcttaaggtgggatgggaacgagcagatatccaatagcaattgagttgcgcagttagaagtgtattagatcataaatgaatgggtaaaactagtatttgtctttcgctttgagaggctattgaactgcacacatatttataaacattaaatatacaatatgactgattttctcggcactttgtttccattttaataaaatacaattagtctggttttgattattcagtctggagtagtaattagacgaattctgttatttgaaccttttgaatgcatcaattagcagcgttttacgttccagctaagtgcagtgaagataagagcaattaagaaatgttacgcaaattgttttataaaattgcactaattcttgttttataacacataccttaatctcgtgtaggtatttggtgccctcacctcctgctcactgcatgtgtcggatcacttttacggcaccggtgagtccctgctctacaagtttaaccccagcttcaaggtgttccattggactggcgagaatatgtacttcatcaaaggaaacatggagagcctttcgattggcgctggagagtgagtttggtgcacttaaagcgcgcctggcacttgctaatttttgcttgaatctcttttttttagcggtcgttttggcctgtggctggatggtgatctgaaccagggacgatcgcaacagtgcagcacatacggcaatgagcctctggcgccacaagaagactttgttatcaaaacactcgaatgctgggcatttgtttaagtgaatttctgttgtcgacaacaaacatatttaaggatgggagcgagggcctcctgccgacctatctatttaattaactatatgtacttgtactaaaaaccagcaacctgagaaagatgtcaaaagctggtgtgcgtccaaggatcatcccttcggaacggtccacacagcccgaaccccgaaacacttgaatacacgaacaccaccacatgaagatggttttgaagggatctgatctgaagaaaaatgcttgtgaaaactccgttctctgaagcaactgcgagttagctatgcgttggaacgtattaattatttagtttttatatcatatattattaaacaagagcaactaaattatgtgttagacttaaacaaaacaaaacagaatatgagaaaacccaagaaacagactagcgacacaaaaacttaagcgaaaagaaatgaggataacatttgagggcatcacacatctccatgaaaaacatggcacacgcatacacccacatacgcctacattaaaaaacacacattatgtttagttcttaataccgaaaattataaacaccaaattgtgagaagagacatattgaaaataggcagatttttatcatttatcgtgtccagttctctggattgatttcagtttgaatttagtttcgattgtttgagttactagagttatttgagaacattgtgaaaagcgaagcgagctgagatgagaaaaataaaaagaatgtcgatataatttatagtgcaaaagtgctgattgcaagtaaaactaaagcgaagataactttaaacgatttgacttttatgtatatgtaaagaaggagccgcgaagagctgagagcgagcgttttatttttagttttacacgatatacatacatacatatatttaattacgattattttaatgctaatgatgttgacttttatgcaattatactaaaacaaaaacagaaacaacaccagaatgaaatacacaatattatacaaccaaaatggccaaaacagaggttttacttcctcccccacacccagaaaatgggtttcccaattgatcgtttcaagataattgtatcctaggtgtgttattcgctgtgctataagggtgcttgctataaggcacctttgttttgtagttgtaagctttcttcgcagatatcgctcacacccacatatgtacacacacacacacacacacagatacttccgcagcagaatcagacgagcggtggctggttgctggtggaaaaggttttgaggaaatcaaaccaacaaactttaatggctttatatcccttttgagatacaatttcagtatgattaaaataaattaaatatatacatacatatatgtatacacatacgctaatatataaatgtacaatggtagaaacgaatataggtatatgtaagtgtaacttttgtagtgtatttgcgccccaaaaaacaaaacccgggcgtcaacttgccacagttcccccaatcgattgaattgtgaccccctcagaaccccccaaaaaacttacggccacgctggcactcagaaacatattctaaatattcaaatacacacgacgagacgctgggaaatagatacatttcagagaacaaacgaaacgaaacaaaattgctgatattttacacagaaccgagttcgaaactaacaaaaagtaaggtattaaaaatattccatttcatcggagttcaagtttttacttgtttaaaagtgaaacaaagtcacaaaacaacgcacacaagccaaaaacaaaaattgtgaaattataaagagattgaagatattaaatgtaaagataatccgaaaccgaaacccagagaatcatctaagcatgcaacactttagagaaatttagctgaaaatttgaacgctccccagccctaaaaatggaaatatacatatgaaaattaagaaaatggtgaacgacggcgactcacgccagtgaagatgttttagaaataacatctaacgaccttgaca

SEQ ID NO: 28208 - DNA, 1892 bp, DROSOPHILA
agtcggtcaagtcggcggagttaatctccacagcatctcagttcctccagagcaacgaacagattctgataccgattcggattctgcctcacattcagattctgatcaacaattgtgccgagcacgtgccgaagtggcgtatacttaatattgcgcatacgccacctgcgccgtcgcgtgtgtaaaaactgtgtgcgggcagaagaaactcagaccatttgattgaaagtgacaacacaggcagtgccaaactaaatgaagatgtgcgaattaattgtcagccatggactcgaccgcgaggtgctgtcaatgagcacagatgaatatcgcaagacctcgctctttgccaccggttccttcgacctggacttccccataccagacctgatcggcaagacagaaatccttacagaggagcatcgcgagaagctctgttcacatctgccggctagagccgagggatactcctggtccctgatcttcagcacctcacaacatggtttcgcactgaactccctgtaccgcaaaatggcgcgtctggagagtccagttctgattgtcattgaggatacggagcacaacgtatttggtgccctcacctcctgctcactgcatgtgtcggatcacttttacggcaccggtgagtccctgctctacaagtttaaccccagcttcaaggtgttccattggactggcgagaatatgtacttcatcaaaggaaacatggagagcctttcgattggcgctggagacggtcgttttggcctgtggctggatggtgatctgaaccagggacgatcgcaacagtgcagcacatacggcaatgagcctctggcgccacaagaagactttgttatcaaaacactcgaatgctgggcatttgtttaagtgaatttctgttgtcgacaacaaacatatttaaggatgggagcgagggcctcctgccgacctatctatttaattaactatatgtacttgtactaaaaaccagcaacctgagaaagatgtcaaaagctggtgtgcgtccaaggatcatcccttcggaacggtccacacagcccgaaccccgaaacacttgaatacacgaacaccaccacatgaagatggttttgaagggatctgatctgaagaaaaatgcttgtgaaaactccgttctctgaagcaactgcgagttagctatgcgttggaacgtattaattatttagtttttatatcatatattattaaacaagagcaactaaattatgtgttagacttaaacaaaacaaaacagaatatgagaaaacccaagaaacagactagcgacacaaaaacttaagcgaaaagaaatgaggataacatttgagggcatcacacatctccatgaaaaacatggcacacgcatacacccacatacgcctacattaaaaaacacacattatgtttagttcttaataccgaaaattataaacaccaaattgtgagaagagacatattgaaaataggcagatttttatcatttatcgtgtccagttctctggattgatttcagtttgaatttagtttcgattgtttgagttactagagttatttgagaacattgtgaaaagcgaagcgagctgagatgagaaaaataaaaagaatgtcgatataatttatagtgcaaaagtgctgattgcaagtaaaactaaagcgaagataactttaaacgatttgacttttatgtatatgtaaagaaggagccgcgaagagctgagagcgagcgttttatttttagttttacacgatatacatacatacatatatttaattacgattattttaatgctaatgatgttgacttttatgcaattatactaaaacaaaaacagaaacaacaccagaatgaaatacacaatattatacaaccaaaa

SEQ ID NO: 28209 - protein, 192 aa, DROSOPHILA
MSTDEYRKTSLFATGSFDLDFPIPDLIGKTEILTEEHREKLCSHLPARAEGYSWSLIFSTSQHGFALNSLYRKMARLESPVLIVIEDTEHNVFGALTSCSLHVSDHFYGTGESLLYKFNPSFKVFHWTGENMYFIKGNMESLSIGAGDGRFGLWLDGDLNQGRSQQCSTYGNEPLAPQEDFVIKTLECWAFV

SEQ ID NO: 28210 - DNA, 12413 bp, DROSOPHILA
gttttcgacggcctgctgccgttgtcgcctcgtttaacacgcccacaaatccgtttagttatggtcatcgtctcggccatttgtcctcttcttcctccggcttgtgtaaggcgtttactacagtcaaacattgtattgcaagtttgaaccaacatatttgatatttatttattgagttcatcagtatcttattaaaaatacaacttatccagttcaaaattcaaatgctcttcatccgagctgcacaatttttctttatttactcaaagcttgttggtaaaattacgcatttaacccaaaaaaaatttaaacaaaacaaaatgagtttggcacgtgagtgcgaaaaagaaacaagagacagctcatgcttttatttctagctcagcaatttgcggcctccaataataaattattgcataaaaataaatattacgtatacgcaacttcgagttggaatgctccgagcaacatgttgaagaaacatagtgtcccaacactagacctgttgttcgaaacacgcttaacagtgctgttaacataatgttccgacagtggctaacatattatatcgacctgcaccacctacactgtaaaaagtggactaaaaagatttacaaatatctgtggtttcaaagttattacttttcaatttacatacttttgaatatttatgtagctacttgcagcatcaaattcatgatgcaggaacttccctgtttaagcaattttcataaataggagagtaaaccaaagtaataagcagaaccacataactcgtacaacctttttgccatttcggaccggctccgccacaccaaatgggagcgtttgaatggggctgataagttcgcttctgcttttataggccataaattttgtgtctgggggctggccgaagtgtgacgtgactcactgtaggtggcgtgttagcagaggcccgtttttttccgaggctccaaaagagagtccaataagtttcagtcggtcgagcaacttgtttgaaaacacacagagctgcccccaaaaggagctttttaagtgaaagaaaagacgttaaatatagaaaaaacatctgcggagagcacgttgaaaagtaaacaaatttgaatgttctaactaggaacaaagtgtttacgtgtaacgaagaaaggccaaaaacagtgctgcaacggcgaagagcggaaggcgtagagcgtgataaaagcggtggcaacaacagaaacgcaaataatcggagaaaaaagctgaagcaagtctcgtgggtcacaagaccattcagaaaagcgaaagagagagagagagagagagcgagagagagagagagagagagagagagagaggcgatatgtggagcgttagagctttcaaacagtgctagcccaaaaagtgggacacccccacgcacgaaagcttttgcatctgctacctctgcccgcttccactgctgaacaccgccactgttggccatcagcaacatgtggttcgccatttctctgtttgccatcttggccgtttgcgggttggccggccgcaggtggggtcgctacctctatctgcactacggccgccacctgctgccgcgctccctcctctcggccaagaaccgcgcgcccacgccccctctctcgcccaccaaggacgaccagagcctggaggctctcctcgacgagagcggcgaaatgcacgaaacggtgagtgccggtcaggatcgcatctggcaaagggatccaaaagggatatgtgtgtatctaacaatttaagaagaggacttctatttaaaacttctttttataagaagagtaaattgagtaaacatattgaatggatattttttattctctttatttatttctctttactcaattttcaataatctaaatccccgtttcgtcggctaaactttgttgtttagtgctgttagtaattagtgtcaagaatataagggttacgtctattatatagccattatcgcacacgtttctcctattacaaaccgcttttaattgctcgaactgatttgcaactattatggcatcatcattagacacaaatgtggctaagaccccgatcatctcgggcgaacaccatttgtcaccctgtcaggtgtcttgaactttggtgtttgcctcgggtcaacgatctctccggatgagcctcatccccaagctgtacaagtaatcggctggcacctccccaagtcgcgcggttcatcacaaagattcgctagttgctatttaaccttgacaaacacttctcttgttttgttggacaatgtgacctcacaacacatgctaaataacccaaccaaatatttgtttagacatataaattacaaggcacagagcaaaagtgcagatgcaaaaactaaacaaacctacaaaatgataaattgcgcaccaaatgcattttcatgctgttgtaatgcatttgggaaaagccaatgaagtaaaggcagaaaggaaaaaaaagcgaataagtttaaatagcacggttgaagtaacataaaccgataaggaatgcggaaaaaataggaaaaataaaaacgatatcagctctggttataattaggttatcagacttcagtactgctcatgcagttagctatttctctggagcctatttaaatataatgcatgcatacatgtatgatattcaatgcaaaagtgctttacatactgagatgtgggaaatctattggttagaaaccgagaaaatgattgaggaacactaattgaatagttgtaataaataataataaataatacgaacttcttaggtagagaaatgataggtttccatgcaaatatctgtagttattttgcacacacagagcacaaagtttattgttaggagttttcatgtgcgatttattaccatagctttgcttcgcacctctgccaagccaagcctctcacacaccttaattaccaacccatccctccgccagtctaaagtgaaaaccccactaccccgttccatttaagccaagaactcctcgcccgtatatgctcttgcatacctattacctttgtgccatgcctcatgttctttgttttagcctctttgttttgccgactctttcgcggctatcgggtctcaatacccgtttgtccagtaagctcttttcttcaactactcttcgctgctgccttttgctgcttttacctctttttgttttgaggccggttctgtggatttgcctgtctggcacaaacttttaaatttttcggaccacaaaaccagttggtgtatagccgttgctgaatatgttcgccgccgttcctccagccaaagtacgcggtctttatatttctatatgttctgcaagtgctttaaataagttagttcgagaataaacaaaatatatctaagtaaatactatataagaaatgtaaatcgaatggtgatgatcagaattcccaattctcgatttgactaaatgatgaactatctgctacccgatctttttctttgctgcctatgcggtgccaaaatatagtgacaatatattgaaagataatgatgtaccaaaacagggacagcctaatgctataatagtctcccctccctttcacaagaagcgatggaaataactttaaggctcctgccagtcagtcaatttcaacgcgctcttaactaattattaaaaacagatagaactatcttatctacatcgcagagaaaacgaaaacaaattgcaaatcttgttgtgcatataattctggtcaactgaaactcaaacctgtgtcgtgactgaattgccgagggaaactcccttgggaattattttctacccttcccaattgtgtttacgactctcgactaaacaagaggttgtaaacattaatcgcttgtacatatatgacgacaatatagatcttatccggagtgccaccgattctgggatgcaagcaaagtgggttgcaatgatttccagcaaatagaactagtttaaaggttttaaatttacgttcttaatgtttgaacggacttatcaggccaatgacggctaaatgataaaaaaaaaaaccaattattggtagcttcatcgcggcttaagttcttatcaactggagttgaacagaagtcgtaagtaaatgtaagtcatttagcatgattacatttagcacaacttttagactgatttaaaactataaactaaacgaaagttttacttttgaaatgaaagaatccaacacgagcagtttgtccccgtccgctatttttaatatgttttattttaatcgtaaagcgcaaacccgatataagccctctctgcataattataataggtataatatacctggctctctctttcgccgagcaaactcacgacttgaactgagttaatttgagcgagcggcaaataaatatattttcgctgacggctaataaaaacgcttggtctgaatccgcgggcagttggcttttgaacgcggtacgccaaagtcggtcaagtcggcggagttaatctccacagcatctcagttcctccagagcaacgaacagattctgataccgattcggattctgcctcacattcagattctgatcaacaattgtgccgagcacgtgccgaagtggcgtatacttaatattgcgcatacgccacctgcgccgtcgcgtgtgtaaaaactgtgtgcgggcagaagaaactcagaccatttgattgaaagtgacaacacaggcagtgccaaactaaatgaagatgtgcgaattaattgtcagccatggactcgaccgcgaggtaaaaatatcattagtgcgaacacatgaacacatgactcatgtgatttcccagctgttcaatatggtttttcattattttcgaaagagtttattttacgctcaacatttgagctcaactcaggcttaactgagctcgtgttttgaagtgctgggcaaatatatataaacctacatatatgcgatgtaccagccattgtcactgtcattgacgtttgactttggctctctccttcaaaaaacacactctgatctgggactgactgctgaccctcgttgaagtgcgttaaaaatcgctttttattttatttcggagtctgtgaaattgcgttctgttttttaattgttggggtcctctgaatatcgctgtcacgcctcaattactgcactcttttgtttccattgagttgtcgcaaaaaacggcgcatacatgtatgaaattggcgctgtctggtgatcaaaatgactttccgatctgtttcactgacccaaattgatctgaacgcacacatatgtttgttgtgccattcagatctctcgacctttcatgcggcttagctagctatctgcgactatttgattttatcgcagatttcatatcagactaattgccggcaaggccgtccatcgtagtcgagagcgctcggaagttccttcctaattcaatttggattgccccctagtgtttcgacactcgatggcgtatcaaagtcatggcgcaatattcgctgagcgccactcaggggttcttcaactcgagtggtggcgaaaaactaatcaatcatccgcagattatcaagatttaatcaaaccaccaactgcgacgtcgaattacatacgactacgctgctgttgtgatataagcggggccggtatttacgagctggttttgtttttgggccttatcaagacttgctaatggctgaatcacggccgccaaagaccgagagtcgatgagagactgccttgaatttaagatggtttcgggaacgcgaatgatctcacatttgaatggcagcaggtgtgggtggttggtaactgaacagtgtgggtgctgtctgaaaactcccatcctaaccatcagcagtagcagtgctacgtgtgtgcaaaacttttgccaatgcctgacatgagggagagcttattttggtaattcatacaattagcacaatcattgacgtcactagctaaatgttcacacgctggcaaaggcgacattgtcacacccagcacaatgtactatatcaagtaaaaacaaagtccgcacacacaattagtcaatgctccgaaatgtatttcacatgaaggtggtactatcaatcgatggcagcataagcagctttgcccgatcagaaactgagatttctggcagattagattgcattgaacttaaataagaggacactagtaccaggtttttcgagtgatatggctcagttctctgaagaagccccaatcaatcggttgcccatcatgggattgcacgaaaagctgcgaaagtttcaccatcatcaacggagtccctgccagcgaattttaggggtgagcttagggaatctatatggttctcttcaattgctgcaatttttaaattttctgcatatatttataatcatgccaaataaagggcggctaaaatgatgtaatagttattggaaacgaagaatgtggttccatgactatgacatttgagtgttgtgaaaaagcatttgcatgctgtggtaagcacttatctaaaaaaaaaggtattctaaattatttcccatcaagcagtcgttgtctctgccttcaacgcctttcatatggggattcgttgagcactttcatttcgttgccagtcgttgttttatttcgtttcgtacagagctctccaaaatagaaaattcgaatttatttattcagtgttttgttggtcttacgagtccgtgaaatcgagttctttagtccgtgaagaaacgtgcttcgttttcgcaggtttttgctaaattgttcgtgtatccattggttcacattatgagtactcatcagtatagcctggggaggctggcccgccgaggcttcagcctgcggatgaatccgctggccggcacactgcaaaggctttaccacacccgtagcaggccatgtgtggcccagagtgtgagccaggtgggtgaacggtccaagccaacgttgcagccctacgacttcgaccgaagccgggtgcgtaaaattgccggcgagaggaagacgctggtcgaccaggtgcggggcatgagcacaagcctgggacatgccaagttggtgccccaaaagatgtacggcaagacgaggctgttctcctccggaagcaccctctacagtcgcttgcagcatctggaacagcagaacgaggaatattcgagtcgagagtcccagccgacgcacaccacagcctcattgtcggccacccagcagaggtacaatcaggcggcaggattcggcaagggcatggccatacagacggccaaagacatcagccagtccatccaggaggagctgatggtggtggacgccgacacgcgcgacatgcttacctgcgataccagtcgcaaggcgatgcgcgactaccacgaccatatggccaagcggtcgaagaactctgtcgatcccatgcagggttggaagcatccaaagaaccttaagtatctctccgatatcccggccgatagcagtaccagtagccaagcagcccaacatgacgatgaagcccaacggcagatgaggccacgtcgccgccagatggtcatgggtcatgccattcgcaatttcgacgccctagccaatcccccgcttcatctcggcaccggacccaggtacgagatgtatacctccaatgctaaggagatgttctcagagcatcgcagcgagctgcgtccgcagacaagttggcacaagccaaagccagccgccgaggacaagcccgaggatcagcttatggacgtgtcgatgatccgaccagagcgtccggatattacagtggccaggggcctctggaagaacgaggaggacacacccgagccggattcgtggtacgagcagcccaaagcagagcgcgagttcttaaagcaggccttcctcggcggagccaagagtcgccggaaggtgggacagtcccagttggacgaactctaccacgagtcgtcggacaatgcggcccagattagtgcctcacagcaggtgattaaacagaagtacgccggcttccgcgggtcggcaaggggaaatcagaagcaaattgtagagtcagtgaatccgacgccgcagcttaagcctcatcaaaggacctttccggagccccgggacaagcgcaaaagacgtggaactgcaaaccaggccgtcgaacgacaggctgcaccacgcttttatgcggggaacagccaaccagctgcgaaagaagatgaggataataaggaggggaactccagagagtccaattggccgtcgcccagtaactcggtgctcccgtcatcctcgcgaagcgagtctcgccttcaaactgagcgcagggcacgtgggcagggtgtcatgggcgagaggcgaaccaccaagaactcgatggagactgaaaccgccgcggaggatagcgatatcgctatgtcgccaggttacaagaaggagtcggcagtccaacgcctgggaaaagctgcttccaggcacaacagccgcgccttcaacagctactgagtctccaagttccatcgcaggtgtgaggtcgtgacctctgccttctgaaaattcactctaattccgattcacggtcataattctcccggtcctacaaaagaaacttttacattcgctgtcaaaatccttaaatgtcaacaaaattgaggcccggaaatcctgctggctaagtgtagtattataatcgcataactaaagtaatttaaataaaaccttttacagttgcgaaaaaaatgcaagggtggcgatatatataaatatacatatatatatctgttctgtttagataatggtcggttatcacaacatcttctccgtatttttttactcttttttttccccctttttttgtaggggcattatagaaccggtcggttcaattttcataagcatctttcagcattgtaaaatatacatccttcctcgtgtaattgtgctctattttacttttgttcactcagctactgccttggcatcggcgagccgttttaatttgtagttaaattttaaaccactacaagggacacccacaaagtaggcagactcagaaaactagcactgcactcaaagtattaaagtatattactttcaattgaaaacccaaccactaaagcaaaccaccgaacttgaaatgctaaattccacaaaccccatttccaaaaaacagcagaaacgtatttaagcatattttagatatgtaatttgattttgatttggaattgattacatgtttcactactagattatgtttaatagttgtacattcaagtcttgcatcttgtgctaatatctgctgttttcatcaatcgtcctccaggtgctgtcaatgagcacagatgaatatcgcaagacctcgctctttgccaccggttccttcgacctggacttccccataccagacctgatcggcaagacagaaatccttacagaggagcatcggtaagtagcgcagggcctttaatagaccctttggttgaatcttagcttatgatggtttttctgctctacagcgagaagctctgttcacatctgccggctagagccgagggatactcctggtccctgatcttcagcacctcacaacatggtttcgcactgaactccctgtaccgcaaaatggcgcgtctggagagtccagttctgattgtcattgaggatacggagcacaacgtaagttgaagttcttaaggtgggatgggaacgagcagatatccaatagcaattgagttgcgcagttagaagtgtattagatcataaatgaatgggtaaaactagtatttgtctttcgctttgagaggctattgaactgcacacatatttataaacattaaatatacaatatgactgattttctcggcactttgtttccattttaataaaatacaattagtctggttttgattattcagtctggagtagtaattagacgaattctgttatttgaaccttttgaatgcatcaattagcagcgttttacgttccagctaagtgcagtgaagataagagcaattaagaaatgttacgcaaattgttttataaaattgcactaattcttgttttataacacataccttaatctcgtgtaggtatttggtgccctcacctcctgctcactgcatgtgtcggatcacttttacggcaccggtgagtccctgctctacaagtttaaccccagcttcaaggtgttccattggactggcgagaatatgtacttcatcaaaggaaacatggagagcctttcgattggcgctggagagtgagtttggtgcacttaaagcgcgcctggcacttgctaatttttgcttgaatctcttttttttagcggtcgttttggcctgtggctggatggtgatctgaaccagggacgatcgcaacagtgcagcacatacggcaatgagcctctggcgccacaagaagactttgttatcaaaacactcgaatgctgggcatttgtttaagtgaatttctgttgtcgacaacaaacatatttaaggatgggagcgagggcctcctgccgacctatctatttaattaactatatgtacttgtactaaaaaccagcaacctgagaaagatgtcaaaagctggtgtgcgtccaaggatcatcccttcggaacggtccacacagcccgaaccccgaaacacttgaatacacgaacaccaccacatgaagatggttttgaagggatctgatctgaagaaaaatgcttgtgaaaactccgttctctgaagcaactgcgagttagctatgcgttggaacgtattaattatttagtttttatatcatatattattaaacaagagcaactaaattatgtgttagacttaaacaaaacaaaacagaatatgagaaaacccaagaaacagactagcgacacaaaaacttaagcgaaaagaaatgaggataacatttgagggcatcacacatctccatgaaaaacatggcacacgcatacacccacatacgcctacattaaaaaacacacattatgtttagttcttaataccgaaaattataaacaccaaattgtgagaagagacatattgaaaataggcagatttttatcatttatcgtgtccagttctctggattgatttcagtttgaatttagtttcgattgtttgagttactagagttatttgagaacattgtgaaaagcgaagcgagctgagatgagaaaaataaaaagaatgtcgatataatttatagtgcaaaagtgctgattgcaagtaaaactaaagcgaagataactttaaacgatttgacttttatgtatatgtaaagaaggagccgcgaagagctgagagcgagcgttttatttttagttttacacgatatacatacatacatatatttaattacgattattttaatgctaatgatgttgacttttatgcaattatactaaaacaaaaacagaaacaacaccagaatgaaatacacaatattatacaaccaaaatggccaaaacagaggttttacttcctcccccacacccagaaaatgggtttcccaattgatcgtttcaagataattgtatcctaggtgtgttattcgctgtgctataagggtgcttgctataaggcacctttgttttgtagttgtaagctttcttcgcagatatcgctcacacccacatatgtacacacacacacacacacacagatacttccgcagcagaatcagacgagcggtggctggttgctggtggaaaaggttttgaggaaatcaaaccaacaaactttaatggctttatatcccttttgagatacaatttcagtatgattaaaataaattaaatatatacatacatatatgtatacacatacgctaatatataaatgtacaatggtagaaacgaatataggtatatgtaagtgtaacttttgtagtgtatttgcgccccaaaaaacaaaacccgggcgtcaacttgccacagttcccccaatcgattgaattgtgaccccctcagaaccccccaaaaaacttacggccacgctggcactcagaaacatattctaaatattcaaatacacacgacgagacgctgggaaatagatacatttcagagaacaaacgaaacgaaacaaaattgctgatattttacacagaaccgagttcgaaactaacaaaaagtaaggtattaaaaatattccatttcatcggagttcaagtttttacttgtttaaaagtgaaacaaagtcacaaaacaacgcacacaagccaaaaacaaaaattgtgaaattataaagagattgaagatattaaatgtaaagataatccgaaaccgaaacccagagaatcatctaagcatgcaacactttagagaaatttagctgaaaatttgaacgctccccagccctaaaaatggaaatatacatatgaaaattaagaaaatggtgaacgacggcgactcacgccagtgaagatgttttagaaataacatctaacgaccttgaca

SEQ ID NO: 28211 - DNA, 2283 bp, DROSOPHILA
gaaaacacacagagctgcccccaaaaggagctttttaagtgaaagaaaagacgttaaatatagaaaaaacatctgcggagagcacgttgaaaagtaaacaaatttgaatgttctaactaggaacaaagtgtttacgtgtaacgaagaaaggccaaaaacagtgctgcaacggcgaagagcggaaggcgtagagcgtgataaaagcggtggcaacaacagaaacgcaaataatcggagaaaaaagctgaagcaagtctcgtgggtcacaagaccattcagaaaagcgaaagagagagagagagagagagcgagagagagagagagagagagagagagagaggcgatatgtggagcgttagagctttcaaacagtgctagcccaaaaagtgggacacccccacgcacgaaagcttttgcatctgctacctctgcccgcttccactgctgaacaccgccactgttggccatcagcaacatgtggttcgccatttctctgtttgccatcttggccgtttgcgggttggccggccgcaggtggggtcgctacctctatctgcactacggccgccacctgctgccgcgctccctcctctcggccaagaaccgcgcgcccacgccccctctctcgcccaccaaggacgaccagagcctggaggctctcctcgacgagagcggcgaaatgcacgaaacggtgctgtcaatgagcacagatgaatatcgcaagacctcgctctttgccaccggttccttcgacctggacttccccataccagacctgatcggcaagacagaaatccttacagaggagcatcgcgagaagctctgttcacatctgccggctagagccgagggatactcctggtccctgatcttcagcacctcacaacatggtttcgcactgaactccctgtaccgcaaaatggcgcgtctggagagtccagttctgattgtcattgaggatacggagcacaacgtatttggtgccctcacctcctgctcactgcatgtgtcggatcacttttacggcaccggtgagtccctgctctacaagtttaaccccagcttcaaggtgttccattggactggcgagaatatgtacttcatcaaaggaaacatggagagcctttcgattggcgctggagacggtcgttttggcctgtggctggatggtgatctgaaccagggacgatcgcaacagtgcagcacatacggcaatgagcctctggcgccacaagaagactttgttatcaaaacactcgaatgctgggcatttgtttaagtgaatttctgttgtcgacaacaaacatatttaaggatgggagcgagggcctcctgccgacctatctatttaattaactatatgtacttgtactaaaaaccagcaacctgagaaagatgtcaaaagctggtgtgcgtccaaggatcatcccttcggaacggtccacacagcccgaaccccgaaacacttgaatacacgaacaccaccacatgaagatggttttgaagggatctgatctgaagaaaaatgcttgtgaaaactccgttctctgaagcaactgcgagttagctatgcgttggaacgtattaattatttagtttttatatcatatattattaaacaagagcaactaaattatgtgttagacttaaacaaaacaaaacagaatatgagaaaacccaagaaacagactagcgacacaaaaacttaagcgaaaagaaatgaggataacatttgagggcatcacacatctccatgaaaaacatggcacacgcatacacccacatacgcctacattaaaaaacacacattatgtttagttcttaataccgaaaattataaacaccaaattgtgagaagagacatattgaaaataggcagatttttatcatttatcgtgtccagttctctggattgatttcagtttgaatttagtttcgattgtttgagttactagagttatttgagaacattgtgaaaagcgaagcgagctgagatgagaaaaataaaaagaatgtcgatataatttatagtgcaaaagtgctgattgcaagtaaaactaaagcgaagataactttaaacgatttgacttttatgtatatgtaaagaaggagccgcgaagagctgagagcgagcgttttatttttagttttacacgatatacatacatacatatatttaattacgattattttaatgctaatgatgttgacttttatgcaattatactaaaacaaaaacagaaacaacaccagaatgaaatacacaatattatacaaccaaaa

SEQ ID NO: 28212 - protein, 267 aa, DROSOPHILA
MWFAISLFAILAVCGLAGRRWGRYLYLHYGRHLLPRSLLSAKNRAPTPPLSPTKDDQSLEALLDESGEMHETVLSMSTDEYRKTSLFATGSFDLDFPIPDLIGKTEILTEEHREKLCSHLPARAEGYSWSLIFSTSQHGFALNSLYRKMARLESPVLIVIEDTEHNVFGALTSCSLHVSDHFYGTGESLLYKFNPSFKVFHWTGENMYFIKGNMESLSIGAGDGRFGLWLDGDLNQGRSQQCSTYGNEPLAPQEDFVIKTLECWAFV

SEQ ID NO: 28213 - DNA, 2335 bp, DROSOPHILA
attttgcagtcgctgaatagaaaaggcccgtgcagaaagttaattaagcataaatcagccgaggcagcaaaaacaacagccacattcttgaacgtaacaacaacagcaatacaagaaaccagcagctaaaactgacattcgtattcatttcaaataaaaatcataaaaacaaaacaacaattgggcaacacaatttattattaattgagtttggggctcgtgtttttatgggcttgtttaaatggtcacagtcaatcatagaaagattgaaaatatagaaaggaaccgaatgttttccttatcggcacgcagtttctctattagtttattagttttttttttggaagtcgaccataaataacaataaaactagtttgttttacattttgacggatttattttaagtgatcctttcaatcatgcatctttcttgatttcacgcgttcagtatgatagagaaattttacatagtttttaaatgaagttttcaataaagattttcaaacacattttcttctatcattatcatttgctaatcaagcatagcttcgaatcgagatcaatcccacattcagtttttaattattaaccaagacttagccacagaaaatgaagattcgtacctgtcaatgcatccaaaagatgcgagcttagaaggcgcactgctgctgctcagaagaaatatatgtcaaactaaattctgtggtcatcggaaaatacaagcaggcaggcacataaagcgacagcgcttctgcgtcaaatcagaagtgtccacttaagctgaatgtatagctgggccagaagcaacacgaaaagtgggtctagtggccattgttttcagtttgctgatgtgcacaatggaaaagccgtgtgcatacagatacaaatactaagatatctatatttaaaaatctggacaacagctggaagaggcgaaggtaaggaaacagcaaagggcccgaatgcggtttagttgcgaaacgttgctcgagtctcggagatggcactgcagctgcaaattgagaagctcaaaggtttggacaactacaaggcctggtcgatgacggtgcgggcgtatctggagtcggaggaactctggacggtggtggagaatggtcccgagaacaacgaggaggtgagtgatggtgtggcgccgtttatggctacagaaaacccatgtccatgccatactccttgcagtccctgctaaaggacaagcgggccaagttcttgattctctgcctgatcgagaccaagttgtgccaattcatggtcagcatccgcacggctcgggatctgtggaattacttgcgcacccagcattcgctgcgttaaagtagaaatcaatatagatcagtttcagtccattgtattacaaatatatgaattacacttcacatgcgtagcgcccttctcctaggcttccggaagttcgatgactacaggctggtcctcgggatcctcgtctagcaggccctcgaattcccatcccaattttttctccagccgcttagttagccgctcagcgctgacacttaagccgcccgcatgcagattgaccagcagttcgcgtacatctttgtagacggtgttatgcggaccaggcaccatcagctcctcgggcagatggggcagctggtgggccaaaacctcgctgtatttcatgtacgttaacttgtgcttggtgaccgccgtttgcgagtgagccagcaagcccaaaagcttgcgccagtgggccagagactccacagagtagcccactaggaaaaatgcgtaagccagctgcagttcctcaatgagtccatcggccgtttcaaagccttcgagcagtttgtcaacagcatcgatgcagtccaaggcatggcgggaaacatcagcgggcagggcatcttgtggaacacgcaggggtacggtagtgaagcgcggagctgttccttccacgggcttaaggtccggtaggagttcgctctcatctaagagaatccgagctgcagcattccggcggcttatgctgacagtagcggctccacctcgcggccgatctgcgtccgggcaggattgcagttcgatgttcgtacggatggttccttctgtcggacggcagcgatccacgcaagactccgtcacgctgccggtgagttccttccactggaccacgtaacgatagtcgtacggcgccagcacgcgctccagttgggctaggtttttgcgtattcggtctcgctccacttccggttcggcaatcctccgcgggcgcaattcctccagttcgtggtcccactctcgtacgacaatctcattcggatggaagaagtgcacgaatccaacacgaggg

SEQ ID NO: 28214 - DNA, 270 bp, DROSOPHILA
atggcactgcagctgcaaattgagaagctcaaaggtttggacaactacaaggcctggtcgatgacggtgcgggcgtatctggagtcggaggaactctggacggtggtggagaatggtcccgagaacaacgaggagtccctgctaaaggacaagcgggccaagttcttgattctctgcctgatcgagaccaagttgtgccaattcatggtcagcatccgcacggctcgggatctgtggaattacttgcgcacccagcattcgctgcgttaa

SEQ ID NO: 28215 - protein, 89 aa, DROSOPHILA
MALQLQIEKLKGLDNYKAWSMTVRAYLESEELWTVVENGPENNEESLLKDKRAKFLILCLIETKLCQFMVSIRTARDLWNYLRTQHSLR

SEQ ID NO: 28216 - DNA, 4385 bp, DROSOPHILA
gcgctgccagcttcgctgccggcgttcgctgccgataatgtaaaaattttacggccacgaacttttagttcagttcagtttgcaacacgttcgcgttcgcatgtgtttccggcagttaaacttccgctcgattttctattcgatttccgttactgccgttgggcgcagaactgtaggcaacactttttgcagtgccgtcggaaaagcaaatttttcagattgaaaactgtgttcgtgaaaataatagtgaaagtactgaaaactgattaactcacgcttggattatcttttgagttgattacatctgcaattgaaatcaatgtaattagaacttcattggtttagaaggtttgtaacttttgcaatttataagaatttttggcccaaatcgagttccgtcggctttttaattcaagattactaaaaaagatttctgattttggatatgccattaaaagaattatttgagatttaccagcgttgagcttgtaaacatagcaataatgtataatttattatgcccaatattttaaaatgcattcaatgcttaaaattttataacggattctctaaaaatttatcattcagctaaaatctgtatgtttcaataagataaatacctaaaattttcaatacaaaatcatatttatgatagctcagatgatagcttaaatttgatttaaagtgcttatatgtttttacaagtttcttatcgttattaatttttttcaaattgaacaaagactgataaatgaacatgagtgattagaaagatacaaaataggataacatactagcttttctctcaggatctaagctccacaattaatgtagctagaaattcacagccggaatgtgtgtgaaatccacttgttacacccaaatggcattctcctaatgaagctcatttggcccgcacacgacattagcctcgcatatttagtcaaatcagcttaaatgcagcttgagacattcgcatatttggcctaaagcacaaacaatgagcgacaacagtgctgaggacttgggatggtgcttcacctgggagagcaactacatctgccacaatgaagcagcaactgtgacaaagtctcaattaggctatcacattgccacaaaacgattcaggtttggcttacctgggcaaacacaatgcatgcgagcgagagaagctggcattaagcaaattatacacttttcaaaattattctacataagctgatattataaaattttaacccttgtaatgaatgccagaaataatgtacaaaaaggatccattttaacattgaaatatagagttataattctaacttatatgcaaaagttgcagattcctctgttgattaaaaatattaaagatcctttaaaagaaaatttacttcttataattaaagatattgttcttattttaatatctaatttgataggaccatgtttatagacgattgtaaactagaaatattggtattgttaaccttagatactgttgtttctacttatattaagttagtaatacttcagttccaaaattgtcattgtgtagggaaagtcatcaaaaggtccgtcccaaccagttgtagttccattgttccatctcccaccacttagctgagctgaccaagcacttcatggtagagcaacttcttcagccagcgatcacatttcacttaattgtggatttaatcggggagtcgttgacacctggcagccacagaagctccacagcagagcaacaattaaacagaggcatttctcccatttgcagagcgaccgagaatcccggaggccagcggcagaaggcggacgacaactcggagacagtggcaaatacctaagcatgctgcagaatccttccaaatatcacgcaaatcccttgtcgcacttcctggcattgcataacacacaagccagtggcggcggcagcggcgggggatcgtcggtcgccggacttggaggtttgggtgggggcattcatgcacatggtcaaccgcatcatgcagcgctggcagcggctgcagcagcggcggtcgctgtctcggcgggtcagagttcataccaaatggagcaccagcagcagcatcatcagttgcagcagcagcagcagcagcagcaacatcatcatcatcagcagctgcacacccaccaccaggatggccaccacccacacccaccgacacccaccaccggcaacaacaacaacaacagcagtagcagcagcaacagcagcagccacaacagcaacagcaaccaccgggaacagttggcggcggcggcagccactgcgacgtcgcacgcgcagctcatcgaggcggcagcggcgcattcctccctcgacgtgggcaagtcctttaccatcgccgccattttgggcctgcagagccagcgcaaggactacaacaatgccatcaatctctccctgcacgacaacaacaacatcatcggtgacgacaacaacaagtgctacacgagcaaccccaacaacaacaacaacaacaacaataacggcggcagcaacagtggcaacaacaacagcagcccgagtgtaaacaacttcaattgtgatagtgtcgccggtaatggacgttacctgcacggcggacaccagcatccgcatccgcaccaggcgggatttgcagcggttgccgccgccgtcggagcagctccctccgccctgcagagcctgcagcagctccaccagcaacaccacgctcagcagcaggccaccctgagctttcagcgggaaaaactcaagtcgggtaagcaggtgtttcagtcgatgaataacccatgatttgatcataagtgggtattaagtaaacatagtgtgtgcacatctaatacctccatttgatcatcattttgtgattcggcagattctcacaagaagagcgcactgaagaacaagcgcgtccggacaatcttcacgccggagcagttggagtgcctggaggcggagttcgagcgccagcagtacatggtcggcccggagcggctctacttggcacacaccctaaagttaacggaggctcaggtgaaggtgtggttccagaataggcggatcaagtggcgcaagcaccacttggaactgacacaacaacggctggcattgataaggcaaactcaactgccaggtacatcgttattgggcaatcaagtatccgtgtcggccaatgcggcccattctgtgtccacggaacgcacaaacggatgcagtgcagcctcgcccagcctgcaggaggaggacaacgaggatagcaagcactcgctgtcgctttcgggcgcattaccgccgttgagtcgagcgcagtccgagtcggatttgtccatctgtaacgattccctggacggcgacagcctcatggacggcagcgaggaggcctaaaaaccacgccagtgcaaagcaagtttcctgtaaatatagtcaaataaatatgtacaatatcggttttctatacttctgcttgtctttaattgttgatgattagctgcaagttgattgttacaatcaatcaatgcaaactatattatattgtataagcattgcagtatatccattacatacgagtactgaaaaagcttatttaaaaacagaataatacagacatttacactcaattcgcactttataccttgatcagttatcacattggagtatttcacttattgctgagcagccgccctggcgagccgatcgtggcaggataggtgcacgatgtgcccatttggatagcgcacgaaggcggactgggtttgaaaacgcttcttgcactcggaacacacactagactcgtttaactcgaagctaatgtttcgctgctcctccaaggcattctccaggcgcgtggactctgcctccaggaagccgcacatcatctgcatctcgtgcttgtcggccatcattttacgtatagatttctccaagtatttctccagctggggcatgggcatgtcatcgggaaggtgctgcaaaatccaaaatggttgagaaatatttctaataagtcatgcattcaatgcattcttcacctcgaagatctcgaatggatcgattctggtggcgtgggtgttaagtatttccagggccacctctcgattcacttgcgagaaatccggatgcaagggcacaccatcatagagcggttgagttggtggtattaatatgcacttaatgagcgtgtgaaatatgtgcttgtcctctttgtaatgggcttccgcataggccgttgccttggccacatctccgagaacatgaatatagatggacaggacgttgtcgtgctttttgagcctgcccaggattagggcacgctcctccaagagtatattggttggaaattcctctaggaggcgatccggcgaatagtcgttggactcctccaaca

SEQ ID NO: 28217 - DNA, 1581 bp, DROSOPHILA
atgagcgacaacagtgctgaggacttgggatggtgcttcacctgggagagcaactacatctgccacaatgaagcagcaactagcgaccgagaatcccggaggccagcggcagaaggcggacgacaactcggagacagtggcaaatacctaagcatgctgcagaatccttccaaatatcacgcaaatcccttgtcgcacttcctggcattgcataacacacaagccagtggcggcggcagcggcgggggatcgtcggtcgccggacttggaggtttgggtgggggcattcatgcacatggtcaaccgcatcatgcagcgctggcagcggctgcagcagcggcggtcgctgtctcggcgggtcagagttcataccaaatggagcaccagcagcagcatcatcagttgcagcagcagcagcagcagcagcaacatcatcatcatcagcagctgcacacccaccaccaggatggccaccacccacacccaccgacacccaccaccggcaacaacaacaacaacagcagtagcagcagcaacagcagcagccacaacagcaacagcaaccaccgggaacagttggcggcggcggcagccactgcgacgtcgcacgcgcagctcatcgaggcggcagcggcgcattcctccctcgacgtgggcaagtcctttaccatcgccgccattttgggcctgcagagccagcgcaaggactacaacaatgccatcaatctctccctgcacgacaacaacaacatcatcggtgacgacaacaacaagtgctacacgagcaaccccaacaacaacaacaacaacaacaataacggcggcagcaacagtggcaacaacaacagcagcccgagtgtaaacaacttcaattgtgatagtgtcgccggtaatggacgttacctgcacggcggacaccagcatccgcatccgcaccaggcgggatttgcagcggttgccgccgccgtcggagcagctccctccgccctgcagagcctgcagcagctccaccagcaacaccacgctcagcagcaggccaccctgagctttcagcgggaaaaactcaagtcggattctcacaagaagagcgcactgaagaacaagcgcgtccggacaatcttcacgccggagcagttggagtgcctggaggcggagttcgagcgccagcagtacatggtcggcccggagcggctctacttggcacacaccctaaagttaacggaggctcaggtgaaggtgtggttccagaataggcggatcaagtggcgcaagcaccacttggaactgacacaacaacggctggcattgataaggcaaactcaactgccaggtacatcgttattgggcaatcaagtatccgtgtcggccaatgcggcccattctgtgtccacggaacgcacaaacggatgcagtgcagcctcgcccagcctgcaggaggaggacaacgaggatagcaagcactcgctgtcgctttcgggcgcattaccgccgttgagtcgagcgcagtccgagtcggatttgtccatctgtaacgattccctggacggcgacagcctcatggacggcagcgaggaggcctaa

SEQ ID NO: 28218 - protein, 526 aa, DROSOPHILA
MSDNSAEDLGWCFTWESNYICHNEAATSDRESRRPAAEGGRQLGDSGKYLSMLQNPSKYHANPLSHFLALHNTQASGGGSGGGSSVAGLGGLGGGIHAHGQPHHAALAAAAAAAVAVSAGQSSYQMEHQQQHHQLQQQQQQQQHHHHQQLHTHHQDGHHPHPPTPTTGNNNNNSSSSSNSSSHNSNSNHREQLAAAAATATSHAQLIEAAAAHSSLDVGKSFTIAAILGLQSQRKDYNNAINLSLHDNNNIIGDDNNKCYTSNPNNNNNNNNNGGSNSGNNNSSPSVNNFNCDSVAGNGRYLHGGHQHPHPHQAGFAAVAAAVGAAPSALQSLQQLHQQHHAQQQATLSFQREKLKSDSHKKSALKNKRVRTIFTPEQLECLEAEFERQQYMVGPERLYLAHTLKLTEAQVKVWFQNRRIKWRKHHLELTQQRLALIRQTQLPGTSLLGNQVSVSANAAHSVSTERTNGCSAASPSLQEEDNEDSKHSLSLSGALPPLSRAQSESDLSICNDSLDGDSLMDGSEEA

SEQ ID NO: 28219 - DNA, 3541 bp, DROSOPHILA
tctgaccagatcaaggtgcccaagaaaatacttccaaattaaaagcaaactttgctttccgcatcccttagaaaaatagaatcccgatatatattatttggactgctcgaacgccgccgacgagcccaaaaacgcgcgcacatttacaacgacaacaatacaaacttgagctcagtacgtaaacttttttgaccagctgccgttagaagcaaatcaaagctgcgacgatggatgactcacgcgaagaaagccagttcattgtggacgacgtgagcaagacgattaaagaggccatcgagacgaccatcggcggtaacgcctaccagcacgacaaggtgaacaactggaccggccaggtggtggagaactgcctgacggtgctcaccaaggagcagaagccctacaagtacattgtgaccgccatgatcatgcaaaagaacggtgctggactccacaccgccagctcctgctactggaacaacgacaccgacggatcgtgcacagtacgctgggagaacaagaccatgtactgcatcgtttcggtcttcggactggccgtctagagtggaggaatggcaggactgccggaattcgcgatgaagatgacttaaaagggggagggactaacaagattgccgtcgtacaccagcacacaccaacaacacaaataccatacttttttgatcggccatccatcctgctgtaataacaaaatttattatggagcacttgaaaaccttgtcgtcacttccaagcaattagcaagcaactattccgttgccagtgtactcgcctaatgttattcttgattttcaatctaaaaacgtaaataaaaagtgtataataccgtagcataataagttaatcattgcaaactgttttcaatgggtcatcattttttgggtcgtgggaatatttttcgtttccatggcagcaattggccattggtctaaaatcgatttaaattcccaggcatttgttaaaattaaactttaatggtctttctcttatttctttatttattttagtttatcaaaaccttctatcgtttagaataataatattccttctggcattgcccaaaataacaaaatcagaagtacctggatgcaataaatgtaattggcgcgccagggtttgttaaatcgatggcgggcgcggtgtccttgaagatactcctacttcttgcgctggaagcgacggcccgactttagagccggaaccttgctgggcaggcgcaggctaaggatgtccgaattggattttggcagagcgttcacaatgtgggcgtactgcttgatccgagccttggtggtggccaaagcacgggagaggacattgatgtccacttcgaacttctcactgaggagcagggccatcacaataaagtgtgtcagtgccttttcactgctgaaattggtgcgagttcccttctttgccacattgggatccgcaaaacgatggcgtatatcattctcgatcttctccgtgataccagagagctcagccttttgcatttgacgcgaacgaagggaaattagcgactgcaaggcgtccatgtagatgataagtttaatgtgcaagaagtctcgcttggatgaaacgggattttcctgaattttggccaaacatgacttgaggtattccgatttaatgctgcaaggaacagaaattttaacatttaaatgttactgcttttaccaaactacatacggtagagtctgcacaggcgtggagaacaccactttggcctcctcctcgagacgttcgagcagagagctcgggatcaaactttccacagcgtagacttcgtccactttggttgcctccttgttgaactcgggcacaatgctggccaggtactcctcattgttgatgctcacatcacccagggtgccgtcctcttcgtcttcgttgagcatgctcgaattcaccgtttcgtccagatcctgacgcatcacctccacgttgaccatcatctgttcgcggttgtccacgaagcgggatgccttgcgccctccaaactccttgagcagcttcttgttggcgtgctcccggctcatcgtgggacccgttctcttctgtcgctccagtttcttgtaaacgtgattgtacatcaatgcctcttgcactggcacgactttaactttgttggttaatttgttccttatgaaaatgtaggtatcgacttcctcgctatccttcacctcgcccgtgtacacctggtcacccgcgtatactaaggcatgctttttgccatctacggtgctctctaccatgctgaaatctgcgtcgcccaaaagagatccattctggaatttcactatggatggaaggtgagattgtatattttcttcctaattgatggctgcacttgttaacttacgtatggtaggtatgttctcgtctcttttatgatcgcatacggattctattataattttatcttccattgttactgcgttatatttgaatttttctggcttttagaaacaattcaaatgttgcacgtgtggaaaacaaaacagatgacatgcgatggacgaaagctgagtgatatgaaagccgattccagccaaaatcgaatagtcgataagaatcgatagttcaaattttgaaaattggtttcgacagcatttaatattaaaacatttactaacctttgactaaactaactcataaaatttaaatctagatctggtaaacataagaaagattaatatatcattgttctaagcagcagactacttattataaattctaaaatagttttctgtttcacgaaaattcgtttttcattttaaaagaatatatttaaaatctaaactacgtgtcaaacttaagcagtggtaatactttatggacgtcttgcagcttctggtgaaaaggtaaatccagaaaaggtaacatgtttgctttttacaattttaaccacttgctgcaatattagaaaattaattatacatataaatatttcaatataaattccaacataccataacgagcttaatgaggaaaacggcgaatgtcaaaaagttgatgctcatgattgccgcctcaggcggaaagtctatttccgagtcatccaaaattccacgtcgacgtctcctttttcgctctggtggctgccaaagaaccgagaactgttgctctacaaaatcagaagattaattataataaggcaacatataagatcttaaaacctataaaactaacctatcaattttataagattatctcgtaggttttgaagcaactttattttctttccgaaagtgagagtcgatttcttgatccaagttttctgcatgtcctttagaaacttgaagaatccttgaacgctgggcaccccaacttcctcatcttcgtttggtggctccgtggattcctcgtcctcctccgattccggatttgcgttttcggttgagctggatgaatgtttcctggatgtagtctccactttcggggtcaccacctctacatttgggactgttggtgccttggtggacccaaacaagaaaggattactgctcataccgaa

SEQ ID NO: 28220 - DNA, 1421 bp, DROSOPHILA
catcgcatgtcatctgttttgttttccacacgtgcaacatttgaattgtttctaaaagccagaaaaattcaaatataacgcagtaacaatggaagataaaattataatagaatccgtatgcgatcataaaagagacgagaacatacctaccatactgaaattccagaatggatctcttttgggcgacgcagatttcagcatggtagagagcaccgtagatggcaaaaagcatgccttagtatacgcgggtgaccaggtgtacacgggcgaggtgaaggatagcgaggaagtcgatacctacattttcataaggaacaaattaaccaacaaagttaaagtcgtgccagtgcaagaggcattgatgtacaatcacgtttacaagaaactggagcgacagaagagaacgggtcccacgatgagccgggagcacgccaacaagaagctgctcaaggagtttggagggcgcaaggcatcccgcttcgtggacaaccgcgaacagatgatggtcaacgtggaggtgatgcgtcaggatctggacgaaacggtgaattcgagcatgctcaacgaagacgaagaggacggcaccctgggtgatgtgagcatcaacaatgaggagtacctggccagcattgtgcccgagttcaacaaggaggcaaccaaagtggacgaagtctacgctgtggaaagtttgatcccgagctctctgctcgaacgtctcgaggaggaggccaaagtggtgttctccacgcctgtgcagactctacccattaaatcggaatacctcaagtcatgtttggccaaaattcaggaaaatcccgtttcatccaagcgagacttcttgcacattaaacttatcatctacatggacgccttgcagtcgctaatttcccttcgttcgcgtcaaatgcaaaaggctgagctctctggtatcacggagaagatcgagaatgatatacgccatcgttttgcggatcccaatgtggcaaagaagggaactcgcaccaatttcagcagtgaaaaggcactgacacactttattgtgatggccctgctcctcagtgagaagttcgaagtggacatcaatgtcctctcccgtgctttggccaccaccaaggctcggatcaagcagtacgcccacattgtgaacgctctgccaaaatccaattcggacatccttagcctgcgcctgcccagcaaggttccggctctaaagtcgggccgtcgcttccagcgcaagaagtaggagtatcttcaaggacaccgcgcccgccatcgatttaacaaaccctggcgcgccaattacatttattgcatccaggtacttctgattttgttattttgggcaatgccagaaggaatattattattctaaacgatagaaggttttgataaactaaaataaataaagaaataagagaaag

SEQ ID NO: 28221 - protein, 384 aa, DROSOPHILA
MEDKIIIESVCDHKRDENIPTILKFQNGSLLGDADFSMVESTVDGKKHALVYAGDQVYTGEVKDSEEVDTYIFIRNKLTNKVKVVPVQEALMYNHVYKKLERQKRTGPTMSREHANKKLLKEFGGRKASRFVDNREQMMVNVEVMRQDLDETVNSSMLNEDEEDGTLGDVSINNEEYLASIVPEFNKEATKVDEVYAVESLIPSSLLERLEEEAKVVFSTPVQTLPIKSEYLKSCLAKIQENPVSSKRDFLHIKLIIYMDALQSLISLRSRQMQKAELSGITEKIENDIRHRFADPNVAKKGTRTNFSSEKALTHFIVMALLLSEKFEVDINVLSRALATTKARIKQYAHIVNALPKSNSDILSLRLPSKVPALKSGRRFQRKK

SEQ ID NO: 28222 - DNA, 5983 bp, DROSOPHILA; identical to SEQ ID NO: 17506

SEQ ID NO: 28223 - DNA, 937 bp, DROSOPHILA
gcaacgccgccgcacgcctgcagccctggtaactctattttctattgagcaccgacaacgttgcgtgtataagacagtttacataaattattatttacaattgcacagagcgttgatgttgtgcgttctaagcgaaaagtgcaaatataattttcagatagcaatcaactgagagcggtccagcccggcctgttgtatttgtttgtttgtccggttgtttacgtttttttctctcgttctcgctgcttttcatacgtattttatattttgtaaaaataaaaaatcgttataaaaaaccaaaaacacacatagaggagagcacatccaaagagccaaaaagagtcagaaccgattgcgtattatggataacgaggcgttagatccaacaataaaaagcagtacgtcggcagcgacgccaacagcagcagcatcagaaacgacaacaacagcagcatcttcagttgtggaaaccacaacaacaatcgcggcggccacagcctcagcggcagaatcaaaaaacgaaacaacggccacaaacaacaatagcaacacaagcggcagcatcagcagtagtagcagcaacaatatagtcataccggcatcggccactaacggtatcaaagagagtaacagtaacttaagtacaacaacaacagcagcagcagtagcggcagcaacaactgtagaaggagtagctccagcaataacgtccacaatcgtggtgaccggcggcactcctccattgagcagtttggctaacaaactcaaggacaacacaccaccgtacgatgcaccgccgcccacgccgatcagcaaggtcctgaacatcaccggcaccccgatcgttcgcaaggagaagcgccagaccagcgcccggtacaatgcctccaagaactgcgaactgacggccctcattccgctaaacgagagtgagtag

SEQ ID NO: 28224 - protein, 191 aa, DROSOPHILA; identical to SEQ ID NO: 17508

SEQ ID NO: 28225 - DNA, 4837 bp, DROSOPHILA
taatttatttaagataaagttcaattgtttatttatataatcatataactaattggtttgaaatttgtagtttttgtttgtatttctttttgttgttatttactcctaccttctttcgctctaaattaattacatgtaaaatcacagcagtctttcattaaaaaatagatttatcaatgttgtgtttaatccgtagaatataactctaaacatagatcgtgtgtataataacagaacaaactttcacactacactcataaaaaatgtttaaaatttaacggaatcaagagcttaccactaatcggagctactaattgccactgcaaactaactacagatttagtaatcacctatatatattaaaattaagtgtatctatatctcatacagatatagatgtacgtatagtcattgaactgagttgacaaaataaacatttttatctcgtttacgaattgcacataagtcaaaattatcattagtcgatatatttatatatagtatagttctaaatattgataatcattacggctagaacgaacgttggtttactttgtatgaaatttcggctactggaatgtactttacttgctcctgttgctgaaaaaccttgcgccaccaaatttgtattacaaattcactaaactatcttggcatgtgcgttattcgttaaaatataatataatatgttagcgaatattttaaatatttctacacgtatatacacgtttctttttgaattgaactacctaagaatcggtgtggcctacgaaaaattgaaaaatgtatttataattgatattcaaaattttgattacgctactgaacatgaaaaacgggaaagggataaactttgttatgaaattgaaacataactcctgtccaattgctactggtttaggatggctatatcgtacatatcgactttaatcacagctacgcagagtttaggcaaggcgagtagtcattttgggtagctagcagggcgggattccataatttagcctgccacctgctgcatggtgatggtgcttatcaactgctggcatatctttccatactcgaactggtccccggaaatgcgacgcagcttgatgcctttgccggcgccatgatgatcgcggctgcgtccctcgcacacttgaagctcgatctgcaggccgcctgagtactccaaactgagatttgtggttggctctccatatccagagtgtgaagcgagcagagaagccgcctcgcaggccagaggattcgaggtggatgcattcgaggcactgctatgccgcgattccgctccactgtcctccgagctaatgcttcccttgtgcaggacaaagcccttcggtggcattgtcgagtctatggtctgcttaaccatctccaagatgcgcgtggagtccagattggagcactcatgtggcagcggcacttcgtaacacatctcatccgacatgcgccgcgagtcgcacatggaatcgggcgttagatgaccacattccgtgtgatcgcccatctccgagtgggaatccgatttaaaaccagagctggcggatggctcctggcacggcgacaggttattcgagtcattgcttagtgaatcatcagagaaaccaagcgatttgtcactgccacgccggcattgagcttcggtttgagcttgtgtttgggattggttagcgtgggaggagccactggctactggacaatgacttccagcgcccgaatcgcagtctaggctggccttacgtccaatgcccctggtgattgaaggcatatcgctgctgggctccgtgatgataagcccctgtaaaggtattttattaaaaatgaattctcgtgatatttatgaacaatattaagattaatgattatgcacaagaaacaatcaatatatctctaattcttattcctctcacctgcagtgacattactggagtgtgctgctcaagggagtcctcactatcacgactattgtccgaggataaagccaccaaagtgatctcactgccctggacatcggtgaggcatatctgcggcgtaattcctcccgtacaaccggcgtatggagtacctgtgctgatagtatgacacatctgtccgtttccattctcctcctggatgatgcacaaattgggtgaagctggcggcgtgggcacgaccctcacaggttgtgcgggcgataggttaaggggtttcatgtcgtagtacgaggccgtgggcataaaccaattggttgctgcatagtccgtgggctgctgatccattaccccgccgcaaacatccatggacaggtctagaggttggttagcggcagcggccgctgctgctccttcgctggctgctgaagtgcctctggtgatagaaccaccagcacatcccgtacttaaaccagagatgcccttagtgatctgatgcagcggcgaagagccaccggcggcacctggcaggtatggattgggcgagcaactaccgctgaagctggtgctgaaaacaggcgactggcagccgctgcttgaattcgagttgctggctcccaaattaatgctgctaaactggccaaccagctgctgttgatgctgcggctgcagggccagggtcataggttgatattgcgtatagccacagatcggttggccaaacatctgcttggccgaggtcagcgaggcattcacagctccgccctgcggcatgctgagcggcgatacactgaagctgagcatgtgctgctgttgctgttgctgctggagatgcgtgaagtggctctggtcgagatgacctccactaaccgccgccgcactcgaagcatgagctgccagtcccaggagcggagccaagtccatcggcaccacatgcgttgagattattttgttggctatttcgaagctaacacgctgctccttaaccagtcgatccaatgcgggcatcagattcttgatggcttccggaggaacttcgatgtcatggccgcgacgcagagccagctgcaaacccatgcccggttttccatgtatgggcgaacctgtgaaagcaattttcatattatttaaaaatccatttgaatagtaagcttgtgtagaagcttgtggcgttcgttttggtctttttatctcacctggcaaactgatcgaattttctaaaagcggcggactgggtgcaaccaaaaagtttctctgtgcaatacctttctgcagggactggcattcctgcagtggtccttggaactgactcttcgatccctccgatgctcgacgcactggactataacgtcctattgtcgctaaatgacaggcaacaggaaaaaaagaaaggagaatcgagaatgtgaacctttttgttgcaaccccataacttataaaatagttttaacaaggattttatttatggttcacaaaggttatgtttggaagcgaaaacatatatgttatgatatgttacacacgtaacatatcaactaacaaaaaaaattatgttatgtatgttaattatttaaaggaaaatgaacacgaaatgtacctaaagtgagtagatgtattggttattggttattttattgtttgaacactttgcttaactccaggatgacccaacaaagaaaactcaagacttaccaccctcctggacggtgggcaacttcgagtggaccacccgatggattcgccgattattgggcgccaccagtggcacagagccaccggcggccgccaccaagggcagcgagtgcggcggcgataggcccttggacatacccatgggcagagccgcgcccaccgggtaggtgccattggggggcgattgactgagagatttcagggtgggaggtagatagtcacgtttcatgcgagactcaacctcgcgaattatctcgggtggaatcactatcggttgtggtcggattaggtagtggggatttttaagcagcgagatcgggagcggtagcggttgtagttgttgttgttgttgttgttgtgcagtagcgggcaatgcaaaattatcaattgcaataaaccaaaaatgtttacataaaaagaaagtttaaaaaggcaaaccatcaaattaatacagtaatcaaattataattaaatacatgtgtacaaaatgaacatgtgagcacatatcttatataaacacttaataatacactatatctctgatttaaggctatatatagagcagcatgcagtttaaatttttaagccaaatttaaattataatcttaattttcctattaaaatggcatcctatattccacatattcagaatgattcgatattgcatattttataatattttagttagcctctctaacgcacctggcggtctctcggtgaccgtgagcaatcctgttcgccgctgccgcatattggaggaggtagttggcgcctgggactgtgatcctgctcctgatccatgtgctacggatagatcctccgtgcagcccaccgtatggcgctgggtgcctccacgcttttgcatatagctacaaagaattgaatgttatcatgttcctaagaaggaaatatagattcaagtcaacctttgcagctcctcgttgcattcgccggtggcattctcctggcagcattgcatctgcgccaccgactgttcgttgagcggcgacagctcctgcactgccaaaggatctgtgccgcaattcggattgatatagtacccggccgtgtccatttgctgaccctgagctggacccacaacggtgcccgtggcgggatagtagatgtgaagatttgccccgccgtctgaggcacgacgcccaaatgagcctagaaaaatagatgccacattaatgttgtaaatgaacacttctgtcatattggcaaat

SEQ ID NO: 28226 - DNA, 2301 bp, DROSOPHILA
atgaaacgtgactatctacctcccaccctgaaatctctcagtcaatcgccccccaatggcacctacccggtgggcgcggctctgcccatgggtatgtccaagggcctatcgccgccgcactcgctgcccttggtggcggccgccggtggctctgtgccactggtggcgcccaataatcggcgaatccatcgggtggtccactcgaagttgcccaccgtccaggagggtgcgacaataggacgttatagtccagtgcgtcgagcatcggagggatcgaagagtcagttccaaggaccactgcaggaatgccagtccctgcagaaaggtattgcacagagaaactttttggttgcacccagtccgccgcttttagaaaattcgatcagtttgccaggttcgcccatacatggaaaaccgggcatgggtttgcagctggctctgcgtcgcggccatgacatcgaagttcctccggaagccatcaagaatctgatgcccgcattggatcgactggttaaggagcagcgtgttagcttcgaaatagccaacaaaataatctcaacgcatgtggtgccgatggacttggctccgctcctgggactggcagctcatgcttcgagtgcggcggcggttagtggaggtcatctcgaccagagccacttcacgcatctccagcagcaacagcaacagcagcacatgctcagcttcagtgtatcgccgctcagcatgccgcagggcggagctgtgaatgcctcgctgacctcggccaagcagatgtttggccaaccgatctgtggctatacgcaatatcaacctatgaccctggccctgcagccgcagcatcaacagcagctggttggccagtttagcagcattaatttgggagccagcaactcgaattcaagcagcggctgccagtcgcctgttttcagcaccagcttcagcggtagttgctcgcccaatccatacctgccaggtgccgccggtggctcttcgccgctgcatcagatcactaagggcatctctggtttaagtacgggatgtgctggtggttctatcaccagaggcacttcagcagccagcgaaggagcagcagcggccgctgccgctaaccaacctctagacctgtccatggatgtttgcggcggggtaatggatcagcagcccacggactatgcagcaaccaattggtttatgcccacggcctcgtactacgacatgaaaccccttaacctatcgcccgcacaacctgtgagggtcgtgcccacgccgccagcttcacccaatttgtgcatcatccaggaggagaatggaaacggacagatgtgtcatactatcagcacaggtactccatacgccggttgtacgggaggaattacgccgcagatatgcctcaccgatgtccagggcagtgagatcactttggtggctttatcctcggacaatagtcgtgatagtgaggactcccttgagcagcacactccagtaatgtcactgcaggggcttatcatcacggagcccagcagcgatatgccttcaatcaccaggggcattggacgtaaggccagcctagactgcgattcgggcgctggaagtcattgtccagtagccagtggctcctcccacgctaaccaatcccaaacacaagctcaaaccgaagctcaatgccggcgtggcagtgacaaatcgcttggtttctctgatgattcactaagcaatgactcgaataacctgtcgccgtgccaggagccatccgccagctctggttttaaatcggattcccactcggagatgggcgatcacacggaatgtggtcatctaacgcccgattccatgtgcgactcgcggcgcatgtcggatgagatgtgttacgaagtgccgctgccacatgagtgctccaatctggactccacgcgcatcttggagatggttaagcagaccatagactcgacaatgccaccgaagggctttgtcctgcacaagggaagcattagctcggaggacagtggagcggaatcgcggcatagcagtgcctcgaatgcatccacctcgaatcctctggcctgcgaggcggcttctctgctcgcttcacactctggatatggagagccaaccacaaatctcagtttggagtactcaggcggcctgcagatcgagcttcaagtgtgcgagggacgcagccgcgatcatcatggcgccggcaaaggcatcaagctgcgtcgcatttccggggaccagttcgagtatggaaagatatgccagcagttgataagcaccatcaccatgcagcaggtggcaggctaa

SEQ ID NO: 28227 - protein, 766 aa, DROSOPHILA
MKRDYLPPTLKSLSQSPPNGTYPVGAALPMGMSKGLSPPHSLPLVAAAGGSVPLVAPNNRRIHRVVHSKLPTVQEGATIGRYSPVRRASEGSKSQFQGPLQECQSLQKGIAQRNFLVAPSPPLLENSISLPGSPIHGKPGMGLQLALRRGHDIEVPPEAIKNLMPALDRLVKEQRVSFEIANKIISTHVVPMDLAPLLGLAAHASSAAAVSGGHLDQSHFTHLQQQQQQQHMLSFSVSPLSMPQGGAVNASLTSAKQMFGQPICGYTQYQPMTLALQPQHQQQLVGQFSSINLGASNSNSSSGCQSPVFSTSFSGSCSPNPYLPGAAGGSSPLHQITKGISGLSTGCAGGSITRGTSAASEGAAAAAAANQPLDLSMDVCGGVMDQQPTDYAATNWFMPTASYYDMKPLNLSPAQPVRVVPTPPASPNLCIIQEENGNGQMCHTISTGTPYAGCTGGITPQICLTDVQGSEITLVALSSDNSRDSEDSLEQHTPVMSLQGLIITEPSSDMPSITRGIGRKASLDCDSGAGSHCPVASGSSHANQSQTQAQTEAQCRRGSDKSLGFSDDSLSNDSNNLSPCQEPSASSGFKSDSHSEMGDHTECGHLTPDSMCDSRRMSDEMCYEVPLPHECSNLDSTRILEMVKQTIDSTMPPKGFVLHKGSISSEDSGAESRHSSASNASTSNPLACEAASLLASHSGYGEPTTNLSLEYSGGLQIELQVCEGRSRDHHGAGKGIKLRRISGDQFEYGKICQQLISTITMQQVAG

SEQ ID NO: 28228 - DNA, 3276 bp, DROSOPHILA
ttttcagttattaggctataaaattatggtagattaaggtatcactggtatctctgtttgtgaagcgaaataagcccttgaagtgagtgtaaaatgaaacatcagtttggaaattgctcgtgtgaatttagttatgcacgatatttcacgcaattgaagccattcgcatgttgcccttcattcattcattcagttgaggaaagaggcatcgaatgaagattgcttcgaagggataaattatgttttagttttttaagtttaataaattcaatcgttctagatgctttactttaattttcacttgaattgaaactgcacaaccagcgtaaaagcttacagttttggagcctctggtctgggcactcaacgtcaaaccgacacacccacaaatttctatacaccccccgtcaaacacacacacaagcccccacatacgccgaaggtcaatgaaagtaaataaaatcgaaagttttgcccagattgataagcgaaaccagcggcacgtgtcgctcacatataacataaatcaaataaaagcattggaaagaccagagctgaaaagcttttgccggcgtcactggaactcaagataaaatatatgtataatgtgctaaccatatggttgatagctagcagagctacttgttgagaacttgttttgatctagcagagttgtcgcgacttcagaagaattatatattatattttattatattattatattatatatattgatatatatttaagttttttaaagatttttaaaatatataaaaagttaatattattacttattgtttaacatatcgaacttttccaaataaataaataaataattaatagatataaagatttgtttggaaatggttttactatattaattcaatgtattaattaattaatattaattagtgtagccgacaaccctcgagcggccgctggaatgagctgaaaataagcgaccttccaacagcagggagcagtgtgcttctgacagcggtccgatcacgtagaacttttgcagtttcagccgtatccccttagatttcttacaccaacaggtgggtgaaatctggtggctagttgcctatttgaagtgattacataacactgtagaacttttcgcagacatgtcgctccgtgtgatgtcccccgctatgctgaatgcctggagccagaccctcgtgagggccatgtccacccagggcggagccaagaacatcggcttcgtgggtctgggcaacatgggtgccaacatggccagcaatctaatcaaggccggccacaagctgcatgtcttcgatatctccaagcccgcctgcgatggtctggccgccaagggagccaccgtctacgccaagacctcggagctggccaagaactcggactttgtgatcaccatgctgccgaacaatgccattgtggatgcctcctacgatgagatgactgccgatggcgtcaacaaggacaccatcttcattgactcgtcgacgatctcgccggatttggtcaagtcgttgcagaagaagatcagcgccaagggagctcggtttatcgatgcccccgtttccggcggagttcccggcgccgagcaggccaccctcaccttcatggtgggcggcaccgaggcggagtacaatgccgtcaaggccgtcctagagtgcatgggcaagaagatcacccactgcggcgtctatggcatgggccaggccgccaagctgtgcaacaacatgatgctggccatctcgatgatcggtgtttcggaggccatgaatctggcggtgcgccagggtctcgatgccaatgtcttcgccgagatcatcaactcctccaccggacgctgctgggcctcggagatctacaaccctgtgcccggagtctgccccagtgccccagccaacagggactacgccggcggtttctcctcggctctgatcaccaaggatctgggtctggcctccggagtggccaacgcttccaactcacccatcccgctgggatctctggcgcacaaggtctaccagtcgctgtgcgataagggtctgggcaacaaggacttctccgtggtgtacgacctgatgaagaaggagaagttcagcgtttaggttactcacagactacaggttgtggtggccacaaccacgtcatgtccacatccaaaccagtcctgcatttaaatatagcactaagttccctctatttcgatttctattgtgactgttccctgttctatgcaaataatacgtacatatattaaagacgtatcgtattgagtgaaaaagttccatgctgttgcgtaatcgtggggctggtctgattaggtctgggaatcgtctgacgaacggaactccgagtgctgataagcacctacaaaaaagcatctgggttgctatattttattgccacttatgagacccctgcaaatacaattcctgattaggggttatctccagcactcgtggcattagattccacatggagatcgtttttaattcataaagcttgccaggtaaacagagcatagagtcgagcaaaacaaacaacattgaaagatcccaatggaaattatggcgtggttatcaaaagctcacggattgagaagcactggcggaatgtttcgcaaagtaattttatgtgggtagcactaaaacttacagtttgaatggctctttgttgacatactttttgagatgggtacaatctaataagaaaacatatatagatataaggatttgcatattaaattctcacagctttagtaactatgtttaaatattaatatttgtttaccgaaaaaatggggattcgttttataaaacgtagagataagtagtggaaccactctgataagccatatcaaagaggggtgtttatttaagtggctagttcgacactcacacatcccagcttttatcttctaataattttctgccacagaaagcttaattggcaagtaaacagaggaccgagcaaaacaaacaactgttttgtggcaactgtagaatctgcatagaacccagacagttacagctctacagttttagcatcactccgcacagtggtcaatgtatttttcaaagcgacatattttgagcgaaatccaaaaatatttttatttttacaatcatatatatatatatatttaaaaataacaaacttaacttaggtgctaattaattaattgagttggtatgtatgtatataaaaactttgttgttgctctttttgtggggtataaaatagttcaactatctaaaatgtatcaaatcgatcaat

SEQ ID NO: 28229 - DNA, 464 bp, DROSOPHILA
tccgatcacgtagaacttttgcagtttcagccgtatccccttagatttcttacaccaacagacatgtcgctccgtgtgatgtcccccgctatgctgaatgcctggagccagaccctcgtgagggccatgtccacccagggcggagccaagaacatcggcttcgtgggtctgggcaacatgggtgccaacatggccagcaatctaatcaaggccggccacaagctgcatgtctgggcaacaaggacttctccgtggtgtacgacctgatgaagaaggagaagttcagcgtttaggttactcacagactacaggttgtggtggccacaaccacgtcatgtccacatccaaaccagtcctgcatttaaatatagcactaagttccctctatttcgatttctattgtgactgttccctgttctatgcaaataatacgtacatatattaaagacgtatcgtattgagtg

SEQ ID NO: 28230 - protein, 67 aa, DROSOPHILA
MSLRVMSPAMLNAWSQTLVRAMSTQGGAKNIGFVGLGNMGANMASNLIKAGHKLHVWATRTSPWCTT

SEQ ID NO: 28231 - DNA, 3323 bp, DROSOPHILA
tatgtggaatgattcgattggatttcggggattatcccttgtgcagtcgagagttgtgaaaacgaattagtaaattccatttaagtcgaagttattccaaaaagctaggcaaatccttttgctagtaaacagcttgcgaaataataggaaatttcaacctatttgaatttcaacaatgatgctgattgggaatttagaaaacctaaacttataaatccattgaaaaatgcagacagttttataaaacaagaaggtctaatcaataagagtggatacttttcatcttcggttaaatgcgcaagtttatgatgattcgattcgatttctggggcctcattcgatatgcattaatgcttctttgtgccgaaggaatcataaaatcaaatatgcattgaattaccgtgcaggcaggacaattatattatacctttttttcccaaaacaaaataccaaaaaaaaaaaaaagaaatgaggggaaaaacaagtaagccgcaccgaaaaagggaatatttaactcaattttctggacctgaatttgctaccacaagcagctggggcacctccaggcccattcctccagcggaaaccctaaatcggccgcatttttcactcaacatttttgcttttttgctttttttttatcttagctccctcgtttatgcgcaaaagtgcgtgtaattcaatttttcatgcgccatgtgacagggggatgtggaagttgggaaggtgtgtggggtttgcagctaccttttctgccgaaattaagacaaagggaaatatgcgctaaaggcatatttggcacgcaattttacatggcgtgtccttattgatgggccatccttttttcccgttatcgttatcaatttttaatgccctttaaaaccctttttttattgctgtctgtgctgcgagaggccattgacaaagacctcggcgcactcgattgtattatacatgagttgaaaatgttgcaacaggatattgtaattagggatcccttctagcgttggttttgcgtgcggcggcggcgtccctgatgtgcggacgcatttcgcggattattcggcacgggtggtgctggtggtggattcatgacaccagagccggatccattcccgttggaagggcgcgctgcacggttagtgttggcaaagcggaaaacttgtccgtatggcaggatgaaatcgcctccttgatcagcgtttgaggctcctacgaacatgctgcgctcgatggcgaacccgagctccagatcctccagaggcgtagccaaggcggcggtcgatgaggcatgctgaggtcctgattgctgtcccgactgctggggttggtgaaccgctcgttgctgagtctggatcaccgcctgcgttagctgagggaggagcagctgggcaggctgagctgctgcctgctggacctgagcctgtggctgtgcctggacctgggcctgagcctgggcctgagccagagcctgggcctgagtctgagcctgagtctgggcctgggcctgagcctgtgcctggacctgagcctgtgcctgggcctgagcctgggcctgggattgagtttgttgattcacctgaccctggttaggtgcattagcttgtgagctcggtatgattcgggctgtcaccagctgtccgtccatcttcatcaagaacggagcaccaccatagcgctccatcatcatatcgtcgagctcgccgaaatcctcatcctccagctccagatccgcctcaaagccaccgcaatcgtcgtagttgatgcggcgcgtaaattctacaaagctgtgcagtctcgtcgacaaaaactcgcgatccctggacttcgccgacgtagtaggaccattatcaaaatccaacaaggcccggtactgtgtgctgcactcataggccattagagtgtcgtacggggaacgggcaaagttgatcagttcgtggatgaaaaggtccgtattggcgccaaaaaagtggatcatgggctttcggaactcctcgctgtccagcttaagacgtggaagcagattcttgatggtctcgtacagatagaaaatatccgccttcctggtcctgatcagcaccgatacatcgcggttcacccacatcattaccctatgaacctcgaagggattgagactacaaggaaatgcagaaatgagaacatggctgaaatttcccttatttgtattggaggaggaaattttcactcaccggaaatattcgggggaccagccgcgaaagtcgcccgtttcacgatccggcagagaatatagcgaattggcgtagacatatatgcgccattggaccatgtgccgtggcatcattgttgctgcactccacgtgtcgacaatgtcgaaattgttcgaagaaaaaacagaaacagaaactttacacgtgaacgaaaattcctggaattgtcaatcacaaattcgatttaatactgatttcactgctcactgtcgctcgcgaaatggaacttttccagctgtgcaatatgatacagtatttaccttataggaattaaacaattagctcgttctttaaacaattccaattgaaactcagcgaaaaagttttgcttattgcgcaggcacaacggctctgtggcacgtttttatttggggcgcatctacacgatgcctaatgtcaagtgtggaaagtaagggactgtttagacaatgccataaattaacctgcaaatcgtgacaaatcgggacatcggaaatcgaatatactctgaaatcactggaaacattgaattgaaacaaaatatgcataaatttaacaaaaaaaaaaatgcgcaaggtgcctatgccggggggcatccttgatccaatgagaattacttttagaactttacgaaatatgaaatgacacttatttatctttaatttaatctttacatttattatgtatttgattcgtattacagatatcttttgttcattgtatgttgagtacactaaaattcataactggccacgcccacttatgcaaaaaacattaacaccctcctcatacattgatcagcgctaattctacgatttaaaagctacgatagtaaagttagttgccattgtttatagttagttagttatagatgccgctaacctacgtgaatacatttacaatcgatgttcttcagggggatattgaatgcgtcttttgatgtggaagggggggggtggtatatgtatgtatgacagaacatttaaataatgttgggatgggtgtttatatatgtatgtacaacttaaaatggcaatcttaggcctacaatacatgagttacaattacaaatattattttatggggtttggggat

SEQ ID NO: 28232 - DNA, 1248 bp, DROSOPHILA
atgatgccacggcacatggtccaatggcgcatatatgtctacgccaattcgctatattctctgccggatcgtgaaacgggcgactttcgcggctggtcccccgaatatttccgtctcaatcccttcgaggttcatagggtaatgatgtgggtgaaccgcgatgtatcggtgctgatcaggaccaggaaggcggatattttctatctgtacgagaccatcaagaatctgcttccacgtcttaagctggacagcgaggagttccgaaagcccatgatccacttttttggcgccaatacggaccttttcatccacgaactgatcaactttgcccgttccccgtacgacactctaatggcctatgagtgcagcacacagtaccgggccttgttggattttgataatggtcctactacgtcggcgaagtccagggatcgcgagtttttgtcgacgagactgcacagctttgtagaatttacgcgccgcatcaactacgacgattgcggtggctttgaggcggatctggagctggaggatgaggatttcggcgagctcgacgatatgatgatggagcgctatggtggtgctccgttcttgatgaagatggacggacagctggtgacagcccgaatcataccgagctcacaagctaatgcacctaaccagggtcaggtgaatcaacaaactcaatcccaggcccaggctcaggcccaggcacaggctcaggtccaggcacaggctcaggcccaggcccagactcaggctcagactcaggcccaggctctggctcaggcccaggctcaggcccaggtccaggcacagccacaggctcaggtccagcaggcagcagctcagcctgcccagctgctcctccctcagctaacgcaggcggtgatccagactcagcaacgagcggttcaccaaccccagcagtcgggacagcaatcaggacctcagcatgcctcatcgaccgccgccttggctacgcctctggaggatctggagctcgggttcgccatcgagcgcagcatgttcgtaggagcctcaaacgctgatcaaggaggcgatttcatcctgccatacggacaagttttccgctttgccaacactaaccgtgcagcgcgcccttccaacgggaatggatccggctctggtgtcatgaatccaccaccagcaccacccgtgccgaataatccgcgaaatgcgtccgcacatcagggacgccgccgccgcacgcaaaaccaacgctag

SEQ ID NO: 28233 - protein, 415 aa, DROSOPHILA
MMPRHMVQWRIYVYANSLYSLPDRETGDFRGWSPEYFRLNPFEVHRVMMWVNRDVSVLIRTRKADIFYLYETIKNLLPRLKLDSEEFRKPMIHFFGANTDLFIHELINFARSPYDTLMAYECSTQYRALLDFDNGPTTSAKSRDREFLSTRLHSFVEFTRRINYDDCGGFEADLELEDEDFGELDDMMMERYGGAPFLMKMDGQLVTARIIPSSQANAPNQGQVNQQTQSQAQAQAQAQAQVQAQAQAQAQTQAQTQAQALAQAQAQAQVQAQPQAQVQQAAAQPAQLLLPQLTQAVIQTQQRAVHQPQQSGQQSGPQHASSTAALATPLEDLELGFAIERSMFVGASNADQGGDFILPYGQVFRFANTNRAARPSNGNGSGSGVMNPPPAPPVPNNPRNASAHQGRRRRTQNQR

SEQ ID NO: 28234 - DNA, 2630 bp, DROSOPHILA
tagtgcagaaggccatcataagggggaaaccattcgatcggcccagctccatcagggtggcggccaggcgggagcccaggcccttgcccctcttccacgaggccacgctggtcacgtgggagtagagcgccttcgggatgtcgtagcgctcaaacagattgacttcgcgcttggccttcattagtaaatgatacattcgaccccaagcgttatcctccacattctcgagcttcaaattcaatgttcctgcattcacattatcgggataactggcacatgccagaactagacccacaatccggccaccatcgttttcatccagtgccaaaaggctggtgccctcggcgattatcgactggttgaaggcgtcgttgatctcctcgttctgctggtgaacgggttcgccgctggactggcacagaggctccgatgtgtagtactcagcctccatataggcttttacctgtgcataatcctctgggcgcatgatgcgtatcgtgacgccatctattgtcgtgggagtcatcgcgatccggagctaattcgttctatatgcttttcttaagacagaagaggacgccgatgtgtacatggcttttatacttcggcgcttatcactgataatggcttatcatatttatagattgtttctgtttggcgaagagaaagttgtttccaacggcttttggttttatttttaatgaagtgccagactgacttatccttttagtaataaacatttttcgaatatggttttctgacccaaaatctttgaggataaatacatcgagtggaaagtgattacttaatatcagattttgtaattattgcaaggtcatgtgtcgataaatacataatcaacacaatatctgaacaataaagtagaccgttctacattttattactttatttgatccatatggacttgcgtttccagctcgacgacctttatcaattgccaaggccaaagtaataattaattaataaattattttaatttttacatttttgaggccaagacccgaatgtgggtatggggcgctggtggattatatatcggccgacccaactcgtccttgtagtcagcataggccaccgaatggatgcactcacatcccgctttcatcgccgaccgggaggagtagtgattggttccgctggtgatgaacagagtgtgtccccgcaggcgacccaatttaaagagacatttggaaagtatgaccaagatacctctttgcctcattgaggggtgaacggagatgaccagcagactcaggtaggaggagactccgaagcgttcgaaaatgttggcttcgcgctccactttggctataaatttcctgctgcgacccaaagcatttggctccatttcctcggcttccttgtgctgcttggccatttcgatgggatccatcgtctccgccacggcaatgccaaccagtagtcccccgttgttatcgtccagtgccactatggatagtccctgcctgatcaccgccaggtattgcctatccacttcctcctcatgctgcaggtgaatgggctcctcgagacccattcccatgggctcgtcgtagtgaaagtagtccgtcatgaaggttttcactcttggatagtcgtcctccttcataactcgtacggttatgccatcattttgactaagaatcatgttggactgagcagcgatgtttggtttcccggcttggtatactatggttcattctacatgactgcaggagccttttaaagaaaccgaactgagttatctacaaatacaagttcaagaacttccattgtttgctatattcaaggtggtgctcaaataagataatacgttgcatttccaaaaaaatgaacatgttggtattaatcttttaatctaccgataggtctaatctacaataagatacagtttctttaagaggaagaggaaaaaattaaagcaagaggtaatcacaattcttctgcatcagcaaaatgcagtattcatgaagaatcttacgtgctttcggattcgattcgtgcctgtccggatgacaggatggcgcgttcttctgatccattgtccatccagaaaatctcctcgtctgtccaattccgcataatttcagatggagcgagcacgtttgcttctgcaaatggccagatgttgttaactattggcagcagcgatactgtgtttccctgtccagaactcgatacgtttggatatatttgagaaattttcaaacatcttcataataacctgtcaaacaaaagagaatatcagcataactggcacgtggttttaataatgcctaaaattggtttgccaatttgataatgataacatttttcgagcataacttttcttattttattagcattcgcattcaattaacatataaattaacatattaaatacagaattgctttaaaggttattccattatcatacatcagtaagaaatctatagtaaaatgtaaattttttttatttccagtgtaggtcatttgcatatgtgtagtatgttgatagattcgaaactcacgtgaatacagaatcaaattacttggtcaatgaatattattatgaactgttttttgttagcttttaccatatttgttaacaggctgatatattttttaga

SEQ ID NO: 28235 - DNA, 630 bp, DROSOPHILA
atgaaggaggacgactatccaagagtgaaaaccttcatgacggactactttcactacgacgagcccatgggaatgggtctcgaggagcccattcacctgcagcatgaggaggaagtggataggcaatacctggcggtgatcaggcagggactatccatagtggcactggacgataacaacgggggactactggttggcattgccgtggcggagacgatggatcccatcgaaatggccaagcagcacaaggaagccgaggaaatggagccaaatgctttgggtcgcagcaggaaatttatagccaaagtggagcgcgaagccaacattttcgaacgcttcggagtctcctcctacctgagtctgctggtcatctccgttcacccctcaatgaggcaaagaggtatcttggtcatactttccaaatgtctctttaaattgggtcgcctgcggggacacactctgttcatcaccagcggaaccaatcactactcctcccggtcggcgatgaaagcgggatgtgagtgcatccattcggtggcctatgctgactacaaggacgagttgggtcggccgatatataatccaccagcgccccatacccacattcgggtcttggcctcaaaaatgtaa

SEQ ID NO: 28236 - protein, 209 aa, DROSOPHILA
MKEDDYPRVKTFMTDYFHYDEPMGMGLEEPIHLQHEEEVDRQYLAVIRQGLSIVALDDNNGGLLVGIAVAETMDPIEMAKQHKEAEEMEPNALGRSRKFIAKVEREANIFERFGVSSYLSLLVISVHPSMRQRGILVILSKCLFKLGRLRGHTLFITSGTNHYSSRSAMKAGCECIHSVAYADYKDELGRPIYNPPAPHTHIRVLASKM

SEQ ID NO: 28237 - DNA, 2675 bp, DROSOPHILA
ggtgcgccggtccgcaaccccctgcgatttggtttggggtatacacattgggcatcctgtgcgcctattcgaccttgagcagctcgacgtcgaaggtgagggtggagttgggcggaatgacgccggggtggccacggctaccgtaggcatagtccggcgagcaaatcagcttggcgcgctggccgacgctcaactgggcaactccctcatcccagccacggatgacctcgcccttgccgatggtgaacttgaatggcttgttgcggtcgcgcgacgaatcgaactgcgtggaattcaaggcggatcattagctggggatggcgaggatcgggattcgtactcaccttggtgccatcgtccagggtgccggtgtagtggaccgtgaccttttggccattcttgggataggtgctgcctgcgggcggggaatgcaaaaatggatgtgtgtgagcgggacgaccatattgtcgcaggtatttccgaattgtgcattgcgaaaatgcactaaataggttagaaaggccggtagtttacggcatttcttgcggattctaacccaatcattggatactcaccatcaccaggagcaattggaactacttgtacgcccatttcgattagtttttttctggcaaattaccgagcggaaaataagcacgttgatttcagttcgtcgcgtcgccgaatgacagctagcggtgggcgatggtcggtgagcggaaactatcgcacacatcaatttgattaattatcaaaaccaattgctttccgagttatcgataaggacgtttttgtattttggcgcgtccgtttgaattgtttactatgaaccgaaagaataaagcagtgcaagatcttgcctcttatcttaaagtccgagacacattggtcattggtcaacttgtataggtcccccaaaagtgtgctaagtattaaataaacataactatagttatataatttatttaaattcctcgactcagttatttgttatcaactgtcacagtttgattgccatcactcgcagctttgtgtgtggggctgccggtgtgaagatcactcgtccttcatcgtccttatagtcggcgtagtcgatggaatagatgcactccatgcccaaggcccccttctggcgagcggagtagaagctagtgcagaaggccatcataagggggaaaccattcgatcggcccagctccatcagggtggcggccaggcgggagcccaggcccttgcccctcttccacgaggccacgctggtcacgtgggagtagagcgccttcgggatgtcgtagcgctcaaacagattgacttcgcgcttggccttcattagtaaatgatacattcgaccccaagcgttatcctccacattctcgagcttcaaattcaatgttcctgcattcacattatcgggataactggcacatgccagaactagacccacaatccggccaccatcgttttcatccagtgccaaaaggctggtgccctcggcgattatcgactggttgaaggcgtcgttgatctcctcgttctgctggtgaacgggttcgccgctggactggcacagaggctccgatgtgtagtactcagcctccatataggcttttacctgtgcataatcctctgggcgcatgatgcgtatcgtgacgccatctattgtcgtgggagtcatcgcgatccggagctaattcgttctatatgcttttcttaagacagaagaggacgccgatgtgtacatggcttttatacttcggcgcttatcactgataatggcttatcatatttatagattgtttctgtttggcgaagagaaagttgtttccaacggcttttggttttatttttaatgaagtgccagactgacttatccttttagtaataaacatttttcgaatatggttttctgacccaaaatctttgaggataaatacatcgagtggaaagtgattacttaatatcagattttgtaattattgcaaggtcatgtgtcgataaatacataatcaacacaatatctgaacaataaagtagaccgttctacattttattactttatttgatccatatggacttgcgtttccagctcgacgacctttatcaattgccaaggccaaagtaataattaattaataaattattttaatttttacatttttgaggccaagacccgaatgtgggtatggggcgctggtggattatatatcggccgacccaactcgtccttgtagtcagcataggccaccgaatggatgcactcacatcccgctttcatcgccgaccgggaggagtagtgattggttccgctggtgatgaacagagtgtgtccccgcaggcgacccaatttaaagagacatttggaaagtatgaccaagatacctctttgcctcattgaggggtgaacggagatgaccagcagactcaggtaggaggagactccgaagcgttcgaaaatgttggcttcgcgctccactttggctataaatttcctgctgcgacccaaagcatttggctccatttcctcggcttccttgtgctgcttggccatttcgatgggatccatcgtctccgccacggcaatgccaaccagtagtcccccgttgttatcgtccagtgccactatggatagtccctgcctgatcaccgccaggtattgcctatccacttcctcctca

SEQ ID NO: 28238 - DNA, 675 bp, DROSOPHILA
atgactcccacgacaatagatggcgtcacgatacgcatcatgcgcccagaggattatgcacaggtaaaagcctatatggaggctgagtactacacatcggagcctctgtgccagtccagcggcgaacccgttcaccagcagaacgaggagatcaacgacgccttcaaccagtcgataatcgccgagggcaccagccttttggcactggatgaaaacgatggtggccggattgtgggtctagttctggcatgtgccagttatcccgataatgtgaatgcaggaacattgaatttgaagctcgagaatgtggaggataacgcttggggtcgaatgtatcatttactaatgaaggccaagcgcgaagtcaatctgtttgagcgctacgacatcccgaaggcgctctactcccacgtgaccagcgtggcctcgtggaagaggggcaagggcctgggctcccgcctggccgccaccctgatggagctgggccgatcgaatggtttcccccttatgatggccttctgcactagcttctactccgctcgccagaagggggccttgggcatggagtgcatctattccatcgactacgccgactataaggacgatgaaggacgagtgatcttcacaccggcagccccacacacaaagctgcgagtgatggcaatcaaactgtga

SEQ ID NO: 28239 - protein, 224 aa, DROSOPHILA
MTPTTIDGVTIRIMRPEDYAQVKAYMEAEYYTSEPLCQSSGEPVHQQNEEINDAFNQSIIAEGTSLLALDENDGGRIVGLVLACASYPDNVNAGTLNLKLENVEDNAWGRMYHLLMKAKREVNLFERYDIPKALYSHVTSVASWKRGKGLGSRLAATLMELGRSNGFPLMMAFCTSFYSARQKGALGMECIYSIDYADYKDDEGRVIFTPAAPHTKLRVMAIKL

SEQ ID NO: 28240 - DNA, 3670 bp, DROSOPHILA
ttgagtgtactagaaattattatataaatgttaaattcctagaaataagcaagtacgtcctttaattattatatttttatgtctgttaacgtatgaaacactataaatatttaattaaataattaaatctttataccactctccaaatataattattgtgcaatcttattccattctttctatttttccaaatgtatcttgaagtcgaaggagctacgcaattttacgaatgctgcgttgcacttttccgcttggcacatgtagatgtactgctggcatctagtgcagtttatatagattatatacgtggatttgtgaagcaaatttgtatttatgctgatggccaggcacccatgacactcgctatttcaatggcttgcctttccctggtgttcccagtcctgaagcctgaattctgattctcgattcctgactcccggcacattatgtgccccatttaatgtctatgtatgtgcagccagtacacttgcacatactatggcacacacttacacgcccagtgaacgtcaagtggcaatttacattagttttattgtatacgaaattagcagcatttagcagtggcagccggcaaaacttttgcctttcggctccgttcgctatgtcccacccctacacccatacacacacacacatgtattgctataaatggaggatatattctcatccgcagtcaagggtttgtatgttagatttgtttgctcgtttggctgcactgtcgcactcggcatatcaattttcccgctcatccacctctcccctcaggacatttcaaggtaggaaatcgattttgttaatgaaaacgaaggagaacttcaaggagaaggccacccaggggatcgggtgtcgattggagcgtaagtttgatatttgttacgggcggaacaatggccattctgctcgatgatggcattcccgaaggattatattgcaactttcgagcttgattttttatattcttccgctgaacatagttattatgatgtgtatttagtttttattgtctgttttttgtatacaaagtaaaaatggtctcgccactccttacatatgcaagaaatataaacatcttccagttgaagcaacaaaaaataaaaaaaagaatgcggaaaaacaagtaacctaaaatttttaagaaacattgtgacagctgcccgtttcaggttcacactagatggcactcgttcaccaaaacgacatcatcttcgaccacgtcgccattacgattggcatggtgctcatggtgaatgggacagctgacgatgagctcctccttgggttccatcttctgtgcctccttcttggccttcttcgttagtgccttatccttgatgcccttctttttttccatctccagctccaattctaggtgatcgcccagcaggtgatcgatgacatcgggattgttgcgcaaagccagatccatggcgccatcaaggaattgatagaggggtgaactaacgtgacgctgtggctcctttggtggttccagcaagagatttccctcgaaattgggctgcaacagctgttgcagcatgtagagcatcggtggcacagccggcgaggatttatgcttgcgatggtgcttcagtggtgctgcattatgaagtccgcgtggagtgttctcggctgcattcagcagtagcactccggccaattccggtggcagaacttccggaccgtagttcagctcctgctgcacactctcaatcatcatgttgggcgccagcagctcgaactcctttatctcgtgcttgccatctggcgaaaccagcttgttgtagtacacgtagggattggaattgggattgggattgggattaagattgggattagggttgggtggcaatgaggtggccatagcagcagcttccaccgctgggcgacgcttgtggtgcaattgtcgtggctgcagactgtcgtccatcaggctacccaaacgcctcttgggacggcgcagtcccagcagatcctccactagctgaaattttccggcatccggaggcgaggatgtggatgccacagcagcaagtgatgatgataatgcggtggtggttgtggagctagtggtttttccacgaactcccatactgcgcaccggtccagcagtaatcttctgctccggagatgtggcggcttcagtcatgttagcggtggtaatggtactattggccaacacggtggcttttccgctcagtgaagcagtattgtccattgtagtggtttcattataatcacttgcagtatcgccttgagaacgcttcatgcgcagacaatcgccgtacatcggccgcatcaacatgaggacaccttaagcaaaacaatggatgcgtttgaaatacacgcaattaattataaataattgcatgctagatggtactgaaaactaacgtatacttacacccaaggatcagcaagtagttcatcttgtattgcatgataggcagcgctgtggaagacagttgagttgaaaaagtgaaaagtgaccacaaatattctcagagttgaatatttattgtagatttttttccaccagaatagttacaatttgaacttactttatttgattggagtgggttctaggtgtgctcggcacaaagtttgtactgaaaataattcgaaatgcttcctgcctcatggcgaggctttgacagacagctggggacctggtaaaaggttactgagagtacgaaaaaaaaaatcgaatttcaatatttttctgatggggattttccacacacactcacttccatttgtggcgaccttttcaagtgctgcaaatggcagcaatggtacaaaaacaaaaaaaaaagtaacaaaacacaaccgcgcacaccaaaaaagtttgtttcgtgggccgcaaacaaaagcaaacagtggaaaaagtttagcttataaatttccaatcaatttttcgtgcaaaaatcaagcgacctcacactcacacacaggcacaagctcaagtgttcatacacgtagtgtgtgcctgcgtgtgagtagctattacttgattaataaatattagcagcaaaaattggaaaattctcagcgaagcgtaaaagtgcaaacacccaaacggaaatgcgatacatttgcgaaatggcaggagcattttccaaaacatcgatgcttctctacgcacacaagcacgcacacagcactactcacctactccatgtaacttttgatataaaaggtatataagaattatcgaagatatgaaatataggttatgaatctgcatggattgacttattgacttaaactataatttcccatttgttcaaaatgtaacaactatatcttcttttgtgttatatatcaaatgaattttggttactttcaaaagggtatttctttctcgattcccgtttttttagcctaaaacttgaacttgtttctgccgccttcgtctttaggcattaataatgtaaagtgcgtgcgtcaaatgtgaattccttgctgccaacgcacgcgatttcataaactggcgacattttcaacaaacaattctcatcgccgtcttcgatgtgcttgtgtgtgtgtgtgtgtgtgcgcccttcgaggcgacttggcgctcaggtggattttggggtgcaggaggcggtaaaccaagggaccccgaggagcaggcacttttccttatcag

SEQ ID NO: 28241 - DNA, 1561 bp, DROSOPHILA
aaagcctcgccatgaggcaggaagcatttcgaattattttcagtacaaactttgtgccgagcacacctagaacccactccaatcaaataaacgctgcctatcatgcaatacaagatgaactacttgctgatccttgggtgtaagtatacgttagttttcagtaccatctagcatgcaattatttataattaattgcgtgtatttcaaacgcatccattgttttgcttaaggtgtcctcatgttgatgcggccgatgtacggcgattgtctgcgcatgaagcgttctcaaggcgatactgcaagtgattataatgaaaccactacaatggacaatactgcttcactgagcggaaaagccaccgtgttggccaatagtaccattaccaccgctaacatgactgaagccgccacatctccggagcagaagattactgctggaccggtgcgcagtatgggagttcgtggaaaaaccactagctccacaaccaccaccgcattatcatcatcacttgctgctgtggcatccacatcctcgcctccggatgccggaaaatttcagctagtggaggatctgctgggactgcgccgtcccaagaggcgtttgggtagcctgatggacgacagtctgcagccacgacaattgcaccacaagcgtcgcccagcggtggaagctgctgctatggccacctcattgccacccaaccctaatcccaatcttaatcccaatcccaatcccaattccaatccctacgtgtactacaacaagctggtttcgccagatggcaagcacgagataaaggagttcgagctgctggcgcccaacatgatgattgagagtgtgcagcaggagctgaactacggtccggaagttctgccaccggaattggccggagtgctactgctgaatgcagccgagaacactccacgcggacttcataatgcagcaccactgaagcaccatcgcaagcataaatcctcgccggctgtgccaccgatgctctacatgctgcaacagctgttgcagcccaatttcgagggaaatctcttgctggaaccaccaaaggagccacagcgtcacgttagttcacccctctatcaattccttgatggcgccatggatctggctttgcgcaacaatcccgatgtcatcgatcacctgctgggcgatcacctagaattggagctggagatggaaaaaaagaagggcatcaaggataaggcactaacgaagaaggccaagaaggaggcacagaagatggaacccaaggaggagctcatcgtcagctgtcccattcaccatgagcaccatgccaatcgtaatggcgacgtggtcgaagatgatgtcgttttggtgaacgagtgccatctagtgtgaacctgaaacgggcagctgtcacaatgtttcttaaaaattttaggttacttgtttttccgcattcttttttttattttttgttgcttcaactggaagatgtttatatttcttgcatatgtaaggagtggcgagaccatttttactttgtatacaaaaaacagacaataaaaactaaatacacatcat

SEQ ID NO: 28242 - protein, 378 aa, DROSOPHILA
MLMRPMYGDCLRMKRSQGDTASDYNETTTMDNTASLSGKATVLANSTITTANMTEAATSPEQKITAGPVRSMGVRGKTTSSTTTTALSSSLAAVASTSSPPDAGKFQLVEDLLGLRRPKRRLGSLMDDSLQPRQLHHKRRPAVEAAAMATSLPPNPNPNLNPNPNPNSNPYVYYNKLVSPDGKHEIKEFELLAPNMMIESVQQELNYGPEVLPPELAGVLLLNAAENTPRGLHNAAPLKHHRKHKSSPAVPPMLYMLQQLLQPNFEGNLLLEPPKEPQRHVSSPLYQFLDGAMDLALRNNPDVIDHLLGDHLELELEMEKKKGIKDKALTKKAKKEAQKMEPKEELIVSCPIHHEHHANRNGDVVEDDVVLVNECHLV

SEQ ID NO: 28243 - DNA, 3670 bp, DROSOPHILA; identical to SEQ ID NO: 28240

SEQ ID NO: 28244 - DNA, 1023 bp, DROSOPHILA
aaagcctcgccatgaggcaggaagcatttcgaattattttcagtacaaactttgtgccgagcacacctagaacccactccaatcaaataaacgctgcctatcatgcaatacaagatgaactacttgctgatccttgggtgtgtcctcatgttgatgcggccgatgtacggcgattgtctgcgcatgaagcgttctcaaggcgatactgcaagtgattataatgaaaccactacaatggacaatactgcttcactgagcggaaaagccaccgtgttggccaatagtaccattaccaccgctaacatgactgaagccgccacatgtccggaagttctgccaccggaattggccggagtgctactgctgaatgcagccgagaacactccacgcggacttcataatgcagcaccactgaagcaccatcgcaagcataaatcctcgccggctgtgccaccgatgctctacatgctgcaacagctgttgcagcccaatttcgagggaaatctcttgctggaaccaccaaaggagccacagcgtcacgttagttcacccctctatcaattccttgatggcgccatggatctggctttgcgcaacaatcccgatgtcatcgatcacctgctgggcgatcacctagaattggagctggagatggaaaaaaagaagggcatcaaggataaggcactaacgaagaaggccaagaaggaggcacagaagatggaacccaaggaggagctcatcgtcagctgtcccattcaccatgagcaccatgccaatcgtaatggcgacgtggtcgaagatgatgtcgttttggtgaacgagtgccatctagtgtgaacctgaaacgggcagctgtcacaatgtttcttaaaaattttaggttacttgtttttccgcattcttttttttattttttgttgcttcaactggaagatgtttatatttcttgcatatgtaaggagtggcgagaccatttttactttgtatacaaaaaacagacaataaaaactaaatacacatcat

SEQ ID NO: 28245 - protein, 229 aa, DROSOPHILA
MLMRPMYGDCLRMKRSQGDTASDYNETTTMDNTASLSGKATVLANSTITTANMTEAATCPEVLPPELAGVLLLNAAENTPRGLHNAAPLKHHRKHKSSPAVPPMLYMLQQLLQPNFEGNLLLEPPKEPQRHVSSPLYQFLDGAMDLALRNNPDVIDHLLGDHLELELEMEKKKGIKDKALTKKAKKEAQKMEPKEELIVSCPIHHEHHANRNGDVVEDDVVLVNECHLV

SEQ ID NO: 28246 - DNA, 5856 bp, DROSOPHILA
attgcattgaattcgagtcgctttggcctgagtttcacatatattgtatagagtatacatatcgggctagacatcggcaagtcgctttcggtagcgagcccggctgggtctgcttatgtacggtatgctaaagggcagtgcactgcaaagatcattgtatagagaacacaaagagaaagagagtgatagaacggtgtgtactgtgtgtgtttacctatccgggggaattgcatgttgtgtttgggtgtatctgtgtctgtatatgcgtatgtgtcgttttgctatgtgaaggttatgaacttgacaattagacgccacacgaggcgtatgagcaacaaagtggccaatgccatgttaatgccagcacggagcacttgtacaaagctgcagcagtgagatacaattggatacaaaagaaagtcttagaagcactcatttaaacgcattgaactcgtggggtaaccaatccgaaaccaaaccaaaaaccataattatccattaggcatatcgattaaagccgctctgcagtcatgtatgcaactgattacctaggtcaaattgtaaattaatagcgtgccatgttttttgcaggtaattcaattagtgcggcaaacaacgaggcaataaattaccgaactgcaatatttgacacacaatttattttccatgcccatcagatatgtatctctatcttttcgttaaagagcggcagctactaagctattacacagagaagaaaaaattcataagttttaaaaacatactttttgcaatgtatagacaagaaaaacattttatcttctgcccagagcttttcgattgaattcaagaaagtacgtttaaccgaatataattaagtgtctggcatagtttcacaaaaaaagtaagtaccataaaacccgtgaaagtttttatcctctgtgcggataaccatatgtgtttttcatattatttaaacctcattaaacatgcaaattagtcggttatagaaattacgaaatcacgaaaaaacgctagaatatttagaatgggatgttgggtggaaatacctgcttccggtgccgcttccgtagcgatcttcgctctcacttgtgtgatgtggcgctggtaccgctcgtgtgcgtccgccagtggtgccgctgccactcccatatccgctgctcgagggcgtggcatagctactgcggcccgctgccgtcgatgagctgtcatcgcgggatgctcgccgcgcctccaggcgatcccgataggatccactagtggtggaactactggctgccgtggttgaactggccgcgctgttgggcgtggacttggtattggtggtgctgctggtggcactgcttttcgccttggtctccggttccgattcggattcggactccgaactggtctcctcctcgctgctggaactggactctgccttcttcttgtccgccgagccattggtggtactggcggtgctatgctgtggcaggaagcgactcacaaagggctttttttccggcactgccgtggtatccctggctgtggaatacctggatgagctgggcgccttggcattttggcttgtcgaattgctgctggatgttgcaggtgctgccgcagttgcggatgtggatgtggctgccacagccgctgctgccgccgaacttgctgagctctcggtggaggcactgctgtcactgctaccggatctttgggtcttcttgaccgctgccacctgggcggaaacgggcggcttcgactgttggattgtaggagtgggagttgcatcagagtctgtggcgctcgcggtctgagttagttcgatttcggttttggcaagcgacggaacgagtaacgaatgcgatgcagatgcgaaatagaaagatttatagataaagaaatagaaatgacgatgctgagatgtagattgctgatgggcgggagtctagtgaaatttgggatttattagaagcaactgaatcgcagctggcatttctctatgggaaaatgtttgtgtatactagtaaaaatagtaaagaatttttaagctaattcaattgattagtacaagaactaaaatttaacatgaacgttgaaaataccaagtgttagctctaggtcgagttatagatattcatggagtgactttagtagcactaacatattttatatatattggtttaatttgaagttagcccaagcttggttattatttctctatattttccttggcaaaatctgttgaagctctaactcggaagcatcgaaaattttaaaatcgtagaaatacaaagttcccagcatacgagccttttcattacgtttgatatttcatccacttcctttgatgtgctcctaattgatcagacaaccttttcctattcccattcagtaaatgccaaaaacaagacaaatatgcagcaagggtgcatatgccactaaagcacaactccatgtatatatgtacacgtatatagtgtgtggtatattcattcatacagatacacacgcacactctggcagctggaaacattgttaaactgacggaagcagccgcatcgctgacactcgcatgatggtgaaatattcgccattgaacccggctctgtctgccattttcggggggcagctgactggggactggggaagggggcgtggcaacaatgtgtgaatgcatgacaggcgaaaaaacgatgggtggggatatgggaggcgggtaaagaaatgcatacacaacagaaatatttacagcggacatcagaaattgtaaaccaacaaaacggcaacgaaaatataaagaaatggttgaaaaagtttccattataatgagaacgggagcaaataaattgggaaataaccaagagatgtatatcttgttgaccagggtctgcgatttattcaactcgacaccatttgccaaagaaatttagtaacatttaagcaaattaacatcactaccacatcggttctccacttgcaagagagattcgcagagatatgtagatataaacatagttagatagatagatatagagagaaagagggagaaaaaagaaagtttcaaaagaaaataaatgttacatcaaaggaattttgtaatttctggttgctttatttgctttaaaattttgtgcagtctctaactaacgataaggtaaaggatgttaagctacataaataaaaaatatatatatccatatatttgtatacaatattgtacaattctgatgtccgagctttgggtcgaaactttaccttgcattgcattcagattacttagtagaggcaaaaggttcagacccaaaacagcattaggtgaaaggcgctcacaagacaataaacgtaagtaaacggaatggaaataataataaacaatcataataaataaataaagacttgagcttaacgtacacataaaataacaagaacagaaaaccagttgcgtaaatcaaaataaataaaaaccaaacataatgggacaagttcagaggaaatgtttttggttaggtaagattaacagtaaaagtaacgataaacagttaagttaggttgctccttcgacaggatcgacaaaagaaacaaggataacacttacggagcggaagggaagtgtgaacgatggagcacaaataaagaacgaagcacacatggcgtatacgcaattatcgttataagttctttcggcgggagttggcacaacacaagggtaaaatactcagctaggctacagtgacagcgatccctactatacaggctactcagtaatatgtaaattgctattgctatctacacgaaagtgaatttgatttctaaaagtatatatatgtatattttctgataagaagtactcaaaatattcgttcttagaatcttttgaattttacctactattgtgttatctgtaactcaattcaatcctcctcttcctcttcatccgtgacctcaatctcctcttctgtgtactcctcctcttcctcttcttctggactttcgtcggtagatttatctgtttcttccataagctcctgattgcttatgtggtctactgggctttcttccactttgtgcgcaatgtcattctcgggtggaagtacattgatcactggcagatcttgactctctatttcgattacccttccttcaacttcctcctgctcttcttcactttcagtggccgttacttcttcgtattcggaagaggattcttcctcctctgtaacttcagatgaggtcggttgcagagcttcctctggtaggttcagcaattccctgggagcctcttcttcttctacagattcttctacttgttcctcctcctcgtctacctcttcttcttcatcttcatcttcaacttcctcatcttcttcgctgtcactgctttcactggccacgccttcttcttctgtatttgcctcattcacacttacctcagctcgcgtcgtggatgccgcactattacgcactggggacgccgcctggttggagctgccatcgctttcttctccgcctcgattcttcagagccgccactcgctgatcgctggcggtgtcgccaccaccactggacgtcgatgttgctgctccacctgtcgatgatgagccggcattcttgcgtttctggcgcgccagctcctcctcgtcggcggcgttctgctgattcttttgctgctgccgttgcatggccgctttttgggcctgaatggcggcttgaactgccgcctgagctgcggcagcggcatcggacttcttctccttcttctccttgccaatatcggccaagcgctggacaacgcgcgagcagtcgctcaatcggatgatgccgctcaactgtccgcgggacacatcctcgctgtccaggacgcgatccttgcgctccttgagctcctgctgccgttgctgttgctgctgctcgctgtcggagtcgtcgttctggtgggatctcacgaaacgcgagcggaagcgggaggacttgcccgccctgcccgacgaaccctcgttgtcgtagtcgttctcatagtcgtagtcgccaccgctgcgtccatagcgatcgttgttcgcttgggtagcgctgcgctgcggccgttcaccgaacttgcgaccgcccagcacgggctcatcgttgtagccactgcgctcctcctgctggcggaactgggtggccaggcggtggtcgctcttcgatcgcatcaaacccggctgcagagcactgggcggcgccagatgggaactgctaaccgaaccgccacttggtgtcgaatgaggtgctatgttcaggtcaccgaaggtggccaggttcattactagctggttgggatctatggagaccaggaacctcactcgccgactgtagtcgttgttctcgtattcgaagtgacgcaggaactccaccgtcttcaggaagatctccttggtgtccatcagctcgcaatcgtcccactccacggtctcgttcatgtacttgtccaccgtgtcgcagttgctggtgatgttcgtgatttccagatcgagattctccttaagcgtggtcagattgcgcagctccacggccaaatagcgatcgatctcacccttcagctggtcagatcgatccttgatcgccttggtgatcctttggtagatctcatcgatctcctccgtcacactaatggcgttcgtctgcaggctcatggtgttcttctcgatgatggccagcgaatcctgaagtcggtgcaaactgcgacggatctaagaagagatttggattatggatcagtaagtaatatggtaagtaatggcaacatttaaattaaagcgattttaagtaatattgatgctcacctgtgaattgaatcgcgtgatctctcgtcgcagaatgtccatgtgggcgctt

SEQ ID NO: 28247 - DNA, 1188 bp, DROSOPHILA
aaggatcgcgtcctggacagcgaggatgtgtcccgcggacagttgagcggcatcatccgattgagcgactgctcgcgcgttgtccagcgcttggccgatattggcaaggagaagaaggagaagaagtccgatgccgctgccgcagctcaggcggcagttcaagccgccattcaggcccaaaaagcggccatgcaacggcagcagcaaaagaatcagcagaacgccgccgacgaggaggagctggcgcgccagaaacgcaagaatgccggctcatcatcgacaggtggagcagcaacatcgacgtccagtggtggtggcgacaccgccagcgatcagcgagtggcggctctgaagaatcgaggcggagaagaaagcgatggcagctccaaccaggcggcgtccccagtgcgtaatagtgcggcatccacgacgcgagctgagtcgaagccgcccgtttccgcccaggtggcagcggtcaagaagacccaaagatccggtagcagtgacagcagtgcctccaccgagagctcagcaagttcggcggcagcagcggctgtggcagccacatccacatccgcaactgcggcagcacctgcaacatccagcagcaattcgacaagccaaaatgccaaggcgcccagctcatccaggtattccacagccagggataccacggcagtgccggaaaaaaagccctttgtgagtcgcttcctgccacagcatagcaccgccagtaccaccaatggctcggcggacaagaagaaggcagagtccagttccagcagcgaggaggagaccagttcggagtccgaatccgaatcggaaccggagaccaaggcgaaaagcagtgccaccagcagcaccaccaataccaagtccacgcccaacagcgcggccagttcaaccacggcagccagtagttccaccactagtggatcctatcgggatcgcctggaggcgcggcgagcatcccgcgatgacagctcatcgacggcagcgggccgcagtagctatgccacgccctcgagcagcggatatgggagtggcagcggcaccactggcggacgcacacgagcggtaccagcgccacatcacacaagtgagagcgaagatcgctacggaagcggcaccggaagcaggtatttccacccaacatcccattctaaatattctagcgttttttcgtga

SEQ ID NO: 28248 - protein, 332 aa, DROSOPHILA
MQRQQQKNQQNAADEEELARQKRKNAGSSSTGGAATSTSSGGGDTASDQRVAALKNRGGEESDGSSNQAASPVRNSAASTTRAESKPPVSAQVAAVKKTQRSGSSDSSASTESSASSAAAAAVAATSTSATAAAPATSSSNSTSQNAKAPSSSRYSTARDTTAVPEKKPFVSRFLPQHSTASTTNGSADKKKAESSSSSEEETSSESESESEPETKAKSSATSSTTNTKSTPNSAASSTTAASSSTTSGSYRDRLEARRASRDDSSSTAAGRSSYATPSSSGYGSGSGTTGGRTRAVPAPHHTSESEDRYGSGTGSRYFHPTSHSKYSSVFS

SEQ ID NO: 28249 - DNA, 3747 bp, DROSOPHILA
ataccgacgcagcatcaactcggatgacaagagcaatgcaatgactcctctggagaacagagccctgcagatcttctccttagaaccgaattttcgcgagggaatttcgatgcgcctgcacgaactgatggaggagcaagaggaactggatgaagaagagaatgagaacctggaggagttggtggatgaggaggaggaggaggaggtgcagtaccagcagttcatagcagagcctcacgagcaagccaacccaacgatcatcaatggtcacagtgccgcgaaaaagctaaggctcgatggttccagtgagattatctacgaaggtgggtagacgcaaatctaatgtaaatactaaatatcctataaagggacatagccttgatttcagtcgcggatgtcacatctgatcaatctgccgcgaaagaaccgtctgccttctatggagagaaaatccaggagcagctgaaacgcatttcggacatacacgaggcatcgctgcactttaagatagcccgcttcaagtacaataatcccggattcgagtacgttccggaattatagcccatgctagccatgcacattgatataatgtataatgtaatataatatgtgagctcagagggacctgctgatttcgcctcgaattaaaagccgcggaacgctcaataagtagtacagtaggcattcgttgaaaacaaattcttgagtagtgtgtaccatataccaattagtcgtttttaagactgttgttatgcatatcgttcgacgaaatactttttgcacatatattttgaaatgtattattgatttatatgaaaccgctaataaatattgtgacaaatcatttctgaatccgcatgtttttattgcaacaaaattgaattatttattgcacatctagccataactatcgcatggcatctaattgcttttttggcttcccgccagatgcgcaccactggcgtgccgaatgcaaccctgcgccaacagcaacaaaatgcaactagaaaatcccaaacgctaaatgcgtaaattgtttgtgaacatctcgcatcgcttggtggcgtcgatttgcattttagggcttttgccagctatttaaacacggcatcgagcacgcaggcacagagcaaggatacccggatgaacggcaagatggaccgccgcaagaaacgcacctcatcggagcagtaccaaatgtacatcgacatgatggagagcgaccccattttcgccaccggacgagtgccgcgcgactatgacctgaactacttgaccaaaaagtggaaggagctctccgaccggctaaacaagtgcagctccggacccacactgacgccggaggagtggcgcaaggtacgagtaccactacatcacccaaataatgttacctctaatcgcgaatttcctgctccacatacagcgcctaaacgattggaagaacaccactcgctgcaagtacagacgcagccttctgtccacggaaaaggacatctcgatgacctccgtggagacgcgcgctctcgatctctttggcaaggtgcccaccaccggcggcgaaacgatgctcaatctgaagtccgaaaaggatgagcacgacgacgagatggaggaactgggccagcgtacttcggtggcatttcaaaaggaacttcaggcagccgttgaagaggcaatcaacgatgaggtggacgaggaggagatggtggaggagcatgtcgatcacgaggacatgatggaggagaatctggcggagaccggcatcaccgcgtccacaacggcggtcaatacgggtggcggcacctatcgcaccatcgtcgtggacaacacatccttcgagcatgtcgaggaggatccccaaacggtgcagccgcacgccgtcgagtacgtcacatcccgcaggcctgctgcccccgtcatcaatccgggcacagcctcctccggcaataagctgatcaacggcgagctgcccgtcaagcggatgcgcacacagcccagggagcaaattatctacgaaggtaactatgccgttttactttgcttaagtttaagcagttaacatcacgtttttccatatctttcagttaaaaatgcgccgcgttgcatttcaaacatgcaggccgtgccgccgctgcacagtacaaagctggagcgggaacccagttcgctgacaagcgcgctgagcagcagcgatgcccagcagatcgcgcaccagctgaagcgactggccgacatcaaattcgagacactgcaatttgagattgcgcgcttcaagttcaacaacccgggcttccagtacgatccgccgtccttatagtgtcccaagcggcagggcgagatcagtgggtctaagcagtcggcaaaaactccagcaccagcagaagccacggcgaaaggatcagcattagcaaaagcaatggaacgagtcaagtcagctcgaattgtataggtcttttacgaatgtgctctttggcactcgaacgttttctagctctccaagtcctgcgctccgccggaacacacacaaaactgtaacttatagtagccagatttaaattgactagtttaaaattgacatagaattctattgtgtaaacagttattttcaacttttcaagcacttcatctacgatatccatatatatgaaataggcataaaattgtaatatctaaagtgaaaaacaattggacaagtaattttaacgcgttgtatgtaaatgttaagaataaagtttaccaatgataaatatgcgccgcacagacgtgctccaccttttgcctgttgttgcatttttagagtttatttatgacgccgtggccagaatcgaagccaacacgaaaagtccattaatcaaagctagggagatggcgtcgacaacgcgtatatgcattgtggctcggcttcgctttggcttttagtttgggtcattttaacctgaccgccaactagtgggcgcactttgtaactgtcagcagcgcctggaggcatcgatgcgaaagaaatcacttgtggctgttatggtcgcccgatgctgatgcaacaagtgccgatccaaagtcctcggctgctccctgctccacctactccgcttggataactgcaatgggcaatagatcatttgcgggccgtgcgctgcgaatcataaattaccgaagaccaaggtggagcgtttgagggaacagacctccgccatgggacgacgcacggtgttccgttaggaatcgttggcatcgcgttgataactgcacaacacgtcgtatgcttaatctgtgctctatgtaaaggtgcactcaacaaaatgaccagctaatcgaattcctgatatttgtgttttatctcacaggtgagaaattgcatcttaggcatatttcttgatatttcaggcttgctccttgttggtcattgatttttttgagtgcaatgtggtgtcgcctgtgtgggtgccgctcgctctttgatgaaaagcccgctggcaaagctgattaacctgcacacacacctcggcgggaaatgagtgtctgggacccagatgtcttcttctcacatggccatgaaatggaggctccatctgcgactgggactgcgactggaaccaagtttgaggaactgatgggtcgtcgctcagagtgcatgcccagtccattaagcagttcgtgttgcactcgtttcgctctgccatccacggctatatgagtccatggatttgggactggatatgtgggtatggtgggtatgggtatgggtat

SEQ ID NO: 28250 - DNA, 1614 bp, DROSOPHILA
caactagaaaatcccaaacgctaaatgcgtaaattgtttgtgaacatctcgcatcgcttggtggcgtcgatttgcattttagggcttttgccagctatttaaacacggcatcgagcacgcaggcacagagcaaggatacccggatgaacggcaagatggaccgccgcaagaaacgcacctcatcggagcagtaccaaatgtacatcgacatgatggagagcgaccccattttcgccaccggacgagtgccgcgcgactatgacctgaactacttgaccaaaaagtggaaggagctctccgaccggctaaacaagtgcagctccggacccacactgacgccggaggagtggcgcaagcgcctaaacgattggaagaacaccactcgctgcaagtacagacgcagccttctgtccacggaaaaggacatctcgatgacctccgtggagacgcgcgctctcgatctctttggcaaggtgcccaccaccggcggcgaaacgatgctcaatctgaagtccgaaaaggatgagcacgacgacgagatggaggaactgggccagcgtacttcggtggcatttcaaaaggaacttcaggcagccgttgaagaggcaatcaacgatgaggtggacgaggaggagatggtggaggagcatgtcgatcacgaggacatgatggaggagaatctggcggagaccggcatcaccgcgtccacaacggcggtcaatacgggtggcggcacctatcgcaccatcgtcgtggacaacacatccttcgagcatgtcgaggaggatccccaaacggtgcagccgcacgccgtcgagtacgtcacatcccgcaggcctgctgcccccgtcatcaatccgggcacagcctcctccggcaataagctgatcaacggcgagctgcccgtcaagcggatgcgcacacagcccagggagcaaattatctacgaagttaaaaatgcgccgcgttgcatttcaaacatgcaggccgtgccgccgctgcacagtacaaagctggagcgggaacccagttcgctgacaagcgcgctgagcagcagcgatgcccagcagatcgcgcaccagctgaagcgactggccgacatcaaattcgagacactgcaatttgagattgcgcgcttcaagttcaacaacccgggcttccagtacgatccgccgtccttatagtgtcccaagcggcagggcgagatcagtgggtctaagcagtcggcaaaaactccagcaccagcagaagccacggcgaaaggatcagcattagcaaaagcaatggaacgagtcaagtcagctcgaattgtataggtcttttacgaatgtgctctttggcactcgaacgttttctagctctccaagtcctgcgctccgccggaacacacacaaaactgtaacttatagtagccagatttaaattgactagtttaaaattgacatagaattctattgtgtaaacagttattttcaacttttcaagcacttcatctacgatatccatatatatgaaataggcataaaattgtaatatctaaagtgaaaaacaattggacaagtaattttaacgcgttgtatgtaaatgttaagaataaagtttaccaatgataaa

SEQ ID NO: 28251 - protein, 346 aa, DROSOPHILA
MNGKMDRRKKRTSSEQYQMYIDMMESDPIFATGRVPRDYDLNYLTKKWKELSDRLNKCSSGPTLTPEEWRKRLNDWKNTTRCKYRRSLLSTEKDISMTSVETRALDLFGKVPTTGGETMLNLKSEKDEHDDEMEELGQRTSVAFQKELQAAVEEAINDEVDEEEMVEEHVDHEDMMEENLAETGITASTTAVNTGGGTYRTIVVDNTSFEHVEEDPQTVQPHAVEYVTSRRPAAPVINPGTASSGNKLINGELPVKRMRTQPREQIIYEVKNAPRCISNMQAVPPLHSTKLEREPSSLTSALSSSDAQQIAHQLKRLADIKFETLQFEIARFKFNNPGFQYDPPSL

SEQ ID NO: 28252 - DNA, 4354 bp, DROSOPHILA
ggcactctaaccgttccgagccgagcggaggctgctgcctttacggccaacattgctctgagtagttccgcgccatcggctagctccacgctgcgtcgtcatcggagggacacacccggtctggccgagagccgcagggccaacagcaatgccagcagcagtggcagcgagagcggaagtaccagcggggccagcggatccggaggaggaaagccaccggcgacggcctgatcctggtccatgtcgcgtcgcttctaagccacctaacaattacaaattaactcacatacaaagctaaccccacgcgcctaatgcaggaatttgattgttcgagttcgttatggatagacttaagaatatttatatgacttggagaccccgggcggtggttcgattgctcaacatcaaggatgaacatcgcagtgaatgcatgcccataacacacacacatgtttctagtcaagatctctcacacacacacaacatgggaatgccgcggggacacaactcctggagaagcaacctaatctgcctacaatttacatacataaacctctatacacttaaattatatactgtatacactcttatgtactattcttatgtattttatacacgcaattaaaacgataagtaaatgtttcgtaatcgtatgcgacgaagtcggcgttctgtttggctctgttctgtatgcgctttgtactaggatcttgacaggaagcccccgctaaggtgtggatcacatcatccgctcggccatgctgctcgccacgttgcccacgttcttctccttctccgccggctgggcgaccttcgaggccattttccgcgcgtccaaccagtccttgggcagaccggtgccaactgcaatgattgggtggattgggattagtggagggatcgctgcacggggacgccgcttcgttttttcacgagtggtgtgccccggcagttgaagctgaaatcagttgcaatctataaagggggacacaacgatcttcagacagttctcagtacgcatttattttcagtttccgtttcacgtgactctcgatgatgggacatggaaagttaaatgctgatgcggccatttgcccgcattggtatcattggtccacaaaatgcctggccgtgtttcaatccttggcacccagtgaacggatgtgggatgaagctgcctccgggtgacaaggacttagcacttggcagataattcgtgaaaaaatgaagccaatgcgccgcttgggagtggttaaaactaaacggtacttaggctctagctcgaaggaatttcaataaaaattaattaacaacgaatgtggatcgcctcctagtccaggtcatcggctactgggttgcgcgatcgggtgaaacgttaacagaacgaaattttgtgcggcaaataggaagagagatggagtacggaaaacgcgttagaaattactcaattatgaaggctatgtctaagttttggccaatgtgattgaaaccaaaagtacaagtgttttcaacttaaaagtaaactctttttgttaatcaaaacgagagctatttacttttgtaaaccttctcggtcatgtcatcgaagccagagtcctggatgttaagcatcaagctatccgccgacaaatagaccttgttctgtgagctggcaatctgttgataggggaaaagcatttcattaattttaaatcagaagagatttaaaagattaatcataccgtgcgtgcaatgctttgagcggcacgcagcttgcgcagcttcaggtaggctgggttctgcttcacggccagacctaagtaaacatatcagttaagaagaaccagtaggtggcaataaattgggtaagcataatccctatttacatatttcaagaaggccaaaaataaacgatgaacacagaaaaacaatacagtttttccagctcacaacatactaacagccttttagtcagatgtaaaagggaaaaaatgttctagttagtgttttgtaaaaggatatcattttagcagcctcggcttctccctcagcctgaacaatcttctgctgcttctcctgcttggcgcgctccacaaagaagacagcccgctgtgcctcctgctgagccacttgtttggcctcaatggccgccgtgtattccttgccgaagctcagctcggtgagggacacatcgtccagaatgatgttgaagtcgcgggcgcgctcgaccagctccttgcggatgagtagggatacctagtaacagacaactactatatacaaactgaattaaccatggttagtatgaagatttctacctgctgacgctgggtaataagctgcgaggcattgaacttggcaatcacgctcttcagcacctcgttgcaaatggagggcagcaccttctcgtcgtagtccacgcccagctgcttgtgcagatagggcaggttcagggaatcggggcgcgacagcacacgcagcgagatgttgatcatctgcagatccttggagccagtgggcgaggatattttgcggggacgcgagcgaatgtcatagataatgggatactggaaccaggggatgcgcacgtgcagtccctcggagtaaatgtcgctctggatgccgcccagacggctgaagatgatggcgcggtgaccaccctcaactgttgaaaggagaattaatcaagtgagtgggtttgcatacatagtatagtaaatagttaaatatataacttatatgtaattactttggacttaagacccgaaagtaaacacaaatataatggagtttgttatgcaatcatgggaagatgaaatgtgggactggccaacaataacaagtaattaaagtgaggataactgataagttaatgcatgttcctcacatgcatcttattagatagagtctaataagaatattgcaaatcatattggaagttatgaaatccgggaaacagcagaaacacacacacacaaagcaacatctctatgcactctgtaatcatttgaggttatgtgcacatgccgctattgcccgtgtttatggttttatccctcaaatcggtggctttatcctatcggctttatccttaccggtgtacagggactgactgactccataggcggctgctcccacggcggccaggaccttcagtccgattcccaatcccggcggaccacctttgcccagcttgccggcaagatcgttcaatttgctctgtgccatcttgtttgtcttctgcgacgaggaatttaaaaaatatattaaatgtcggtaaacgcaaagcactctgtatagattttgtgataataaacgtatgatttttccacgtacaaaattgggaaactctcacgcacgtttggttcggtgtgaccgtatgtgacgttgtcacataatcattcgttatttaaatcgatacaaaaatgtaatatttttgctattatcggtttgtgtgcttgctaacaactatttgtattttaatttttaataaaaaactttccgagttagttaagtgtattactccattcatttgtatagtagtatttcagcaatttctttaataaattagaaaacgaattttcgaacgaattgcgcacatgtttgtttgtatagaataaggtttgatcgttggttttgataaatgagtattgcggcttgcacgcgatttcatacggcgcgtttttcacgtttggcgcgttttgagtgcgatttctgtgcggcttgatcgcgattttaggcgtattgataacggcttggtttaaaatttcaaatctttacccaaatcagttatacgaaagtaaaagaaaaaaatatatattataatataataatgaatatatgtgctagttagctttaaaattaaacatatttacataaccgtaaaagtaaattaaaataaacataaaaaagatatggcaaaaaaaaataactcatggtgcgttaccactaatcacctaacgctgtagccaaaagttataaatagatgatgaaacctgatgcctgaggctttttgtttttgttgcagcacttaaactcacatgttgtgttttttttttttttttttgtaaatttgtgacaattacaatttcaagcgaatagctccagtgtgctggagcggaaaggaatttaaatcggccggagaaattatctgtgccccttatcaaaaggtggcctctgttttcgtcatgttttgacaatctgatttgaggatttaccctctgcgcagtgtttatagattagtatttatggtttagtcccccccctgattgggccttattgctttatggcgcttgtcgcaaattagccactgatggactcgtaattaatttagggacagcatcgattagattagatggatgtcgttttgcctccc

SEQ ID NO: 28253 - DNA, 1293 bp, DROSOPHILA
tcacaccgaaccaaacgtgcgtgagagtttcccaattttaagacaaacaagatggcacagagcaaattgaacgatcttgccggcaagctgggcaaaggtggtccgccgggattgggaatcggactgaaggtcctggccgccgtgggagcagccgcctatggagtcagtcagtccctgtacaccgttgagggtggtcaccgcgccatcatcttcagccgtctgggcggcatccagagcgacatttactccgagggactgcacgtgcgcatcccctggttccagtatcccattatctatgacattcgctcgcgtccccgcaaaatatcctcgcccactggctccaaggatctgcagatgatcaacatctcgctgcgtgtgctgtcgcgccccgattccctgaacctgccctatctgcacaagcagctgggcgtggactacgacgagaaggtgctgccctccatttgcaacgaggtgctgaagagcgtgattgccaagttcaatgcctcgcagcttattacccagcgtcagcaggtatccctactcatccgcaaggagctggtcgagcgcgcccgcgacttcaacatcattctggacgatgtgtccctcaccgagctgagcttcggcaaggaatacacggcggccattgaggccaaacaagtggctcagcaggaggcacagcgggctgtcttctttgtggagcgcgccaagcaggagaagcagcagaagattgttcaggctgagggagaagccgaggctgctaaaatgttaggtctggccgtgaagcagaacccagcctacctgaagctgcgcaagctgcgtgccgctcaaagcattgcacgcacgattgccagctcacagaacaaggtctatttgtcggcggatagcttgatgcttaacatccaggactctggcttcgatgacatgaccgagaaggtttacaaaatagccgatgacctggactaggaggcgatccacattcgttgttaattaatttttattgaaattccttcgagctagagcctaagtaccgtttagttttaaccactcccaagcggcgcattggcttcattttttcacgaattatctgccaagtgctaagtccttgtcacccggaggcagcttcatcccacatccgttcactgggtgccaaggattgaaacacggccaggcattttgtggaccaatgataccaatgcgggcaaatggccgcatcagcatttaactttccatgtcccatcatcgagagtcacgtgaaacggaaactgaaaataaatgcgtactgagaactgtctg

SEQ ID NO: 28254 - protein, 303 aa, DROSOPHILA
MAQSKLNDLAGKLGKGGPPGLGIGLKVLAAVGAAAYGVSQSLYTVEGGHRAIIFSRLGGIQSDIYSEGLHVRIPWFQYPIIYDIRSRPRKISSPTGSKDLQMINISLRVLSRPDSLNLPYLHKQLGVDYDEKVLPSICNEVLKSVIAKFNASQLITQRQQVSLLIRKELVERARDFNIILDDVSLTELSFGKEYTAAIEAKQVAQQEAQRAVFFVERAKQEKQQKIVQAEGEAEAAKMLGLAVKQNPAYLKLRKLRAAQSIARTIASSQNKVYLSADSLMLNIQDSGFDDMTEKVYKIADDLD

SEQ ID NO: 28255 - DNA, 5090 bp, DROSOPHILA
ccaagtgagtggaccttgtctggggcaagttgtgacatcttgccacttgacggccattatcccacgaacagcaacgacacccggctatcaaaggaaaccctatctagaatgtcatcgagtggcgctcgctatctggtcaatgtgaaactgaagtgcctggacatttgaaagtcgttggtcttaacgtcttcggagcggagtttccacctgtcacattcgccatatccttatcagccatatgatagtggcaataagacccctaaggctctgatgtgtttaccccagaagcgtgtccagcggtcttcattcattgagtgactgaacatcagtgtgggaaatggaactcaattaaaatgcataattctattttactattccgtaattacgattctaattgcgtgacttgtggttagcaaaagctttaatgttttgctgccagttctttatagccattacctaccgtagtaaacaataacattgcagctttggtcagctttggcttttggcgcttgagcttttggcgctgaatgcaaagcttcgctatgtggaatacgatccaatttccaaccgctttcaagttcaaagctatcggaaaacgatttgaaaatagcggctaggcaataaatcgcagataatttaggatctgtgataggatcgtaacattcggtgaccgtgtgatcagcataatgcctaaattggttacatcaaaagctggagattaggtggaaccccttcagggtttgaaaatgggtttgtgttttggggtggtggaggtgggggtgcaactgccacgcgctcttacactgtcaacaaatcagagcgacagccaacgtcacagatacagatacagatacagctgtagccgcgagctgtagctcaaccaaatacagataggcttacccacatagccacacgactactgggcgatgctggttagatgatctgactatttgcgtaaagcacctgctgatgctccgccaagaagccatcagttagtgagcaggctccaagccgaacggtagtgcctttgccttaaattccacacactacatattcatagttactaactaaaccaaatccaagtatggttaccactgtgaagaatcgtcgctttgaggatgaaggtgggtcctgatttaaggggttttacaaagaacttaaaagacattaagcttagttaaggaaagaagtacctttaggtgattcttaaaacataaagtcatatctttttgtatgcaatatgcaattaaataaataactgccatccaatttttgtttcataaagcatgaaaactcacattacaacccgatttctaaatttatttataattgaaagtaatatattttttacgactattttcaaactttttaaatcgactgcaaaataattccaacattgccacagcttctttccccttgctcgaaaaatatatatttactataaacagctctaaacaggcaaaaaattgcgttgaactcttatcagcgatgataacagaatatccataaaagacgagcccccaaattcagttagaatgcatagaagcgaaaatggggattaattcgggatttttaaatagctcggtgtaaagcggttgtaactgcttttttatggcccactcacagctagttaatctctgtcagcaaactcgagattaaacaaacaccgaacattagcccacaactacaatacatagagatatagttttatatctcagtaacttggggccaaagggttggaaagtgggtggtggttaggtggttcggaggcgcagacatagccgctgaagtgtggccgacaattgggcgccatatctatgaatggaatttttttcgtaatccagaaaccagaaacagaagccgcccccccccccaaaatgcaaatagaaaggcaaataattgtatatccagtgcttgtctggctgataagggatgataaatttaggcgtaaattacgcctgaaatggtagaaataactactatagcatgtagtctctcagttataaatccattcagttgggggcccgatctcggatctgtgggccttagaatgaccgtgtcttggccacaagcgacctacaggtgacctacagagacagccccacagtcataacatttaggtacatgtgcctctgataatgcggctgataatgcgactgattaggaatgctaatcgatgggtgattgcccattgactgggctgaagatcaatataggtgtcagattaccgaaacttacctaatcgattgcgttctgattcctttcagactccggcttgggtgtccgtcacttccaggtcttactgctattctttgcccttacggtggcctatggctgccgagtcaacctctccgtggctgtggtggccatgaccgatgccgcctccgtcaatcccgattttcccgtaagtacatatatggcgaagtcagtaatgaagttagcagaatactaaattactattgctttccaggagtataattggtcggagaagacgaaatccctgctgctgagcagcttcttctggggctatgtgatcacccaggtgccagctggtcaattggctcgcaaatatggcggcaaagtgatgatcctgtcgggactggccatctgctcgatcctgaacatcctgacacccatttgcgcaaagatcggaggctggcagctggtctgcgccctacgagtggtggaaggtctgtgccagggcgtggtctttccctcaacccacacgatcctctcccaatgggcaccgcccaaggagcgtgccacgttgggaacctgtgcctactcgggtaaccagttcggaacgattctcatgctggccaccagtggagtgattgcagcctcgccaatcggctggcccagcatcttctatatctctggaggaatcggatgcgtgtggtcggtggtgtacttcttcttcggcgcaggatcgccacaagagtgcaagtccatttcggcggaggagaagaagctgatcgagatgtcgcaggccgacgaggtgagcggtggccaggaacagccgaaggagcagttgcccacgccctggctgagcttcttcacttcacccgctttcctcgtcctgatcgtctcacactcggtgcacaactggggtttctggaccctgctcaccgagatccccagctacatgaagaacatcctgggcaaggacatcaagtcgaatgctcttctctcctcgctgccctacgtctgcatgttcgccatgtcctttgtattctcgtcgatatccgcacagttgaacaaccgcaactgcatttcaaggtctacgagcaggaagctcttcaactccattggtctgtggattcctatggtcaccttggttggccttggctatgtgaacccagatcagtcggaactggctgtggtcctactctgtttcaccgtgggcatgaatggagcgacctacctgggcttcaacacgaaccacatcgatctgtcgcccaacttcgctggcatcctcatgggcatcaccaacggcgtggccaacattatgagcatcattgctccgctgatcgtcggattcattgtcacaaatgaggtgagttcacaatcgatttgtaatcattatatccttgcctgatatccttgtcaggataattattttattgaatgccttgactaaacccccaatctcctgctacctttttccagcacgatcccgagcagtggcgcattgtgttcttcattgcagccggattctacctggtgggcaatactctgtacgtgatcttcggcaaggcgaatgtccagccctggaacgatcctccggcgaagcctcgtcgcaactccacgccccaggtggagtcgcagcactagatgaagctttgagcttgggtttatttaaatggttaccgaaactactagtcagctagttccgctctccttcaaatccaaaactatcaatcctatttgcagccaggtgcaatgcattctcgcattcgccgtgtatatttgtaaattgtatttgttaactgtgactatttcgtatttgcattccactcgtcttaagttttagtttgttaatactatgtgataagaatacccatgcaaaaaataagaaaacaaaaattacaaaaaaaaaaaaaacaataaaaagagcatgagcaacatgtgaaaagaaaaccgcagagatgtttgattcccacatgtggtgggtctttaatgtgggtgggaactgctcgattttgaaggtcaggtaaattaaaattattcgttcatctattttgagtaaagtgctcaagatcaatcataatcttagaaatgtttccaacactttcgttttgcattctctgaagttttttaactatgatattttattgtttttggaaacggtcttatgatcagctcaagtaaaaatgtttagttcctaattctgaggatttctttgtgcaaaatcaatagttacctatactaatagcaggccccaactaaatagcaaacttttgaattgaaaaaatattctaaattatgaaaatctgcttactttaacattttcgtctacttatactagtaattgcttgacgattttctgaatgaaggagcaaacaatgaaactttggatttggtttacaaaacgccccaaaaagtatgctttaaaagtagagatcgttgtggagaaatcttgtacagtgtaagctgcatatacatgtagaatacatgtagaattagctcatgtaaacagaagttaccaggtgatcaacctcaacgtctttatcattaggtacgtaaatctgatgttttggttatggaataaaatttgctttcaataaaaaaaaatcacgtgctgagaacgacctgtacattccaacgctttgctgacgcagcaaagattgcagacttgaaaacgcagatttgagttaaatactttatactctagactccgccagcagataaagttggatcacaaaacaaagacgagctggcaaatcaattttgcaatcacttaatccctatttcgagcgtatctctcacatttgagtgccgtgcacattttatagcttcgaactcggcgggcgaatgaaaagtgggggacaaggcggcttgggttgcgggatggggggcaaattccactg

SEQ ID NO: 28256 - DNA, 1768 bp, DROSOPHILA
caggctccaagccgaacggtagtgcctttgccttaaattccacacactacatattcatagttactaactaaaccaaatccaagtatggttaccactgtgaagaatcgtcgctttgaggatgaagactccggcttgggtgtccgtcacttccaggtcttactgctattctttgcccttacggtggcctatggctgccgagtcaacctctccgtggctgtggtggccatgaccgatgccgcctccgtcaatcccgattttcccgagtataattggtcggagaagacgaaatccctgctgctgagcagcttcttctggggctatgtgatcacccaggtgccagctggtcaattggctcgcaaatatggcggcaaagtgatgatcctgtcgggactggccatctgctcgatcctgaacatcctgacacccatttgcgcaaagatcggaggctggcagctggtctgcgccctacgagtggtggaaggtctgtgccagggcgtggtctttccctcaacccacacgatcctctcccaatgggcaccgcccaaggagcgtgccacgttgggaacctgtgcctactcgggtaaccagttcggaacgattctcatgctggccaccagtggagtgattgcagcctcgccaatcggctggcccagcatcttctatatctctggaggaatcggatgcgtgtggtcggtggtgtacttcttcttcggcgcaggatcgccacaagagtgcaagtccatttcggcggaggagaagaagctgatcgagatgtcgcaggccgacgaggtgagcggtggccaggaacagccgaaggagcagttgcccacgccctggctgagcttcttcacttcacccgctttcctcgtcctgatcgtctcacactcggtgcacaactggggtttctggaccctgctcaccgagatccccagctacatgaagaacatcctgggcaaggacatcaagtcgaatgctcttctctcctcgctgccctacgtctgcatgttcgccatgtcctttgtattctcgtcgatatccgcacagttgaacaaccgcaactgcatttcaaggtctacgagcaggaagctcttcaactccattggtctgtggattcctatggtcaccttggttggccttggctatgtgaacccagatcagtcggaactggctgtggtcctactctgtttcaccgtgggcatgaatggagcgacctacctgggcttcaacacgaaccacatcgatctgtcgcccaacttcgctggcatcctcatgggcatcaccaacggcgtggccaacattatgagcatcattgctccgctgatcgtcggattcattgtcacaaatgagcacgatcccgagcagtggcgcattgtgttcttcattgcagccggattctacctggtgggcaatactctgtacgtgatcttcggcaaggcgaatgtccagccctggaacgatcctccggcgaagcctcgtcgcaactccacgccccaggtggagtcgcagcactagatgaagctttgagcttgggtttatttaaatggttaccgaaactactagtcagctagttccgctctccttcaaatccaaaactatcaatcctatttgcagccaggtgcaatgcattctcgcattcgccgtgtatatttgtaaattgtatttgttaactgtgactatttcgtatttgcattccactcgtcttaagttttagtttgttaatactatgtgataagaatacccatgcaaaaaataagaaaacaaaaattac

SEQ ID NO: 28257 - protein, 475 aa, DROSOPHILA
MVTTVKNRRFEDEDSGLGVRHFQVLLLFFALTVAYGCRVNLSVAVVAMTDAASVNPDFPEYNWSEKTKSLLLSSFFWGYVITQVPAGQLARKYGGKVMILSGLAICSILNILTPICAKIGGWQLVCALRVVEGLCQGVVFPSTHTILSQWAPPKERATLGTCAYSGNQFGTILMLATSGVIAASPIGWPSIFYISGGIGCVWSVVYFFFGAGSPQECKSISAEEKKLIEMSQADEVSGGQEQPKEQLPTPWLSFFTSPAFLVLIVSHSVHNWGFWTLLTEIPSYMKNILGKDIKSNALLSSLPYVCMFAMSFVFSSISAQLNNRNCISRSTSRKLFNSIGLWIPMVTLVGLGYVNPDQSELAVVLLCFTVGMNGATYLGFNTNHIDLSPNFAGILMGITNGVANIMSIIAPLIVGFIVTNEHDPEQWRIVFFIAAGFYLVGNTLYVIFGKANVQPWNDPPAKPRRNSTPQVESQH

SEQ ID NO: 28258 - DNA, 2930 bp, DROSOPHILA
gcgattgtgatagttttgggttacctgctgctgattttcaaagtgggacccgatttcatgagatctcgtaagccctacaatatgcgaaaagccatgttgatctacaacttctgtcaagttctaatgaattctggcatttttttaatggtgggcatttttagctaattgctatacctataaacaaaaaaattaatttcatatctctgtacttgcagggcacttactatctttttattaaaaaactatacgatttccgctgcatgaccatgctgtcctcggatcatccagataaagatgtcgatcgtttgttgacctacttttactttatcaacaaggtgatcgatctgatagacacgatattctttgtgctgagaaagagcaacaagcaaatcaccgtactccatgtataccatcatgtattcatggttttgggtgtgccattgacatactatttctacggacccggaggacaatacaacctgatgggatatctcaactcatttgtacatgtggtgatgtacgcctactatttcgcatctgcttggtatccaaacgtgaagagcacattttggtggaaagagtacatcaccaagctgcagttcctacagttcatgatcctcttcgcccaatctgtactgacattgtggctaaatcccggttgccgttttcccaaggtcctgcagtacgttcagctgggaggttccgtttccatgatgaccatgtttggaaacttttactatcaaacctatgtcaaagccaaaagtaaagagcagtgatttataaatacaatgcagttctctttacgcaattgagccggtctcaatcgagtgtactgagactgagcgttttattctgggtctctcattccgaaatgtaggacagacatcgcagttcaaatagctgaataatacattatgtgatttgatttggcttcatttcgttaaaacaaactggattgtttcaagactgctgaaacagtcgccagcggttcctcaaacaacaatcaaccatttaataatgctccgatacttgcgcatacctcaagcgggtaagttcggcaatgtgctgattactacaagtatatcacttctttgaaatactcaacagatcctaacccaattccgctggctggatcaccatggcctatcacactgattttgatagcatatctgttgtttgtccttaaattgggcaagatctttatgagaaaccggaaaccatatgatttgaaaacggtcttgaaggtctacaatctatttcaggtgctatacaatggtctctacttcggaatggtaagttggatgacttgttacaatctttttgaaattaaaaagtgtgttcctttatttttcaggttttttattatctcttcatcgtgggcatttgcaatctgcactgcatagaaagctttcccgagggccatgaacgcaaacaattggaacgagtattgcatgccgcatatctgctgaacaaggtcctcgatcttatggatacggtgttctttgtgctgcgaaagagctataagcagatcaccttcctgcacatatatcaccacgtgttcatgtcctttggaagttatgccctaacccgttactatggaactggaggccatgtcaatgccgttggactgctgaactccttggtgcacacggtcatgtatttctactactttctgtcttcagaatatcccggagtgagggccaatatctggtggaagaagtatataacattgacacagctctgccagttcttcatgctgctcagttatgccatctatgtgcgattcttttcaccgaattgtggcgttccacgcggtcttctctatctaaatatggtgcaaggcgttgtgttcatttatctgtttggtaaattctatatcgacaactatctgagacctccgaaggcgaaaatcaacgcaaagcaatcgtagccttaagtcatttaaatatacgtaaatgcacatttaattagtccatgtatttaactaagcaatcactatgacttctgctctctcaaatgtgacttcggaccgaagatataactaaactgaacgaaacaataaaatggtattgtcccgaactatttctgcatttcattatggggctgtgtttttgtgccaacggaacagcgtgaaacgtgatataatcaaagctatatatgggatgtttataaaaaccttaatcgtatacagaaagtaaaataattttccattccacgttaagtcgcgtgtttcaacaaatttccatgaaaatgattgccgatgggcggtcgaaatgtatcgaaaacctaataacataaagctcaagcgaccggcgactggaaaaattgccaacacccaaaagaatattatgaaagatgaatatttgaaatgactaaggaaccctttgatctgttatcggcttaaaaaacaaagcacgatgtcataacatgcgtgttatattggacttggaactgaattagcgtgtgaatccgctacacattgaactcacattttaagggggaaaagtactgaatgattataggaaagaaccgtgtgtactaaagtttcataatattccatagcgatgtagacaattacataaacaaaataacaaaatatatcgtggtggtaatcgtattcttaatttatttgttcaaggtttgtttattgtcaatagcttataaaacatttctaaaagctcctattgaaagtaaaggtttttttttttgtggaaataagagaacaccaataatgtatgctaaagagaaatttcgactcaaaaaaggtcggaatttcaatcaagagctctgcaaatcgtagctttaagctcaatccatatatattgagtagttgtaatcgaataattattgtaagtttacaacgtattactcacatcgcattgtctataagacagctggcgagaaagcagcaaaaatcagaggtatgatat

SEQ ID NO: 28259 - DNA, 809 bp, DROSOPHILA
caatcaaccatttaataatgctccgatacttgcgcatacctcaagcggatcctaacccaattccgctggctggatcaccatggcctatcacactgattttgatagcatatctgttgtttgtccttaaattgggcaagatctttatgagaaaccggaaaccatatgatttgaaaacggtcttgaaggtctacaatctatttcaggtgctatacaatggtctctacttcggaatggttttttattatctcttcatcgtgggcatttgcaatctgcactgcatagaaagctttcccgagggccatgaacgcaaacaattggaacgagtattgcatgccgcatatctgctgaacaaggtcctcgatcttatggatacggtgttctttgtgctgcgaaagagctataagcagatcaccttcctgcacatatatcaccacgtgttcatgtcctttggaagttatgccctaacccgttactatggaactggaggccatgtcaatgccgttggactgctgaactccttggtgcacacggtcatgtatttctactactttctgtcttcagaatatcccggagtgagggccaatatctggtggaagaagtatataacattgacacagctctgccagttcttcatgctgctcagttatgccatctatgtgcgattcttttcaccgaattgtggcgttccacgcggtcttctctatctaaatatggtgcaaggcgttgtgttcatttatctgtttggtaaattctatatcgacaactatctgagacctccgaaggcgaaaatcaacgcaaagcaatcgtag

SEQ ID NO: 28260 - protein, 221 aa, DROSOPHILA
MRNRKPYDLKTVLKVYNLFQVLYNGLYFGMVFYYLFIVGICNLHCIESFPEGHERKQLERVLHAAYLLNKVLDLMDTVFFVLRKSYKQITFLHIYHHVFMSFGSYALTRYYGTGGHVNAVGLLNSLVHTVMYFYYFLSSEYPGVRANIWWKKYITLTQLCQFFMLLSYAIYVRFFSPNCGVPRGLLYLNMVQGVVFIYLFGKFYIDNYLRPPKAKINAKQS

SEQ ID NO: 28261 - DNA, 5126 bp, DROSOPHILA
gtatctttcagatacattcataatacaagtactgcatatcagtagaaagtcagcatacttacgtcgcaatataaactccaacatttaacttaagaacttcaaaatatgacatattcgagctgtgaatataattggttatatagttatgaaatcattgaatctattcttttggtagctttatattttcctgtattccagcatacccctccattgctgggagcccagttttcttctctctccttcgcagacttggccacacacaactcgacgtcttcagctggcgattggaactagtttttcaggttcggcgcatggcggctgataacaacaattgcaatgcgaatgacgccggacgacggcgcatgcgcgccactcttgcattcctttcgatggctctgggtgcgcagaactctccccccagccgtccctcccatccgggcatttgtggaattttaattgcgcaaaacaaaaaacaaaaaaaaaactgcaatgatgaggagttggggacaggcaactgcaattgcaaccgatgcgatggtggctggaatggaatgggattgggaatggctgggaatgacgttgaatgatggttagttgcagcccggttgcaagtgagaacatatcgcgtgatggtgatagatataatggccatgggacacagtgctcttgtcatgccagaagatggggctgcagacacgccttggactcgagactcaaatgcgcagactgctgattgcgatggcaaacagagccacagccagattacacatacagatatagaaacagaaaaccaacggaccagagcagaacgaagccgatggaagaaaatcttacactctgctcgaattataagtcgtcgacattttgcctaactaacagtcgccacggaaaaatgagccagcataaataaagccaagcaaggcggagcggaatagaatagactgtttgtgtctgttgttggctgctggcgtaattgaagttgcagaaagccagagacgagccaagcagccacaaaacctaaaacctaagagagaagcaacacaccgagatgggggccatctccgcatccacgtagccagtggagcgcgaggcatggcgcatacggaagccataggctgcaagagatttctcttctttggcctccgctcgactttcggctggctgttgaacccgcagcgcatcgctggagcgtgatctccccgcccccagataggcatccccaatctctcactctgctacctacttggccgaaaaacatactcaaggatgccatcgaaaatcaatcgcaaaatatgcgaaaggaagagagatgcccaggctccaatcgccgaaaattacaggaagcaaaagcacttggcgaaacgatcgaaaatcattcaattacgacagctggccctgcatataaaaaatgggcgtgtgctccacaaaatatcattatgtaagcacacggtgaaaaaagagcggtgggtttcgaaattattttgaaagaatccaaggttgcaaatttggaattaaatatacaaatattttagcaaaattaatagttggtagctactttttgaaattttataatcatttaaatacacaatttaatattttagcctatattaaaaatgtggaaaatattcttaataacaacgccataaatattgttcaattcacttcttcaggaactgaataaggtcaatagcaggtgcacacattaattacaggatgcgggtgcagaaatcaaggcaaatcgaatgaggtcagaaccctcagggaaatccataaataattgttccccccattcgaaaattacaatttaaattcaaaacaggcgccaaaacaaagcatttggaaattaaccagcactggagagcagcgaaatacttttatcgataagtaagctgttgacgcattttcatttggtatttttactagcccgtaggtatttacacacagaccagcaacgggcacaccagcaaagaaaaaagtgttgacgaaattattataatgctgcgaatataaacaaaggattgcgttgaaaacgtattaaatacgatctttggcacttaccaatcaggcaatgagtttcaatttctacgtggaatcgttcaattcaacgttgcagtcgattgcgcgacaagtggagcaatttgctggcgttgcactgacggcagccgtcgatctgcgcggaaatctggaatctttgaccggtgactttcgttgggaaaacggacccattgccttcaccgatctgcaggcgacactgctgaaggtgcttatcgtgctgcttctgggcacctgcgtactagccggctattcgtggtccatttacggcaaagtcattacggagaagtttgtcaggccaagtaggaatatgcttaaaatcaggatgttacgataagtttacttaaacgaaggccacgtcttgcatttcaggcacgctcaaggaaatcgaggagcttaaattgtcggtggccaagttgaagctgcccaaggaacactcgccgcgcatctagaaaccatgtccaagattaagaagttcttttcgcggaagaaggcggaggctgcctttaaggtgggttctttctttagccaagccattggaaatcccttaccaagttcgtttacagctcaatttaactggcagcggcatgggcactggccacaagctgaattcccccaaacaggagactccttcaagtagttcccgccaaaagtatgaggcctatgtgccaccaaagcgaaatgaaataagtaacgaggccagggcagctgccagtgcggcactggcgcgcattgacaagaaaacatccagggaattcaatacctcgctgtcggcagtgaaggcacaggctaaaagagagctggaggcagagcgtcgccagagagaggaagccatgggcacgccatcaacgaccagcacatccacatcggcttccggcggcgacactcgcaacctggcctgcgaaggcgtcttcttccgctgccccctaatcagcgaggagattctacccaagagcgtgtggaaggttcgcatcaaagagttcctctaccagcagctggaggcagatcgcggcctcaccgcctgcctgatcatccacaattgcaatgttaaggagaaggccgacgagtgcattgccacgctaatccgatatctggagaatcttatcaagaatcccgaggaggagaagttctgcaagatacggatgtccaacaaaatcttcagcgaaaaggtgcgctacgtggagggtgccctggatgttctgcaagcagcgggcttcaacgaggtccagatcgatggcgaacccttccttttgtggaccaaggagcagacggagaaggatctcgacttgcccacactagtggaagctctcaagagctcggagattattcccctggagctggatcgcaacattaaggtcctacttccatcgcaggcatgtcgtgtcgccctccccgacgagttttatcgcctgtcgccggaggagatcaagaaagagcaacagctgcgatccgaggccattgcccagtcacagatgctgcggacaaaggcgatgcgggaacgcgaggagcagcgcaatttgcgcatgtatcgatacgctttagtcagggttaaatttcccaatggactctttatacaagtaagccattccgcgatgatgtcatctgaagtaattttatgtaataagccgaatcattttcagggcactttcaatgtgtacgaaaaaatatccgatgtgttcgagtttgtccaatcttgcctggcggacgaaagcctggattttagcttggtgtccaacagcgatggcaaactgggcgatgaggacttggaaaagacactatatgactgcaagtgagtgatgcaataatgttttctttaggtacaacactacatgatttccttcatttcagactcattccgaacactctgctgctgtttagcgccaatgatacacccgctcctttgcaaacggatataaactacttaaaggaagaccttctaatgctggtgcaggctatgtagaagtgctttaacccatatattcagcggtatttgtcccttatattataacagagctgttgttatttattactttcaaatctattattcaaaatcaattataaacgcactttacacaaaagaaaatttctttaaattaatttggttatttggctgttgctacttgttcgcttgaaatttatttatattaaaaacttatttttatatatttgcttaactaaatacatactttcaagccactgtgcgtcaaacagctgtttggtatctttttggctgcggtatttcaggtgggcttttaagcttacctgcaaacggtcttacttattgcaaaaataaacaaaaattgcaacgctagcaagtggaaattgacgaattattatttaactatgagcttaaactgtgagctgtgaggaattgtgaaaagtgcacgaatcgctgaactatttggtgctatgtaaatgttagtgagtacgcaagtctagaatcatatgtttgtaccaaacaataacaaagtgcggccaattgcattttgaccataattccattaacaaatgcctaattgttgcttagtcacattagtttcggggctcaaaaagtcataaataatgccattaataagcggagcaaatgttacgcctgttttggaagtttcccgcactcttttgtgcggtcagcgcatcgcgtggttccgctgaaaacttgtggcccactgtaatttcccaatccacgcgacttttcctggccattatcgaattattaatagcatgtgggtgcaatttgttgatgcggactactaattaagcaggcagcttgatcgtacggctgtcacattttagaaactgcttggaacttagctcaataatcaaccctctttttaacaatacgatatgaacttatatgatcaatttgaattaatagtttaaacacatattatcagactcattaacttacaacaaatgtagcttatcaatatacccaacaaagataccttagaaagataagattatgctatataatagatatatatgaatcccctttgtttccaaaacatttacacgaaatgagaaagtacatatatcgtatatcgtatatcgtgggagcccaaaactggagcatt

SEQ ID NO: 28262 - DNA, 2311 bp, DROSOPHILA
ccaagcagccacaaaacctaaaacctaagagagaagcaacacaccgagatgggggccatctccgcatccacgtagccagtggagcgcgaggcatggcgcatacggaagccataggctgcaagagatttctcttctttggcctccgctcgactttcggctggctgttgaacccgcagcgcatcgctggagcgtgatctccccgcccccagataggcatccccaatctctcactctgctacctacttggccgaaaaacatactcaaggatgccatcgaaaatcaatcgcaaaatatgcgaaaggaagagagatgcccaggctccaatcgccgaaaattacaggaagcaaaagcacttggcgaaacgatcgaaaatcattcaattacgacagctggccctgcatataaaaaatgggcgtgtgctccacaaaatatcattatcccgtaggtatttacacacagaccagcaacgggcacaccagcaaagaaaaaagtgttgacgaaattattataatgctgcgaatataaacaaaggattgcgttgaaaacgtattaaatacgatctttggcacttaccaatcaggcaatgagtttcaatttctacgtggaatcgttcaattcaacgttgcagtcgattgcgcgacaagtggagcaatttgctggcgttgcactgacggcagccgtcgatctgcgcggaaatctggaatctttgaccggtgactttcgttgggaaaacggacccattgccttcaccgatctgcaggcgacactgctgaaggtgcttatcgtgctgcttctgggcacctgcgtactagccggctattcgtggtccatttacggcaaagtcattacggagaagtttgtcaggccaagcacgctcaaggaaatcgaggagcttaaattgtcgaaggcggaggctgcctttaagctcaatttaactggcagcggcatgggcactggccacaagctgaattcccccaaacaggagactccttcaagtagttcccgccaaaagtatgaggcctatgtgccaccaaagcgaaatgaaataagtaacgaggccagggcagctgccagtgcggcactggcgcgcattgacaagaaaacatccagggaattcaatacctcgctgtcggcagtgaaggcacaggctaaaagagagctggaggcagagcgtcgccagagagaggaagccatgggcacgccatcaacgaccagcacatccacatcggcttccggcggcgacactcgcaacctggcctgcgaaggcgtcttcttccgctgccccctaatcagcgaggagattctacccaagagcgtgtggaaggttcgcatcaaagagttcctctaccagcagctggaggcagatcgcggcctcaccgcctgcctgatcatccacaattgcaatgttaaggagaaggccgacgagtgcattgccacgctaatccgatatctggagaatcttatcaagaatcccgaggaggagaagttctgcaagatacggatgtccaacaaaatcttcagcgaaaaggtgcgctacgtggagggtgccctggatgttctgcaagcagcgggcttcaacgaggtccagatcgatggcgaacccttccttttgtggaccaaggagcagacggagaaggatctcgacttgcccacactagtggaagctctcaagagctcggagattattcccctggagctggatcgcaacattaaggtcctacttccatcgcaggcatgtcgtgtcgccctccccgacgagttttatcgcctgtcgccggaggagatcaagaaagagcaacagctgcgatccgaggccattgcccagtcacagatgctgcggacaaaggcgatgcgggaacgcgaggagcagcgcaatttgcgcatgtatcgatacgctttagtcagggttaaatttcccaatggactctttatacaaggcactttcaatgtgtacgaaaaaatatccgatgtgttcgagtttgtccaatcttgcctggcggacgaaagcctggattttagcttggtgtccaacagcgatggcaaactgggcgatgaggacttggaaaagacactatatgactgcaaactcattccgaacactctgctgctgtttagcgccaatgatacacccgctcctttgcaaacggatataaactacttaaaggaagaccttctaatgctggtgcaggctatgtagaagtgctttaacccatatattcagcggtatttgtcccttatattataacagagctgttgttatttattactttcaaatctattattcaaaatcaattataaacgcactttacac

SEQ ID NO: 28263 - protein, 537 aa, DROSOPHILA; identical to SEQ ID NO: 11442

SEQ ID NO: 28264 - DNA, 18753 bp, DROSOPHILA
tagtggaagctctcaagagctcggagattattcccctggagctggatcgcaacattaaggtcctacttccatcgcaggcatgtcgtgtcgccctccccgacgagttttatcgcctgtcgccggaggagatcaagaaagagcaacagctgcgatccgaggccattgcccagtcacagatgctgcggacaaaggcgatgcgggaacgcgaggagcagcgcaatttgcgcatgtatcgatacgctttagtcagggttaaatttcccaatggactctttatacaagtaagccattccgcgatgatgtcatctgaagtaattttatgtaataagccgaatcattttcagggcactttcaatgtgtacgaaaaaatatccgatgtgttcgagtttgtccaatcttgcctggcggacgaaagcctggattttagcttggtgtccaacagcgatggcaaactgggcgatgaggacttggaaaagacactatatgactgcaagtgagtgatgcaataatgttttctttaggtacaacactacatgatttccttcatttcagactcattccgaacactctgctgctgtttagcgccaatgatacacccgctcctttgcaaacggatataaactacttaaaggaagaccttctaatgctggtgcaggctatgtagaagtgctttaacccatatattcagcggtatttgtcccttatattataacagagctgttgttatttattactttcaaatctattattcaaaatcaattataaacgcactttacacaaaagaaaatttctttaaattaatttggttatttggctgttgctacttgttcgcttgaaatttatttatattaaaaacttatttttatatatttgcttaactaaatacatactttcaagccactgtgcgtcaaacagctgtttggtatctttttggctgcggtatttcaggtgggcttttaagcttacctgcaaacggtcttacttattgcaaaaataaacaaaaattgcaacgctagcaagtggaaattgacgaattattatttaactatgagcttaaactgtgagctgtgaggaattgtgaaaagtgcacgaatcgctgaactatttggtgctatgtaaatgttagtgagtacgcaagtctagaatcatatgtttgtaccaaacaataacaaagtgcggccaattgcattttgaccataattccattaacaaatgcctaattgttgcttagtcacattagtttcggggctcaaaaagtcataaataatgccattaataagcggagcaaatgttacgcctgttttggaagtttcccgcactcttttgtgcggtcagcgcatcgcgtggttccgctgaaaacttgtggcccactgtaatttcccaatccacgcgacttttcctggccattatcgaattattaatagcatgtgggtgcaatttgttgatgcggactactaattaagcaggcagcttgatcgtacggctgtcacattttagaaactgcttggaacttagctcaataatcaaccctctttttaacaatacgatatgaacttatatgatcaatttgaattaatagtttaaacacatattatcagactcattaacttacaacaaatgtagcttatcaatatacccaacaaagataccttagaaagataagattatgctatataatagatatatatgaatcccctttgtttccaaaacatttacacgaaatgagaaagtacatatatcgtatatcgtatatcgtgggagcccaaaactggagcattgatcctaatcccaagctggcttcttcgctgccactaaacaaacagttgcatttaatgaaccaatttcgcagttggcctttactgtctatcacggcggcatcgaaaacggccaaactaaaagtctgtggaggagtgaggagaggagtgggtagattaaggagtgcttcgcccaggctccgggcactggcaatttggcgtaaatctcgcttgatcttgggaaaaggtaaatagaaaagcagccaaaatcaaacattaatgaatctctacggctcagggcttaaattaagccaagcaatcgcgccaaatcgaaacacgcagccacgagaagccaaataaaaagcaggcagaaagccagagactgcaagccatcgcataaattggcctgggctggagccaaagatttcattgttggccattgcttattatggccgggcagcggatctaggccttcattaaacggccaaaggcagcggctgcagttgcaccgggagaaatgtcaccaaagttggtaggctacagttcttaaatgatactcagtccaattaagtgaccttttttaatgccttatctttaagatgtgtatttaaataaacccttttgaaactttagcacatcttgcatacacggctttttctccctgtgtacaatagagccttatttcaactttggtccgcgaggctagtgcgtgagatatgcattatttatctagcgaaatttttctcattgctgcagcggcaacttgttgcaggcagacttcctggtttcttgggcccagctgcagccactgcagcccagccaggccagaaattccaaaatgatacgaatagtttgtttctgtcgggagatagcgagaaatatgtgggacatcctgaggatcgttgtcttctctttttttattttttgggggggagctggagatggggatgtggatagggattacgagttaggggttagctgttacccattgccgggttgcaacctgcacgtgcctcgcctcgctgcgccgcctgattgaacgattgaaagatcatcacccggcgcaaaatatctggctgtacataatgatgatgatgaggtgcaaattgccgctgccatgaaattgcaaatcaactctcctgactcccgattgcacttcattctaaattgtttgctcaacccagcagctcagccgttttggcacttctttcgcgaatcctccggcgccggtgcaaaaattgcaaatcgaatttgccaattgccgtgctgccttcgcatcgctccactctccggttgatttgtttttgtggtttggccacgaaccaaccgcattgcccgcaaaacggcaacaattgcgaacccgccctttaacaagcatttagcttgctccgccaagctcgtgacccattcccatgcccattcccgctgcctagtggccaagaacttctccaatacgccgggcatgtttatgacccggctcgaaattgaagtggaaatcggttagcaagcagtgggttcgcttttcgatttgtttttatcgctccacgcaagcgccctgaatttgcatatttctgcctgcatttgaaccctgaactcgaggggccaaaggaaatgcgatcccaaaaaagtgagcaggaagacagcggcgttagttcgctcctggcggaaatacttcccctatgacgggaaaaacaaataaataaccataattaaggcttgtgctttaattaacaccactgaacttgggcgacacaactggcatagtaagaaatgatatttctggaagccggaagcaagtatactcttttgcattcgatacaaatagaatataaatatttgtattcatgcttataataataagttaactacttattattatataataataattataattatataattataatataaccaataaaaacaagttaaaatataactttaataatcattaaaataccatctttatctttaactattaactagttcacattatatgctccaatttaccctaccatgcaacctatcacaattcgcaatcaaataagaacttccggtccactcagcgagtgttttatgaatgaaaatcttgtctcattgtctcagccagctcctcatccccatccccatctccatccacatcgccatcatcatcgctgtccagcagtcgatctcgatgtccatcgtccgatggtcacgctcatcgccaattagtgcaatcaacagtgcggctgagatggtgggtgcggtttttctggacctcagtgactgggtgcttcatcgggttgcatttggttggacctcaacctaggcaattgctagggaaatcttacagagttcacttgataagattaattgactcggcctcccttcggtttgtcagctaaaatgtaacacaatccctggtgtagtggtagaaactttaagctattgaaatattaatatggggcttggacctacaaagtaccaatcctaacttcgcttaaaccaatattcattcaaagagttacctatcataacttaccattataaactatcataacatacttatacaaatatactaacttcaatttaactgtggatagttttggcgtctttctttcaaatttaatgacttataaaagacttaattttcccatcaaactattagtattagtattattattaatattatccatatactctataggcttcgaaagaaatccttctatctttcagatacttcttaacgatataaaagtttacagtttcataatatgcaaaactagttgcaacaatgttgtacaagcgaattcgctgcgattaaacagcataattaaaacgatcagatattgcaaaagtcgaatgtacattttattggctattgcgaccagcagctcgttcaatttataacgtaccccctcgataaactcaaccatcccaatcgcttggcctagcaactgcagtcaatttcaaacacatttgcaatttgtcaaattttggtagccagtgccaagataaattaatttcggcatcgatttgatcgcttgtctctgtggtcattttgcatggctgtgtgaaatgaagggggcggggtggctaagtttggctaagaccatgttagccacaagccaacatggcttggctcattgtaaatgtgctttaatgaccaccggtcagcaaatctcattttttgtcgacggaccgcatgctgcttcacacacacacacacacatacacacacacacgctctcgtatgctgaaagagacgggcaatgggggcgagagaaagagagggcgcgataagagctgccttggcacgaagattttctggtacctggtataccccctcgtgaaacgcccctgcgtccatcactggccaaaataatgaccactgtccacatggtgcaaaattagacatatttccttctttacttcgggtgttatctgcctgcaccgccacgcctccctccctccacgatatcttcgttcaccttttgcattttcaacaccgaaaagttttacattcggattttccgcaactgctgagaaaaatgacattacaaattgtgggacatttgtctaattaaatccctgcctgctccaataacaagagcttagattacaatctcacagcggtgcgtaatggcttttgagccaacttcggcatgaagtggtcattgtagggaggggggaggtggaggtgtggaaaaggttgcattttgggctaaaatgttggcaaaattgagttggcaggaggtcggtatgcgagtgatagagggctgcaatttgtgctccagtttcgggggattctttgtaaaattaaacactccacaatacaatctattttcattggaaacttcatcacttctagggcttaaggccaacaaatagctgtttaagacgagcttacttatgtatgaataaaaatatgaaatctaaatattattctagacttatagtaatatgaaacaatgcatttgtaagtcgcttgattccatgataaggagtaaaaacaattttagcccatatttttattacccttgaccaacagatttataaaaatgtaatgcacagctgatacgcttaaattagatttatttctatggttataaattggcataactcataatttctttcataaaagaacccttttttttgacttttacttaaaatataggggcatttgttgctggtacataaagtactggccactgaccaattagaaggagcacagaagtgcaaccccaactgaatgagtgaccacttagaaaaaagaccgagtggcacagtggaccggcacttgatgaaattaagataaactcaaacaatagccactccactcagtttcaatcgagttgggattactcatctagagggaaagcactcaatagccaactgataagaacacgtgttgctccagccgccgtcccgctcgcaccactccagagaggctccacaagttgggagagcgagaggctcgttgccgttgagcttggctcgggagagagcagcgactcgtcgtggggtccaattagattaccggcaacaagcatgcgctccctttctgcccaacgcacgctcaactgaaaactgttccaaaggctttggcgctggcgcttctctcttctattctcgccgagtgtcttttgggccctccattcgccagtcgacttcgacttggactttcggctcagttgcttttcagtctctttccggtttgcgtctcgtcgtctcgcggaaactttggcgcacacgcagttccagacaaatacaatttagaattaaataatatttaaaaacacaagtgttactaaaagtttcctaaaaaacgattgttaagaaatgccgatggctttgtgaaaatcagtgaagataacaatccttaagctaaagtctatatacatagatctcctatagtgcagtgagaaattggaattcaatgtaagttctagaagctaatgctcaagaaagcaatacaaagtacataaattttaaagatatatcatttttaatacaactaatgtgcaaggaagtagtaaagtcaaggaattctttttacattcttgagtatgtagagatatgttcaaaaaatgctttcaccatcctagaaaaataagtcggattttgccaattccgaggtatggtaacttctaacggagcctatgaggttatttatatgcctccaaaataataatctatgtaagccaacgaaagtgagttctgcctatctagcagaccatccgcttccagattcaaattctcagttttagaaggaacactcacgaaatacaaatgccttcttatctcgcatcgcttgaagatcgttaatatttatggaatatacatagaggatgggcatccgagctgcgagaagctgataagccgacgacgctgattattcagtaatatgcatcagagatctatattgtgttgctccattcagttagcagcgttcgcaggcggcttatcttcgattttcccgacgggttttccccgcctatcgatcaccattcgaacgttccccgttcgaaattaataacttttgtgagaacaactggcagcgacaacgagcaggcgcgcacagtgaaatcatgttcgagtgattaaattaattaatgatatagacacactgcgcaatagtgtccacgcaatcgcagaaggagttagagatcttcgctgtgcagatccacagacttgtcgatcctgcagcgaccaacgccacatgatgcggatcggtggatagctggatcgcctggataccgtggccagaaccaagacaagaccatctgaagttgcagaggcgagcagatcgttgtcttaacttgtcgtacacgatgtcttatacgtgtagcaacaatttatttcaccggccagtggatcgatcgccagtgcaatcgatgatcgtgggctctgggaaaaggagtctgaggatccggctatccctggcgatcaatcaagcccggctagatgatcaatattagcaggtctaaaaataattgtagactggccatctctgtccatataagattggagaagaaaaagaggcgaagaacaagtaactaaatgggttcgtttagttttcaactgatagtcggctacactgttgtgtttgtgtgttatttaataggcaggcacataatatagctaaataaaaatagattacatttttagttgagtcaggaaaaaaaaaagaaacttctctagatgcccgtgctttcattcgctgataggaagtacgtaaacaaatgattaatttaatttaatcattttgcattatgccgatactgacagatttaaaagttaatgcagttaaattaactcataataatacaaatataacaaagaaaatattgcatttattttttacaagattgtagcttacatgtgttgaatatataaaaacaccttatatatataaaaaaaaacattgataatacaacggtggacaacatatgtctctatacgaagcatgagtcagatcatctcagtaaacttcagtcagatgtcgggagatctaatttggcttgccttttaggtttgttaagactttacgacttgtgtaattagtttttccctcgaagatcttttatggcgaccgccagactccgagtaatatgtacgtatatagatatggatgtgctaacgccccaaatagccaactctctcccagttacattgggtgttccaaaaaaaaaaaaaagggaaaaaacacaaaactaagatgccattaaaaattggagtaactgtttttccaactaatatctgtgtccaaagcgctaattgaaggcaacttcacaacttcataggcgactctcccagcagccagctcctccgggtcaagggtcaaagttctttcagtttgtgcacgtgtgtgtgtgtgtgtatttgtgtgatttccttgagacaatgggggccgaaaaagagctcgtcgcctgactgactaacgacaagtgcccgtccagtgtacacccctttttcgagtaagctgtcaaagacgggcctgttggccaaaagcttgtttacagccttcgatgccgatgccgatgctgaattaattaaactaactccgagctggactgaaggcatgggtaacccccggtggcagccaggtgagtgcagctcaatttgtgctcttcgaaattggtcagtgtaacccgaggacaatgacttggaccgcctgcgactcccttttatggccccaaacttgtctgctcgtcagaggtccttgcaagaaaaggacataattgctgcaatagattctcgacagaagttgaaaggttgcatcagctgaggatgtccttacagggactagaaaacggcaatgaaatttacacatggttatagaaaatcaaaccatttaccttcggagtatttgttttctgcttaaacttataattaccaatttcgtatacatatatgtatgttacattgtggtgcttctgagtcctttcactaatctaactcagccttaaccatctcattggccaacattttaatttcctcctgtgactttgtgagaggaggaggggtcacagattttctaaagcttcggcaacaacatcatccacctcctcatctattttgtgtgcgatggtctattgattggaatattcattgaatagtttctaagctgatttatatgctattgtgtgtgtgtgtgtgtgtgtgctgtcgatttaataaatatttaatttcaactccggccccgtctgctgatggctcctaaatccacacataaaagattcaatcagcggaaggagcacggtccagttggaggccaaagagccgacgatgatgatgttgttatagccggtgtgcctgaccgcctgccagcctgcattcacgtattaataatgccgggcagcgaataatccgcagagctcccgagacatcgtaatttgcaaaatgcacaatcgcttcctataaatcaaaccaaggagacacaccgtccagcagcctcgacgagaatctattcagatctcatcgctcagagctgaaatattcatgcatatatatatttcacctggccaaatcacaaaggtttctttcgaaagcctttcaaaacgaaatcaagccgaatagctgccacgtcgtcaaccgctatcaatctcaggtgaaatggagctgcgtccgccggccattagatgctcccagctacaacatcccggccagcaatggtccattctgttagcaggaaaccaggcagagccatccaatctcccacaattccaaccagcttcgcagtcatcgcagaccgagttgctccgctcaaaggaaagcgcccgtcgcaatagatcgcacattgcagatagaggcgtgcctgccactccactccacaaaatcgagaagtgacaaatctcgtggcgaaatctatataccctagaaatgaatggaattaaatgtttgtatatggataatagttcagtcaccatacgtttggtttcatcattgatttaaaagaaaatcttcaaggaatatatatatgatatgataataggatatgatgttgtaatgagttgatccttaatattcaaaagtacgcttttggatggagaatatattctggtaattcctgtgactttccaaattgatagtttaagatttggcaaactacaaattgacgaaaatgttccaagaagatccctaaagtctccagtgataaccgtgataacatgccacccgtttcaaagggtatacaaaaggcaaagtcaaacaatgagctgcaatttctggccacaaaggatgaacgcatcgcgtacgccggttgggggaagaaaataaaataaaggaggcaaagaagtggcagggaggggaagaaagaagacgaagagaaaggagttggggacaagagcaagagaagcgttgggatagatggagtcgcggagcagcaagagtcgcacattcggcgagcgccttcagcagttgttataaattatagtgccgcatgcggaatgaatgcccaagatcaaaccggtggtgcacacatactatatagccatgcatcaccgtaccggtgcggtgagggagggagggtcgattgggcggttgggcggctataaaaacaaacctccgcccccgcacgtagtcatttgtggttgctgttgttgttgttgttactgctgttgcatgccgcctgttgcatcaaaatatttagcagtgtaccgctatgaaatttggtattccaagacgtaccaacatgccgcctgagtggtgcagagcactgtaaaaaaaatcaggcaaacatccttttaaaaaatattaaattaatgcagcaaatacataggtctgtaaggttttaccttcttactccatatttttgatccaacttaaatttgtgagaattaagaaaaattcattgctcttttctagcttcgtgaattaaaatgattactttaatctacatttaaaattcagcatttaaaatataagattcaaaatactcgtacatttttttgtgtgtgtttttggcagtggtgctgcagttgggttgccattaccattaccacgttgtaggcatgttgtaaatgccagccgactgctgtggacttttgtcgttttttgctgctgcagttgttttgtatatatgtatgtcggtgtgtgtgctttttggccataaaaacagaaatgagcccacggaaaacatgtccaattgcgctagcaaatattcaacgctggcggcgcatcagacaagaccagatgggcaatccttgatcagaatttgcgggaattcgagactactaggagatattttggcgcaaagacgccttaaaattagctaaaaattatatgaaaatattaattataatcttaaagatactcagatactgcgcagataaatcatgatcgcttgcaaaatgaaattttccgatcacaaacgaattttgttgaaattacagattcgcggctgctcaataataatccataacacatatcaacagtgcggcgattttccgagaatttcgcagctaattttttagtacgcgtagcgttgagcgcagtccataaaagccaaacgagtttaacttagttagagtaagtcagactttggtttcagctaatgcaaaccgacggcgggttttgtttgacgagtgcaactgcggaggagaggacgacaaacaaagtgccgcggttgtcaagcagcaacagcaacaatatcacagagacaagaaggaatgcttcagtgcagtggctcgactattagatacccattactcgcatttcttcaccttcagatgcagaagatattctacttacggacaggacaaacggacagattaacggacagacggacatggcgttctcgatcagccatatatgaagttcaaaaggatctgtctgccttcatagcccagcatgcccagcatactactctgcgagtagggggtatccaaaatgtaaatacaaaaaaataaaaccgaagacaacgactgcgtttggtactgtgtgctatgctaattactggacatgacggcagcgcattgctttcggaatcgacggaccccaaccacatcgaaatccatgtgaacaaaaggcgcaagcgtttacgcacactccgctccgcagtcgcatttgcatttgcataagcagccataaaaacaaaataaggaaaaacaaaccaactggctgccaaggcattcgctaaaaaacaaaaaaataaaaaaaatcaaatgtggaggcagcggcaacttagcagatactacacgacagcaacaacggcagacgatcccaacttagtaatgggacaacggacttactcagaattcgcctttcttgggccgcactgttgtgtgaaaatgaatttccttttcggccaagtcgagggaattgtgcaatgcaaatgccgccaaataggccatttgtcccgagcgactaaataacttactaaattggatctttgtcgatgggttcttaactaatatacaactggaagaggccaccattacttgtttattacaggttttcttaaaacttcaaagtctacgaagcaaataaacccttacaaagataaaagatactttcaagaatcatttacatactttggttagatcaaaattaaccatgtatggtttagtttcttacctatttgaaggcaatattatcacacatttccaataacataaccaattcaattccattctattctatcctcactcgtttgaacgtatatattgccattcaactgtcgaatgattgacagccataggtttcagttatttttttattgcatttctaagtgaatgaggcgatgacagtacgcgtataatgaacctatcatcattaatcattatctggatgaaatagaatcataaaattgaattactgattcaagccacgacggggagcacgacgatcggtaattctaattagagctattcaggaaatcttcgactatagactttggatttttgtcttagccaaccgtacatgtatttccatcttccacagcgattcagagtcgctggtttagaccaaagttggcaacaaaaaaaaaaacagaaacgacacgaaaaacatggccagaaatgtcaacttgaattcggtctattccttcgcttgttgttatttcttttggcggattttggcatcccagaaagttgtaaccgccagggaggaacacgaagcccagcttccactcaatgttaactttcgatttcctcctctttttttttgctttgcttttctttttccatgggtgaccatttcttgggggaacccagctcagctcagctcagctcggaaggtagccgggctcacgatatttgcgtgccaaagcaaaattgtgtggaagtcaattggcagtcacgtttggccaaaaccattggacctgggtcttggaccacggccaaaacaatccactgcagatgggccaaattaaattgtcagtgcggcattaaatgccagattattggggatcaacacaagtggggggcagaatcagctccactgtctgtatagagttatctttcgattaacaaacgattgaaattaattttacaatatttccgcatgctggccatgaaatgtgtggaaaacaatgacaattgcaacagcatcagcaactgcagcagcatcagcaactgcagcagcagcagcaacaaaaggaaaatcacgaacccggaagaaggccttcagatttggccagatccaagtggctttgctttgatttgattcctccaactcctccgctcgctctgtcacatcacatgttgctgttggcttaagtttcccgccagcaatttcttcattttgcccggaattttggccaggcggagaaccgaaccggttgtgttgcagcttgtttttcttagctgaaatttgttcgcgctctcgttgacaattgtgttgtgtaaaaaaaaaaagaagaaaaagggctgtctaaaagaatttcaagtgtgcggccagcttgttcagacacgaggacagatgagccggatggctgaggctgggtgtaaattacttggccaaaaccaagaagcaagagccaagaaccaagaacccaaaaactatgggccaagaagaaaagtagcagttgtagctgttgctgctgtcagttgcagttgcagttgcagttgctgccgccgccgttgttgcactcgtcaaaattgcaatcaatcatgtggccaagaatgcccggccacagtagacagacaaatggaacctgttttctggccgggctatcagtgttaaatctacaagatcattttgccagctcggccacaaacccataatttgtgattgttataagccagaacagaaccgtaacgagttctacggaccagtccgtgctcctaatagactcgtcgccggcctaatgaattgaatcgtttctgatggccttgtttgttgcgttccttttctaccacatttttgttcgtcttcttagccatcatacccgttcgactgccatcgatcagcacgggattgggggactcctctttgactagctgagtgggatttcttgggattgtgcttggctggacggcctatcaggtggagggaatctctggcccaggcacgaactgactggcaagaccgcccgctcagccagagtcaacagaacttttgggtctttgattaggaatcggttttggtggaaaactcggtcatcctgcctcacctacatagatcggctgcattttgcggttccttttcctgcttggttcgattgcctggctggttggattgcacaaaagaaaattctacttccattgaaatatgttaaataaaaggacttatactacttatattactatgaagttgatcagttttgtgtgcagatacaatatacaatacaatatcgtttcgatacacttgtgctatatgcaatatcttcacaaaatactagagtattttacaactattatttctacacctcttttctctcactgtgaccatccatcctttggctacgagagtggagcgagcctatcgccaactgtcatcattttcaaattatttctcgttgaatatctaatcaagattcatgcatgatcgcggctaaattgcttccaggcaagaacagaccaggccggactcggagatggagaccagcataacaattgctatcctagctgggttcctgggccatccagcatctagcatccagcttcagaatccaagtcaagcatccagagcgggctcttcacgttttgctgtttgatttttccacaacgttttccattgttttccgccccgaacgaagttaatagtgttgttcctggttggggattctttggggctttgtttgctcttttggtttattattttgtgttcgtttaaggtttttttttgtttttttttgggacaagcatacaacgatttttgcatcgggaattagctcagacaattgttttttgagacattttttttttgcgctacccatgtaatcatttatgtttatgagcagccccccttacgatgtgttgttactttgctcgtattcgcatatgcacttatacttgaactttaactcgtctttatttcacttaattgaaactagacagcatccgtaggtaaataattcaattagccgacgggcggtgactcaagtcgagttgcaattgcactcagcgacagggtgatgttgagcattattaaattctacatattaaatttgttgttcatttgatggctaattcgctgccgcagcgtccacttaatgtttattaaactttcgtgtgacatctgtgacttggggtgttcgcctcaattggccgtcatatgggcagtggttaacactccgtaaattgatgacccccccggtggccttctaattgtttcattagatttccacgctggagagacgcacgagccggccaaaatgggaatcgatccccttctgggccacgcctctgcgaaccaatttcagggtgtccattgttggttaaccggtgagcgaatgggaatcgaatcagccgcaggcacccaacttttgacatttttattagcacttctcgttcgagagctggttaaatttacgagtcagtcgtggcaggatcgaggtgtaaacatatttctcagctccggctgcatgaaattattatcaaacatgcaaatctgtggcggttgcgggcatcgtaaattgatttttatgctgctgcttctgttgaagtttgagttcccaggggggggaaaatatacatacatatatcccatattcattggattctaagtcattttgtgttacctctaccgcttctagtttgcctgctactcatcttgctcgagagccaaaatccaagcaattgaaagcgaaacccttgcgagagggtcaaggaaggatacaacagacgaacagacagccaggatggtgctcgtgctgaatggtgtgctgcaggatgactgccccatggacaccaacagcctgttcctgcagcatcccgtctacagagactacgcccagcagctgcactccattcaggccaagtcggtgggtccggtgggtctgctctacgtgggtcagcgggagatggccgcctctgccccgcacgacaagcacgtcaacatcatcggtgccgacgatgccaccacctgtattatcgttgtggtccggcactccggtaagcatacccaatatcctttgccccataaataagcgtcgtttggctcattaacccgtactaataatgtttaccaacaattcacgacaggatctggtgctgtggccctggcgcacttcgatggcagcggcgtggacgaggctgtgtgcaccatggtgtcgcgggttcaggagctggccgtcggctatccggagggtcgcatcgagttgcagttgattggtggctatcgcgatgccaagggatacggcgaggacgtattcttcagcattatgcgtgagttcatttctaagctgcgtgttttagttcttatatgaatttcatttatcatttttctcagaatcattccacaatcacctacttgaaatcgatctgacgcaggcttgcgtgggcgagctaaataccatgatgcgcggcgagatcaactgccccatcatctatggagtgggcgtgaacatcaagactggtgagatctttccggcctcctttccagaccgaggacccgaccgggagctacgcgatgctcgcatcttcatgggcgcgcagtcggtaagtaaaggccaaaatttcccaatgagttaacctgctaatcacttggctgtgcttcataggttctggatatatacgactcctcgctgggcatgctacgcattggaccctttaactacgatcctttgcgcggcgctgatctgtggctatcacaaacggatgagtttctgttgcagcacctgtcctccagtccagacgtggagccgcctcactttgcgcctcaggtatgcatatactatatactatatgtttctgtgcagacacataagtttttttttaattgcagacgcgtgccaccattaggtttatacaggagaatcagttccccgccgtcaccgttttcagggacaatcggccgcgctacttccggcgggatgacgccacgggcttctgggtgctggttagatattaaagcttattttagtgtttagttgttacgcagttcgaaaatgtcgcagatgtgttaattgactggtgcatgtgttaattgtcgctgtccaccgcaaatgcttctgcttgccttttgtttaagttttgatcgttaagttgattgtattcggctgtaattgtcattgatttcctgattaatttgtatctgctgtaattatcggccgattagcaatagcaattgatgaatgcgacatacataatctctcttcaattagatacaagattgagttccgacgctggagacggttgcttgggacgagccttagaaatggatctgaactgggaacgtaaaagcgatatataacgataaataattattacaattctatgtgcaaatgtgcatgtaaatatttatgtgaaccccattaaagaacctattactatttaaaagagattcttagctaaatatatatgcgcatattccgtgtaaacgaaacgaaacaatttcgaatgcaatcattttagctgtaactataaactgtaatcaaaaatgtaagaagaaaaatatataaaaatggcttggctatacatacacacacacacagagaaataattgagttttcatttatgccatatattttttcgtggtattataaatttttaagactatgtgatgatttctgctatactaattgttaactgaactccaccaacacattcgccattttttagatacgaaatggtgaatctgttaagacctttaaagacaatgggtggccaatcttcggtagaaacaacgccgtttttcacaaaatatgtaccctttcgaaaaggacacatttcagcaccggtagtgggtaaattcgattcggtcgattttactaggaaaaaggaaatgtagtagcgattgaaaaattcgcagggtttgctggcggcggcgttcacgattcccttgacccaatatccatttttaaatgcgtgggattcgaaaaggacgtcgaacgtttcgtccaagtcttcta

SEQ ID NO: 28265 - DNA, 1159 bp, DROSOPHILA
aaaattgcaacgctagcaagtggaaattgacgaattattatttaactatgagcttaaactgtgagctgtgaggaattgtgaaaagtgcacgaatcgctgaactatttggtgctatgtaaattttgcctgctactcatcttgctcgagagccaaaatccaagcaattgaaagcgaaacccttgcgagagggtcaaggaaggatacaacagacgaacagacagccaggatggtgctcgtgctgaatggtgtgctgcaggatgactgccccatggacaccaacagcctgttcctgcagcatcccgtctacagagactacgcccagcagctgcactccattcaggccaagtcggtgggtccggtgggtctgctctacgtgggtcagcgggagatggccgcctctgccccgcacgacaagcacgtcaacatcatcggtgccgacgatgccaccacctgtattatcgttgtggtccggcactccggatctggtgctgtggccctggcgcacttcgatggcagcggcgtggacgaggctgtgtgcaccatggtgtcgcgggttcaggagctggccgtcggctatccggagggtcgcatcgagttgcagttgattggtggctatcgcgatgccaagggatacggcgaggacgtattcttcagcattatgcaatcattccacaatcacctacttgaaatcgatctgacgcaggcttgcgtgggcgagctaaataccatgatgcgcggcgagatcaactgccccatcatctatggagtgggcgtgaacatcaagactggtgagatctttccggcctcctttccagaccgaggacccgaccgggagctacgcgatgctcgcatcttcatgggcgcgcagtcggttctggatatatacgactcctcgctgggcatgctacgcattggaccctttaactacgatcctttgcgcggcgctgatctgtggctatcacaaacggatgagtttctgttgcagcacctgtcctccagtccagacgtggagccgcctcactttgcgcctcagacgcgtgccaccattaggtttatacaggagaatcagttccccgccgtcaccgttttcagggacaatcggccgcgctacttccggcgggatgacgccacgggcttctgggtgctggttagatattaa

SEQ ID NO: 28266 - protein, 310 aa, DROSOPHILA; identical to SEQ ID NO: 11475

SEQ ID NO: 28267 - DNA, 4924 bp, DROSOPHILA
agactgtgcacaaaggtcgatgggacaaggtgtacgagatatgcttaaatagcttggcggctctggaagatattgccatgaagcggcgtcgaaatttcatacttgatcaggtaaaccattaacaaatgacctacatacacccgaaacaaaacaccagcccacaaacacacaagattacactatgaacgaacgataaccaaacacaaaacgaaacaagcgagaattatacgttgatgatgactttggcgcccacccaacacactggggctctgatcccctcgggattgaggggttccaccagcggggcacagcaatgttgcgctatatattttttaattgtacatttgagtatgcattttttttttgctcatcgctctaacttaatagagtgcccaagtgcccctagaaggggcaccaacgtgcaggtatgtcctaattgtaagtcgatccgataattagagtgcttaagtttgaggcagtaagtatctgtggacttcccattagcttaagttttacgtgcaggcgcaacagttgacggggcagttaagagggaattgtaagaaaagtggggatggaagtggatatggatatggaaatggcattggagaaagatgagtgagtgtaatggaatggagtgaagtaaagtatggaagaaggaggaggaggaggagcgagcggcatggatgccactgtaagtagacaaacacaaatccgatcgacgagtcgttcgcctacaatctaatcacatatacgtattagtacctactatctctactctatctctctctctaaatgccaactattctcatatatatgtatgtgtatctacagaaagctatgcgatgcttcatcctacagccagcagcacagccaaccgcgactacttttcccccatagtacattctgttatccttatgcaaagtattaagtcaactgttgttagatgtggccgggttaacattaacccgtcgccgccccctaggtattatgttggtgtgcgcgcaccgcttccgtaaggccccgctcccttgccggcggagtgtgggcgggaagtgggtgtcccgccgtgcaacaggtatgtgttagattataagcgctgaaagcaagcgagctcaatgcgagttgggttcgatcccggtagaccgaggtctccaaccgagccgtatcatcaacgtgtttctcaagttcgacgactgtcccaacaacaaccaaaccaaatccaaccaaacaacaactggcagacaaaatctgaacccaattcaaccaaacaacaccaaccaaccaaccgatcaaccaactgtattcttgtagaccaatgtgtatgcctcggcccagcgacgtaaaatgaagggttttaacgacttcaagcgaattgcggtcgtttgcatacccagcgaagatgaattgaaacgtcgcatcgccgaaaaagaggaaaagggaaatgcttttacagttaaagaatcaacaattaataatttacgaggtaaatattatccaccacaccaaagcaacgaattgaaaaaaaaaatccagaataatgtacgatcgtataacttattattctacctatctaaataaggaggcattcttgttaaaatgaaaaacattataaaaacttatgtaacgtatttagtttgtaagcagctgcactttatgtatctatacgtaattgtaactgtaagcccttcaaaatatctcataatttgattattattattaccattattcattaacatttattctataacaacccccacttggcaactggaacgtataaaggatggactttattcacaactggatttcttgaaaatcgaaatttttgcgcccttttacgttcggttgccaaagttgatcccttctttccctctatactccatctacaataattcctaatctgtaatgataatgagcgattttagcaattgtgcagccttattgatgatgtacacgcaatctttttccagccaacttcacacttccctcgctggagtttggctggttcgatgatataaactacacggagctgactggtgacgaggccaagagcgaggtcaagaagtacaacgagaagggcaaaaaggccattgacgcggagaggtcgcgtgacaagagatcccgaggaagtcgcgacaactatcgtcgtgatgaccggaaccggaatcgatacaatgatgaccgacgtcgtgattatggcggccagcggcacgaaagtcgttggagcgactcccgcaggggaggcggcggtggcggttactccagcaatagtggtggaggcggcagtcgtggctacgacaatcgccgcaactacaacagcggtagcggtggccagcaaaattgggtgcagaacagccgcagaagcgggtacgatgatcgcggctatggtggcggtggaagcggcagtcgtggatacgacaatcgcaaccgtggatacgcaggcggcagcggtggtggtggcggcggcggcggtggtggtggtggtggtggtggtcagcaaaactggatgcagaacaaccgcagaagtgggtatgacgaccgcggctacggcagctcgcgggactatcgcgatcgagaccgtggcaacgaccgcagtcgaatgggcagtaacgaccggaaccggggcagcagccagagtagctatcgctcgggaggtggtactcatcaacaacgggattttcggcctggccaccgcgacaccaaagaagatagtcgcggtggctatgagcggtcagctggtcaatcgctacccaagtatggcaataacaccgctgtaggcggtggctacgatcagtacaagcaacaaggtggagcacctggcggaggcaaggtaagtgtgcgaccaaatcctcgacgcatgacagctggctaagatctcgatcgttcctgtaggcctcccttagcggcaagtggagtacgtacagtcaacaccatcagcaacagcaggcgccgcagcatcaacaaacgggcatctggcagactcagcagcagtcacaacaataccaacaacctcagcaagcagcggcgggccagcaacaatactgggcctataaccaaatgcagagtaagtgacgcagtgttcgactgcttaagggcgaagactatacgagttatgttgattctcccagcaggttatggcaaccaacaggcctggcagagtgccgatccgcagcagcaacaacagtggatgtcctggtggcaggtaagcaggaggagtcttatgaaagtcattggaagcgagaatactaaagatattgtttctttaacagcagcagcagcagggctctggcggagcagcggctgggaatgccagtggcggatcaggcgtaaatgtcggcggcggcgctggcaataatgatggcggtgccgccaatcattactggtctcaatattcgtactccacgcagtccaatgcgggtgccgacaagaagtagaatgcagcaacactatgcagccgtgttccaccaggcccagacccctctgcgttgtcccgaaaggagttaaccacaaatctgaactaaactttatataatagttttaaacgattaacgaacagtaaaacaaaattaatttagtttagccagtttgggctagtcgaaaccaaacaattgcgagggctaaccaaaccctaagtcaaaattcttaccttaccttcggatggattgtacaaaactaagactacatatatcatttgaaattgaacgtgaatgtttcgcttttcattttccacaacgcattttctatatgacagtgacgaagcaattgaatgaaacgcggtctttactctggcactacgtatctaggcagtacaacttgttttaacgtttattacgattattgttttattttttacaatcaacgcaaacaattgaaatgaacgcattagagaagaaacattaacgaataaatctatacattgaaaaaatctatttaaacgatcttattactgggaaagggtgtgtaatgcgctcgcattttaaaggacaaatcgttaaaacacgataaacagctaattttaaaatttacattaggccgaatgcaatttaagaaatattggagtctgcaagtatgtattttctaatttagtgtttaaaacagttttattaaactaaaaactaacgtttgcttttttttttaaatgtatatttttatttccaaaaaaaaattagtaagtttgccttagatttcaaacttaagttgtgctatgagtaactgaaattcaaaaaaataaagcaaaggatatttgtagctaataaatattttctaaagataagctgtttaaataataaactaatgtgataaaatttttacttgagtcactaccagtgcggcttagcggaattttcggcaaacgggcacactgcaacttggtcacactggctagctggcagaagtccgtaaaattatttttcgtttcccagtaactttcttgtcgcattttgcttttgaaatcaaattaaatcattttttttttaccaaaatccgatatcacaatcagatactgctgtaagttgagattaggtgtgccgttctgaaaccagcaaactcgaccaaccctcccactttgcctttgccctttgttccgagttccactgatttacatactttcgcctcgccaagcataggtaattatggatacggagaagtctagcagcagctccttcgaggacctgaccaacgccgaggacaccaaagacattcgcaaggtggcagcggaggaggcagcctccggagatggcgcacccccggcatccgtttctggagacggacagaaggcggaggaggaggatgcagaggaggaatgtgatatactgggtaacaagcagctgattaagcgcaccatcaaaaaggcaccgcaagactcgtttaggcgtccgattcgcggcgaattggtcaccgtgaacttcactggaaaactggacaacgg

SEQ ID NO: 28268 - DNA, 2244 bp, DROSOPHILA
cgcaccgcttccgtaaggccccgctcccttgccggcggagtgtgggcgggaagtgggtgtcccgccgtgcaacaggtatgtgttagattataagcgctgaaagcaagcgagctcaatgcgagttgggttcgatcccggtagaccgaggtctccaaccgagccgtatcatcaacgtgtttctcaagttcgacgactgtcccaacaacaaccaaaccaaatccaaccaaacaacaactggcagacaaaatctgaacccaattcaaccaaacaacaccaaccaaccaaccgatcaaccaactgtattcttgtagaccaatgtgtatgcctcggcccagcgacgtaaaatgaagggttttaacgacttcaagcgaattgcggtcgtttgcatacccagcgaagatgaattgaaacgtcgcatcgccgaaaaagaggaaaagggaaatgcttttacagttaaagaatcaacaattaataatttacgagccaacttcacacttccctcgctggagtttggctggttcgatgatataaactacacggagctgactggtgacgaggccaagagcgaggtcaagaagtacaacgagaagggcaaaaaggccattgacgcggagaggtcgcgtgacaagagatcccgaggaagtcgcgacaactatcgtcgtgatgaccggaaccggaatcgatacaatgatgaccgacgtcgtgattatggcggccagcggcacgaaagtcgttggagcgactcccgcaggggaggcggcggtggcggttactccagcaatagtggtggaggcggcagtcgtggctacgacaatcgccgcaactacaacagcggtagcggtggccagcaaaattgggtgcagaacagccgcagaagcgggtacgatgatcgcggctatggtggcggtggaagcggcagtcgtggatacgacaatcgcaaccgtggatacgcaggcggcagcggtggtggtggcggcggcggcggtggtggtggtggtggtggtggtcagcaaaactggatgcagaacaaccgcagaagtgggtatgacgaccgcggctacggcagctcgcgggactatcgcgatcgagaccgtggcaacgaccgcagtcgaatgggcagtaacgaccggaaccggggcagcagccagagtagctatcgctcgggaggtggtactcatcaacaacgggattttcggcctggccaccgcgacaccaaagaagatagtcgcggtggctatgagcggtcagctggtcaatcgctacccaagtatggcaataacaccgctgtaggcggtggctacgatcagtacaagcaacaaggtggagcacctggcggaggcaaggcctcccttagcggcaagtggagtacgtacagtcaacaccatcagcaacagcaggcgccgcagcatcaacaaacgggcatctggcagactcagcagcagtcacaacaataccaacaacctcagcaagcagcggcgggccagcaacaatactgggcctataaccaaatgcagagttatggcaaccaacaggcctggcagagtgccgatccgcagcagcaacaacagtggatgtcctggtggcagcagcagcagcagggctctggcggagcagcggctgggaatgccagtggcggatcaggcgtaaatgtcggcggcggcgctggcaataatgatggcggtgccgccaatcattactggtctcaatattcgtactccacgcagtccaatgcgggtgccgacaagaagtagaatgcagcaacactatgcagccgtgttccaccaggcccagacccctctgcgttgtcccgaaaggagttaaccacaaatctgaactaaactttatataatagttttaaacgattaacgaacagtaaaacaaaattaatttagtttagccagtttgggctagtcgaaaccaaacaattgcgagggctaaccaaaccctaagtcaaaattcttaccttaccttcggatggattgtacaaaactaagactacatatatcatttgaaattgaacgtgaatgtttcgcttttcattttccacaacgcattttctatatgacagtgacgaagcaattgaatgaaacgcggtctttactctggcactacgtatctaggcagtacaacttgttttaacgtttattacgattattgttttattttttacaatcaacgcaaacaattgaaatgaacgcattagagaagaaacattaacgaataaatctatacattgaaaaaatc

SEQ ID NO: 28269 - protein, 468 aa, DROSOPHILA
MKGFNDFKRIAVVCIPSEDELKRRIAEKEEKGNAFTVKESTINNLRANFTLPSLEFGWFDDINYTELTGDEAKSEVKKYNEKGKKAIDAERSRDKRSRGSRDNYRRDDRNRNRYNDDRRRDYGGQRHESRWSDSRRGGGGGGYSSNSGGGGSRGYDNRRNYNSGSGGQQNWVQNSRRSGYDDRGYGGGGSGSRGYDNRNRGYAGGSGGGGGGGGGGGGGGGQQNWMQNNRRSGYDDRGYGSSRDYRDRDRGNDRSRMGSNDRNRGSSQSSYRSGGGTHQQRDFRPGHRDTKEDSRGGYERSAGQSLPKYGNNTAVGGGYDQYKQQGGAPGGGKASLSGKWSTYSQHHQQQQAPQHQQTGIWQTQQQSQQYQQPQQAAAGQQQYWAYNQMQSYGNQQAWQSADPQQQQQWMSWWQQQQQGSGGAAAGNASGGSGVNVGGGAGNNDGGAANHYWSQYSYSTQSNAGADKK

SEQ ID NO: 28270 - DNA, 6283 bp, DROSOPHILA; identical to SEQ ID NO: 11521

SEQ ID NO: 28271 - DNA, 1577 bp, DROSOPHILA
tttgcagccaaacgtttgaacgtaaacaacgccctaagcaaaacatgagcacggaaaaagagataattttgcaatttgctccgtgggaatcttttgtgtcgcccactttctggcacaagctagcggagcttaagctcgaccacgatcgcctgtccgactcgaaacgctccattactggacactacacaaatcgtaatgcaagtggatgccttttggaagtagactacacggcctacaacagtccctcttttgttggaaaaccattgaagtttcttggcctgcgacacaatcaacaaatgaacatcgatgacagccttgtatggaaggtgattcagactgaagcttgcgatcttagccaaagcgaaaatataaagttcgtgggctgggagctaaataaaaatggcaaaatggggccaagaatggtgtgcatgagggacagcatggatccagccaaactcgctgagaactctgtaaacctgaacctgaaactaatgaagtggcgccttgttcccgatctcaatctcgaaatcatctcccaaacaaaatgcctgctctttggagctggtactttaggatgcgctgtagctagaaatctgctgtcctggggatttaagcacataacccttttggacagcggcaaggttgggttctctaatccagtgcgtcagaatctctacacgcatgcagatgctgtggcaggcaatcggatgaaggcgactacagctgctcagagattgaaagagatcaatccgtctgcggaaacggcgggttatgtgctggagattcccatgcctgggcatactattggagaatcgcttctagcccagacgaaggagcatttgaaggttatcgaaaagcttgtgcaggaccatgatgtcatctttctgctcacagattcgcgcgaaagccgctggctgcccaccctgcttggagcggcaaaggaaaaaattgtcatcaacgcagctttaggctttgacagttatctggtaatgcgacatggcactacgcgtaaggaagcaggcgacgatggccaagaaatcgaaggacttaagtgcattaatggcgatcaattaggttgctacttttgtaacgatgttacggcccctggaaattcgctcaaagaccgaactttggatcaacagtgcacagtgacacgacccggagtatccaacattgcggccagctatgcggtggaattgttggtggctttgctgcagcatcctcgtaaggagctggcacccgcctactatgcacagagtgggcgtggcaggtcggaggagacggaagaaaaggtgccggagggtctgctaggaattttgcctcactccatccgtggaatgctgtgcaactacgagaatattctgcccgccactcaaaagtttgctcagtgcatagcctgttcagcggccgtcctaaatgaatataaaaaagagggtcatgctttcctgtttaaaacttttgaaacagccaagtttctggaggatttgacgggaatctccgaattcaagcggttaaacagcgagattatcgattttgatgatgaagaatttgacatgtccgatagcgacgaggattag

SEQ ID NO: 28272 - protein, 510 aa, DROSOPHILA
MSTEKEIILQFAPWESFVSPTFWHKLAELKLDHDRLSDSKRSITGHYTNRNASGCLLEVDYTAYNSPSFVGKPLKFLGLRHNQQMNIDDSLVWKVIQTEACDLSQSENIKFVGWELNKNGKMGPRMVCMRDSMDPAKLAENSVNLNLKLMKWRLVPDLNLEIISQTKCLLFGAGTLGCAVARNLLSWGFKHITLLDSGKVGFSNPVRQNLYTHADAVAGNRMKATTAAQRLKEINPSAETAGYVLEIPMPGHTIGESLLAQTKEHLKVIEKLVQDHDVIFLLTDSRESRWLPTLLGAAKEKIVINAALGFDSYLVMRHGTTRKEAGDDGQEIEGLKCINGDQLGCYFCNDVTAPGNSLKDRTLDQQCTVTRPGVSNIAASYAVELLVALLQHPRKELAPAYYAQSGRGRSEETEEKVPEGLLGILPHSIRGMLCNYENILPATQKFAQCIACSAAVLNEYKKEGHAFLFKTFETAKFLEDLTGISEFKRLNSEIIDFDDEEFDMSDSDED

SEQ ID NO: 28273 - DNA, 63284 bp, DROSOPHILA
aagaatagctaacgctctgaccaaatatgaggaatttcttttcatttcgcaagcactgcacgaaaaaatagtataaaagaatgaacaataaatgtggaggagtgattttgagtaatttgagtcctaaagtatatttgaataactcaaatatttccgaatgcattaagagatgtaaattgagatcaaggccttaagctgcaaagttatgttactaaatcatcatacatttttttcagtgcgctttatatcgctcgtattagaggcacaattttggtcattcttgttgcgacttaagcttcgaagtatgttggaacgctcaaagagcgttgacttgccgctcttacgctcttatcttcccacataaaaccggccacgcagtgggttttgagctgcttttgagtgaatccagataaaaagagttattcaaatgagtaaattgaacatgccgacaatgcattaatacatttgatccgcaattgatatattaattaattaatattaattaattaattaattaattaattaattaattaattaattattaatattaattaattaattaattaattaataattaatatattaattatacatattaatcccgaaattctgttttaatattacaccgcaatgcaaattaaattcatcccttttcgaacaatgatcatttgatcagtttgatcgaaatgaacttctaacgaccagcgagtgaataactgaagaaatgaacacgttagtgaacggagtatgtgcgtttattcactcgcagcaaattggacaagtgatcttgctcactgagagcactgttagcaacaacactatcacgcagtacacctgcttcgctcactcacactcacctgaaatcgctcgcccccgctccgctcccgctatttctctctctctcgctctgtatgctctctgcgctcttgtatctctgtggctcttgcagttgtatcggtatctcagcacccaagtgaattcgcttaacacagcggcgctcagtcaaatttgaaccgcgataccgagcggttgggcgtttatctgctagaacttcgttcccttaccagtgactgtgtgtgtgcgtgcgttgcgtccgtatatgaatgcatatatgtgtgtgtatagtgtggcaacaacaatttgttaacgcacacacttacgcgcagttaacgaacgcaacttggccctttaaaagtgagaagaaacctcaagcaaagtgcaaaattataatcaaattgccatcaaaatcaacactcaaaacttatataaaacaaaccgcgtttatctttagtgcaaaaattgtgttgaagcagcagtaaagacgtcaaaacactataaaaataaataaatgactaaatcgagtggactgtgatgtccatcgttgcgttatcgtcctaaataaacttaaccgataaaggaaatcataaatggaaaccatgaactcagaactacagagttctcaaaagcaaaaaaagaatccaagcagctgtgttgcatttctaagatatttgcttgtcgcaaacgagaaattttcaacttctcccaacttctttttagttgtgcgttgttgtttttgccatttttttgtggttcttgttattgttgttgttcttgttgttgttgtctgtcgtcggctggcttttcattcaataaccagtttttgtcagattttttttcctttagattttggtgagcttgaattgctctttaggggcgatctggtctcggatttttgatcgctgcacacgcactaaaatccacaaagtcgcaatgtagtgtgtatttcatttcatttaggtttttcctttataaagacaatttagtcatgccaaacgcatgcaccgctctatacacctaaagaaaatatatataaaaaatgtgtttcaaacacaaatatattgtatcgtaactgtttcgaataactgtaaaagtaaaagagtaaaagaaaaaaagagtaaaaagtaaaactgtaaaagtaaaaagagtaactgtaaaagaatatagaaaatataagtatttcatttttttaaagctaaaatcaaaaattctacatatagaatagaatactataggatttatctaaagaaaaggagttaagtaaattagatagctggattaaaaaccatttaaattttcctccaattcaataagatttttctcagtgcaccctcttttccgcccctatctcttcaccgcgttctctctttctttttacctgttagttctgaacacacggctttcttgacatgccaggcatacttaattccggctctcccgtttaaacctggcttagaaaatgagagaaaatgcacaactgccataactgtgccacaaagtgggggaggaagaggcggtggtgaaggtggaggaagaggtgtgggaggagaagtggaaggagggagaaagagagaggcgaaaagccaagttcagacagtggcagtggggaaatattttccgtgaatttattgtgtgaaattttgcatgtgaatggaaaatgcacacggaacaagcagccagcaaataacaataacaaaaaacccataataataacaagcaacaaaaaatatgagtgaaaattattgaaagccacttgcagcaaagtgaaagatgcaaaaaagacacaaaaaactgttgacgatggaaaatataaacaaaaaccgtgaaaaaaaaaccaaaaaatctttaaaaaaaatgagccaaaactaaaaactaaaccaaaattcaagtaaaagttcacagaaacggccaagaaaaattgtttgtttgtcatttagctacgttacgcccagcgtttgcataaataaattaaaaatttaaagcagacaatgcaaacaaattgacaaaagtgcagaaggcatgccgaagtttatacaccctttcaattaaagtagtattttaacaactgaacaataaaatttagttaattcaagttactttctgtaggaatattaatttgttaataggtacctatagctatgaattgattaacaataaacaattcgattttgtactacaaacttcagattagaatccatgtacctcattggaaaagtaaataaactacacaaactttgaatgaaaaatgagttgagagagcgaaagaaatttcgtacatatctacatacgacttttgggtatatataaatgtattcgtatctaatcagagcgacaacccgtctcctgggcccgcagctgtttgcgtgtctaggcatttatttatttatacttattgtgtgcttacgggtccgagccagaaatacagctccaagctgacctcatgaattgaatggaatcacccgccaaaaaacaaagcaccgaaagtaactttaaaatcggggcaaaagtggagattttgcaaatgaaagtacacgaataaaattggatcgcagttttgtcattgtgaagattgcaaaaatggaagaagaaatgaaatacaacatgagaaaaaaaaaagtggacacggaatgaaatgaattaagtgctcgcttttacttgagctttgtgtggtgcagctgcgtctgatttcagtttcaatttatctctataagtttcaatttggctgtcgggtaaaagtgaagcgatctcgatcgcgcccttctcccattgtgttccactatctcggtatcccatatctctggctgtatctgatggatacatggcgtcgccagttcgttcgcccctggcgacaaatgcaccatgtacaccagtgtatctgctagatacatttcgcccagcacgttttcttttggccaacggccaattggaacaaaatgccggcaacgcacaaaaacataaagtcaactacaccagctatatacaaaacgcttctgagatacacagtaaaaatgatggaataatatttatttaaaatattaaacttgatcttggggttagcaatggatattgaggagtaaagtttaaagggacctttaacacaagtaacaagtcttaacataacaaagaattaatacttggtatgaggaacatcttgtacaaaaagaaaaacttctacagattgttaaatgtttcagaatggaattgctttaaaaatagacaacatttatatttttgcaagttttcatagatcttttttttttgcgtgtgcaaatagtcgacttcctgaacgagaacttttacttaaatttagtttagtgcttagtacactcgaatttggtatctcgctaattgcaactcatttgcaattgctgttttctgatgatttcacgttcaagtacgcggatcgctgcgtctgcagctgaatcatctcagctaatttaggcgtacaaaattcacaatcatttgtatttaaattcgacaactccaacttcaggtccatccaaccgagagcaataaaaataaaaatcacaaagtgccatcgcaaaacaaacataaactccaaaacgtgctaaaaatcgtaaaaaaaagatcgacagcgaaaaagaatttgcggcgaaagttgaggagtgtgttgttcatcacccaaagtgtttcgagtgtatccgagtcttttaatgtgccacccgcaagatgacatcgcattcctactataaagaccgcctgggcttcgatcccaatgagcagcagccgggcagcaacaactccatgaaacgaagcagctcccgccagacgacgcaccatcatcagagctaccatcatgccaccaccagtagcagtcagtcaccggcaagaatttccgtttcgccgggtggcaacaatggaacgctggagtaccagcaggtccagcgggagcagcgggatcgggagctgtacagcaacaacggcagtcttcaccaccaccaacatcatcatcatcatcatcgccactcgacgacgggcagtgcatcatcgccgctgtacgagaacagcagcagtccggctgctcccaaaaaggccaagcactcgtccacccaggcgcagccgcagggtggctacgaggatgcactcactcagtttaaaggtagcatgtccatttgggatcattttatagaagattgggacataatgcgtaagtgggaaataggatttttgcgattcttttggcatgtgttgtgttccagttctttgatgttgcctccgtttttatttttattttttggaaatcaaagaaaaagatttattaattgccgcagcggaaatcatttgcatttcaagttcgcttcgtttgtatctcgtttgtatgaatttcaattatgaatccgtcgcggtttcatatatatttctaagcttaactaaccccaaacatgttttccaacgactgactacaactgacggaagccaagcttgggagcaaattataaagggtcaaggtcaagaccctctttaaatgctagcttagactccatagaagtttttaagtaaatatttaagcttagtcttcccaactggtttaaagatttggagttgaaatatatgcaaaatccgtaggaatgtgaaacagatacgaagaacaaacaattctaagctatgacaaataattatctcactttttagcaatgcatttcgtatcttttggcggacttttcaaggccttatcgagtgttataaatacatattacaaatccgacaatcaccaaattagaaggtgtgttgacacttcttggtgggcaaatacaaacacattcgcagaccattggtcgcacctttcttggcacatcaaatgctgatcaaatagaagggtgctgccatctcgaccttgaatttaataacagccaaataactgttcattacagttcattgggggtgaattgaatttagggtatgatctaccgtctaatcatccctgttctcttgggaacttgatatttccatcgttcggacgccacgaatactgtgttgtcaaattaacaaaatttcggttggcattagaattccacgaatttcgaaatgaactcatttgtccagtcgaaaaagaacgggtttatgcttattgacttttgtaagcatttatatgggcgttttatgcttatggttatacgttttcgattgcctggcactaatttgctggcgccattagttgggaattttgttttttgttttttttttgttgacttgcagataaaagcgggaagtactttgaattcaatttgaagtgcattttcctatgctaatagtaaagtgtgagttcattatttatatctggcaagtgagtgaattttcttatcactgattgcaaacgttcaaaacacgatcaagcaaccgtcgccctccataaaagtgaacaataaaaatgttcaactggtaaagccttaagccttaagccttgttgctaatttcctaatttagatatgcaaaaatatatctaacataatatatcttgtaaaatttgaaaatttgaaaattcgaattggattcctctccagtaagcgtttaaatgttttctttaatcagacttgtatgatcaaacgtccttctaaggttaagtgtgctaatcaatgagaatgactaaatgcaaaaataaacattaacaaatatcaaataagcggctccgaactcttctacaacaacttaacgaacgtttaatcgtcaaaaacaaattcaacttagaacgtgacatcatcacgcgctcttcaaaaagccgcatacagacacatatccagatagtgtgagctaccctgttatggtatttgtgccgtcggagtcgtacacctttgcacaatcattatttgtgtgaatatttatgaactctttgtgtgttgttcttggcctagaggatgataaaaataagctcgattacgaatcggcttggtgttgcatgcaatcgtgcagaaagatttctgcggaaagatcggatcacctcaatgaatggggcgagtttttgagagttcgaatctccgcttgaatggaaaattgcaaaccgatgagtcatcggattggaacaagttcaagatcttttcgcttctccatttctcacactctctctatctctttctgtcactctcttcgacttgacttagctgtaagtgaagagctggaaaattattgatagggtattaacggttttgggttttgtgttatattacaagcaaatatttatttggtcatgcaattccgaaaattgtattcgcctggaattcgatgaatcactgtaatgacatatgttctttttgaaatttttaacgaaggactttgtccgtttaagggagatatcttctgatattatgtgctccaaactttagttccttaaccacaacaaaagctataagtagcaacaaaatatttatagttatatatgtaacacctgctttacattgtatgtttacaacgaaggaccttgttcgcttaagagagttgtccgctctaggaagattttaccgtacttggatttggaccgtccattttccacaacgatccattacgtatttgccaattagtttgtgtacgactcttttacaaattgtttatcaataaacacgcttcttttgttgaccacacgactaagttaatttttggctcgttagactttttgtcgccttaagtgattaagcatgaacataaattggagtattggtaatccatttgcaagggcatttaagcttcgttcttaccatttaaaaaaggcgtagagagtgggtaatgtagagagaagagagttaaactggttgggatcgttcaactatagtcacttgttctctctggcacttattttccttatcttttagcgcttttgttttgcttttgagcttctgctttgagttgctcgttgttttcagatctactacgtttatggctttatgtgtttggcacttgaatttatcgggtttatcagccgaattaatacttttacaattggctcgacacttggaggagccttctcgttgacgttctaaattttctgtagggtttgcttttttttatggatctgcagaacatttcttttgttcctcgttgattagattgtgttgaaaaagggtggttaacttaaattattgctcagctctgcccctgcatggagttatcagtccacaaaaaagtttactaattacctcgaaatgtttaacaacttggaaatgcttgatttttgtgccgagagttgtggcaacatgaccattaggttatctgtagatgggctattcccacaaactaacacacgcacacaacactcacgccatgtgtcagccaacaaatcaaagccaaaagctaccttaactcctgcccgcccacttcttatcgattttcgaaaaacattgaccaaagttttccgagaccctgaacggaaataaagataggaaaagcgcaaatagggaaatcgcacattaattgccggcagttgaaacatttgttcaaacaagttaattaaggccctatgaagattgttcaacgcccgcacttgagttgctaaaattggttgaaaaagaaatctagaaataatcttttgccgataattaataactttgattgtgggcggttgaattttgagtgttttacataaacaattcacttctcaatcaacgatgacgccatacgaaatgtttcttctttcggcataaacttctcaatcattgcatggaattttgactactaacctacgaaatcaagtttatcgagaaattctaatatgcgctcttttttttttttaaataatttcccgttttagacgaacgcgatgccattcagaagaagactttcacaaaatgggttaacaaacatctgaaaaaggtgagttaatgatcgagctttaaatggtgaccaccacaaaagcataaaacttaactgaaatttgtgaaacctactgattttttttttttgaaatttccatttaacacctttcccacaagcagcattggaagtatgctaaggtactagccaataatcataaaatacaatttatagttcttattttttttaacatacgataaaatgaatttcctgcgattttcagacctatactatgctacatgtttgtgtaaccacaaatggcataccctgttgttctcagtctgtaagtcgagctaaaaaggattaccttcaactaaatatttcttgatgttgtttcataaagtttttattattttttttccaattgttaattttgttgagcaagattaaaattttctttttaactgcaagggttaatacaccacttttcattgatgttgttttcttgagtttttactagccgcttattcaaaatgtttaattttaccttgcggcttgtttcttttgctgttcagtgccagcagttttttgagttgttttacctgcatgtctgtttttttgtttttttgtttgggttactctctaatttatttgaatggacttttactggtattccactataacgcctcccccatctgcaggccaatcgtcgtgtggtggacttgttcgaagatctgcgcgatggtcacaatttactttcactcctggaggtgctatctggcgaacacctggtaagtgttattcaattgatttcttagcagttttgtcacgctctcgccaatgtcttttattcacttcggatttttatattttattttttatagccacgcgagaagggtaaaatgcgtttccatatgctgcagaatgcacaaatggctctggactttttgcgctacaagaagatcaaactggtcaacatacgcgccgaggatattgtggatggcaatccaaagttaaccctgggcctgatctggaccatcatattgcacttccaggtgagttgttgagcaaatactacaggtataccatatatatacctgtattgtacataactatatattttcattgattgagcaattggagcaaaactgtgggcgctgatttttggtgggcagctattcaaagtcagcgagtcagcaaaagcaaacgcccacgagccgctctttgcgactcaatgactggctgaatgactggctgactgactgactgactgactgaaggtgaccccccggtctagagtttgttttcatttgggcgtttggatcgattcattgagccgacttggcagcagcggcagcctacacagcaaccagatagctacagtcttgacacgctacgacaaactacgctcgatctttattttttatttttttttggcaaacacggcccagccttttaaggcaacccgattgccttctctttgccgccgccgatgactgacacacataacgatgctgctgctgctacagttcgtcggcagcaaggccgcgagttggctttaaaggcgtcgtggggggcggggggagtggttttggccacctacacaacaactggcagcaaggcaaggcaaagccggcccaataaaatgctgcgttgggatgcagtcttaaacaaaacaacaatccctgtgggatatcttttacaaaaatatgtcaaacgagatatttatgaagaaatttaaaagtaaacacacttgacaaataagcatgatatcaaaaatattctatgagtataaaaacaacatttagcttgatatatagcttaaatgttgaatttaaaatgacggatactgtgattaaagaacttcaattatattgtttttggcactgactgactcatcgatgagatacatttccgcagtatgtgtgtcaatacgaaactgggatatttcgcaatctgcgacgaacgcagatgcatttttcaagtcgtcgttgttggctgtcgatgtggctgcggcttttcttgactccaacttgatcgatggggcgcataaatgctcaatgatgctgccagttcaccgaccatgaggcaacagccgcagcaacagtcgcaacagcaacacgcaactgtggctgccaaatggcgttcattcaattgaggcgaacgaattgtaaatcacttgacaatgtgaaactcaatcgcgcgtcacttactgtttactgtttactgttttctggcttattcattatttcttgtctgcctgccgccaaggatttatgtatattgtcgctggctgttgcgggtgtctgatgtcatccgaatgtggctcagagaaaaaaaaaatatgcaaattaactgcgatcgacataaaaggatatttcttgttttgcataccaaatgatttgacttacagcattctcagtctcatttaattttttgttatccaaatctaaatccaaatcgcaatcgacatcttgcaattatgacataattcctatttccattcgtgtgcaaagctgttttgtatattcaattaatgatcggtgttttgtgggtcagcgcgttgggaaaatgaaaatatattgttaaaggcgaacaaaatataataataataagtgctggagcaattttctaaacagcagccgctggcagtttgtaacgctgcttagcttgtaattaagttataaactatgaaccacccacaacaacagtaaaaacaatacaatcaatcagagactttacctttacttgagaacataaaacctgttgagctgcattgtaatttctagtgcttaacacgtggtctcaatgattccgcaacaaattagtgcatatttatggcagcttttagcttaattattacaggttctagcgcgctctagttagttgcgagtacaactgatgataaattaaatataacaacttcattcaattggtttgagatacttttacctagatggatcatcaaactacaaaaatctttgtggcccaatttttttttggctttacacgaaactttaccaaaaagctgtacgattaaatagcaaaacatagtactctttttaatatacccaccaataactcaatttatgcagccaacgtattacgcgatttactgctttatttagtacacccaaagcgccatatcgagagctacaaatcttagagtaaccttgcggctgccacgtaaacttcctaagccgctcaattgctaaatttaaataataaattgccgcaatccccaaggcgacggtgtgtgccaaatcgttgagatctgtgtcgaattgttctgacaaacgttttcattatgagcatcagataatttccccagcaatttgccatttttcattgctcgttagttgttgggagtagtggtgcgggcatgtatgtatgccaatcatttatatttggccaaaatgccatgaccgatgtttagtcaggtcgcccaggcatgaaaactaacgccttgaaagaaagccaaaatacaatgaccaaagagccaccgaaaagccagacattctcacgtcatcgttcgaatttgaaaagattattatttgatattttttttttattttttgggactgctgtttgtggcgtttgatttattataatacgccaaggtatgtgttacaataaagtcaatgccagttgagaaacgccaacggacaataacgagaattacttgaaaaaaaaatcaggtggaataaaagtgttttttgtttagtgccctgcccatgacatcagcaatcctcggttcttgccaaacgaaagacttcaacgcaagcagcgaactcgaactctcgaccagctggctgtggagcatatcaaatggccaaaacggattgctaacagaaacaaaaacaacagatgcacttatttgtcttaatttatgacattgatgactgaatttttgaatagcttgtgttgtgtgtgggttcaatctcgatctcgaaatctatctatagccatcgcagataaaaacaaacagattttcattaataaatcgatagcttggcttttgaccaaataaggaaacaagctgcccgtgtccacctctctcactctctctctttctaattatgattcgccatccttttctgtttggtatgcaaatgtcatgagctgtctggaatagttatttgcactcgtgaagcgtttagccaatgtatgtaagtgtgtttctaatgacttgtaattaatatgaaaactcaacgctgtataaatttcaagtgtgtagatgaaattataggcgacgaggtaaacgattcgatctagctgccaatggtgatgatgatgagcccacacggtgatatccctaggaatgtcatacgtatttggtgcggtgcgagatgcgacacctacacctcactagtcactagacacccccacaagttccgttcgaggttcgggcgactaactagaacagcgagttgtacagagaacaaaaagataagatatttctatataattaattaaatgtcgattatatctgggcacttaattgagttttatagatgtagtattgttatatcgatcaatatgattatgattatgattatggcatatgacaaaattgcatatactacatatttttttctgcgtgtggagattcccgttgggttgtaagactatgagaggttaatatggatattagtagctactgattccgctttgttttcccaccacaaacaacacatttcaagtgcaaaacagttctcaaattacgaatagtggcaaacataatgcagcatttgtttactgggttgcatcatatcggtattaataagcatatgcccaatatgagtacttagccgtaatacctacaccccacaccccacaccccctccccgtcacaccccgcaccgcattccttgcagcggctaattagatttgcaattcagttgcacagtttctctgagccatgggaaactcaaggtgtggggtctactcgtacgtctgcctgtattgaccatattgactatagcgtttcgagagtgtgtgtgaatcgaaaaacaactgacagcagttaagcgtatttattacccatacataaatatggccagcaaatatgccgggccaacaacaacagatgtagttgtcgacgcagtcagtgccttttactccatatagggcaacgccatcgggggtttaagccatgtaacatgctaattaacccatgttggcagtacgcgagcgagtgtttcgaatgtttatttgtatcttaagcacacgcgaatcaaaggcacttccgtctggtttggcccagcctcgcatatagatttcgacacccacttgaatcgaaatcgttggactttctaagtgcaagattattgcaatagttctgacttgccagccttatttggccggagattgatgggggaaatgcatgccatgtgtcggtgattgttgctaatttgcattaattattgatgtagtgcttcccttacagtctttatataaatgcgaaattttcttcgggcactaaattaatttaactttgaaaattgtataatgcacacaaaatgttttaatttgcttcaagtaattttcagttttttcccattttctttgccattttccaacgcttttcgcggctgccctttatcatttcatttgctgtgagtgaaacctgttaacataagtggtcatttcgtctttttgccgtctttttgggtcactatgcgatgtaatgagttggtcgtgatgtgttatgagattgaaattcaaacctgcgaaatcccaaaaataccatggggtcatagcgaatcgctgttttctacgtttcttttgttttttttactacccaacagggtttttaatcaaaactcgttgttcataatctatgtactaccattttgactacttcttcatttatatttttttgcctctgtcttgttcttttccatcatcaagttcttcgtcttgtttccattattatcattcttcttcttctttggtcgggtgttcttgtactgctgaggatgacgtactaccgacgactttggttggaagcactgtgtgagttggggctaccacaacaaaatttcaaatgagagagggaaaactgaagccggtattgtataatataccatctctttttgggcttagctttatatgttttgtaagccttggagtaagagatcacaattcgagcggaagtattcaattagcttattaaagcatttaaattacttgggcttttagggcaattatttaacaggtaaaagtaatggtcaagttgaagtgtatacatttattccctttatcaaactttataccttttagtaagtagtttagaactagatgatcttaaagatacgcatttatttggaaggattaaaataccttaattaactcatttccgattgtaggcctttggttgaaagtgggcatctctataaatgacatatgtgtctccattaacaattatccagtttgtaagggtatttcaagcatcgctgcccttgtgttgttgttgttgctgccggcgtatgtgtgtgtgtgtgtgtgcgttagcgtgggcgtcgctgccagcgtcggcgtccgcgttgccatggcagcagcgtcaaacacacaggtgttggttgcaaatacgtcatcaaagagttaccgcgcagcggtggcagaaacaggtggaatggcagcagaggttgtggtcgaggcagtggagtgttgccaccaacacacgtacacacgcacagctgtcagcacgatcgcgattccatatccatatattccatattccactcgtgacgccgacgttgacgttaacgtcaacgacaacgccaacgcaggcagcgatcgccatgtgccaattccactttgtttcagcttcgcttctattctggcctgtaaacaaaaaaagcgaagcagcgccgcaacggcgacgtcgacgccgacagaagcgtcaacacctggccaaagccacactttaagcgttttaacttggcccgatcgcttttagttgttgtcgagacgccgccgcacacatttcacgatacctctccataaatatttgcaaaaattgtatagaaataaataaaacgcatgcgttcctcgggaaccgcggaattacaaaactgaacgaaaacaacgggaacgctttttcgtaaacccggaaaatctttataaagtgtgtgtgtgaactagaaagatccaaaacccaaagccaaagtgatttcaatcaattaatgcgacttcgcatgatgtcagaatcttgcgttataatcgctcagcctctctgatttattaaatgccgccaatttcaattgatttcaatctcttgcaatttagttccatttcaattatttttttatgacaagtttattaccgaaatgcggggcacggtttgtttcaattcgttcgtttgtttgcaaacaaaatgccccgcgaacggagtcaagtagctgtaaaataatgacgtacaccccactgttgaactcgaagccacccccccctccaccaccacctaccccctttcccgtttccatctcgtttcggttttggtttcggtctcggatttttcgccgctgttccagttcgtagctttgaaaaaccattttttttgtgcgttgtttgtgtctcgtattttattttgcaattttcaacgctctcctcaagtggtttattgtttgtctcgttggttctgaggatggtttattaattttaatttatatgcccacaaatcgtctaaatctgaaaatgctagtgaagatcacccatatctaaattaacagcttgtttgcttttcttcctttctttaatgagctttaatttatgaatctcccatctgaaagcgctttcaaatgatttagtgtttgattcactgcattttatatgttttcttaattgtctccaaaaccggaattttgtacatttcttttaaattaataaaatgccaaattagttgtcatagccattagtcttccaccctgccaagcttaactactgaaggtatttcgaaattttgattagcttcagatgcattatccatttaatttataacctcgagctgcaataattttctgaattaacgctccttgtcgtcgagcaatgcaaattggcaggcaccattgaaaatcgcacatctccaaactttgaacagtagccaaaaagccaaaataggcaaagaccagattcagttttttttttgccgcctttcaaaagactcattgagaatgtcaagccattaacgcctcttagagacgcctccacagacactttttcgagctgttcgttcgctcgccgccccaggtatttttcttatttctctatcatttttgtttttagtcataatcacataaaaaacatcgcggatcgtttatagtgtgcttaaaacgctgcaattagcatttttggtggaatggttgtgatatgtgtgtgtttgtttgtttgtttgtttgtcacggtgctgcgcaggcgttaaacgcagccgcaacctccatttaaaaagtccgttctccattaccaatgcaaaacaaacatttgtcgtgcctttttatgctgggtgggcgatctttttggcctggccaactgttttattgatcttgagctatatagattaatctggaggtttccattagaagcagaggttgtaacaaggcggtgcgaatatgtttacaagctaaccagctgttagctgtgattataaagacccttaacaattcgttcacttcctgtttattttatttttattagtgtaacgccaaaaaagagtcactctctgctgcattgtttttatacaattttgtcacacttgcgaattatttgccccttcacctgaacaattactgttgtttgttttgattaatattgaacctaaatatttgtttaaaaattttgtagtaagcacagaacgtaagtggaatatgtgtaattctgctattttagatttgagtaatgtcttggaatcttgatattctgtatactatgtatttacccctcaacatatgcaagttcaacattaaaaaagaggaaatttattcaaactttttcctacacttcctatagtgcaaatatgccgtaaggccagcggtgaatatgcccatattccctgttccactaccatatcgttcctctccccattttcctatgcaaaataggcttgcgtgttccgaaactaatgaatctctgcccatgaatcagcggtgtacattaactttttgcggtacgtatgtgtgtatttttgcaaaaaaaaaaatacaacaaaaaatgtcggcagcaaaagaagcaacaaaatagcgccaagagcaagacagacagacagttgggataattatgtgtacgtacaacacaataaataattcgcaacaacaatggggttgcccttactcccctcggcatacccacccccctcgctccactttggctcggttcggttaaatttacttcacttcagttctcgatggggtttctgaaaaaaaactccagggcaatgccacatagaaccagacatccggtgctggtttggggatttgactttggctttaggtttggcttaattaaactgaaattgtaaggaccggcaaataattaaacttattttggcaatcacgtagaattacgaaaatcggcgcaaaagaaacgcggcaatacgaaacgatcttctaacgaaccttagaacgaaacgacacaaagtgaaacaaacgaaagcatcgataactgcgtaagcagttcgattataacgataacatgcactccagctcacaatcgacgctgaagcgcacacaacaactggtgcggcagacaaatggtggcaggggcgatgttctgagcagcggatccgaagtggttcactcctcccgaggaccggcaataaccaccaatatcgatgactcgaacttgcgctatcgtcatgagacaaaaagggagcgcactgtggaagcggtgattacggattatccaggtgtatcaccccttggtagcgttccccatgaacgaaccaactttgagcgcactgtgaccttccaggatcccacgggaaattcacgtcgcctctcggagactggagctttggtaccggccggtgcaattccaacgtcgtcgactcattaccaacaggtgacgcgaaataaacgcatctccacagaggtattgggctccagcgtggaaagcaccaagacatcgcaaagagcgccaaatggccatcgccgtgtaaccacgcacattgtccggaaagtgaccactttgagcagggcggaggagaatgctcagcctgccgaggatttgttgcctccggctaaaatgattcgcagctcggagttggagtatcgtcgcgccctgccgccggctatagagtcgtcgtccacgcagcgcagagaggtaaaaactgatcctttttttttttttttttttttttttttattattattatatacggcaggaaaatgaaatcttctaaagataccatctaatgtccttggatggcatgcacgattcataaccctcagctgagggcttatgcctacgtactaaacaaaaacctccgctctctctcctgtccttgtcaagctcaccggggctgccagtcaaggtatttcatcggtgagcaggatgtggtgccaagttgcacaccatcttcttttgcggtgcacagcagcgcctttttacgaccaactgagcgtaccagtcgtagagttcttgccccgccaacatacgggggtactccttatctatagttccgattggccatctcgtccttacggacacgcttcatcatggtgacgatgatcacgtgagccccatcccaaacgattttgtccgccatcatagcagcaaccaagcctctcgggctgagaggtgacccagcgagcgccacgagttgcgccctctcctcggcgaacctggagcagtgcagtaggatgtgctctgcggtttccactgcgtctgtgcaataaaggcactggggctgtatccacgtggcggaacctacataggtaccctcgaaaacagccattggtccgtgaggaactgggtcatgtgggtagtccaccgttttgtgctcgcaatcagcccactccgttagttgcggaatgagtttgtaagtccagcgtccccgttgtgactcttgccacctggtctgccatactcctcgaatccactctttgatctctaattgagtgtatccctcactcgcaaggtatttgccctttatgtccaggtcaatgggtgtaatgcctgacagagcgtgcgttgcgtcgtccgatatggttctaaagcctctgattagcctgagagccattgtccgtgatactgcgccgggcactatctagataggttttctttgtggaaacgcagctccagataggcgcagcataaagcagcgttgcctttgaaaccgccactaacagtctcctagccggcagtctgggtcctcccacgttgggcatgattctcgccaaggctgctgctgtcattgccgcttttttgctggcataccttgcgtgagccttgaacgagagccttcggtctattagaacaccaaggtatttcaacgtttctgctgaggcgatttcaactcctttgacttctacacgcatgcactcaacggactttctgctgctcagcaggactacttcggtcttatgcgcagctattttaagtccgactttctcgagccattctatggccgccgtgattgccacgttacttatgtcctggagctccggtattgtcttggcgaccgctgttatcgcaacgtcgtcggcgaagcagtgcagctccacacctctgggcttgctaatgctcagtattccatcatacataatgttccacaagatcggtcctagtaccgacccttggggaacgcctgcagagacttggtggcttcttggaccatcttctgttacgtaccataacacacggtccctgaagtagttgccaattacgcctcgtatgtagtcgggaacgcccaagttgcgcatagccccgaggataatgggccatctcgctgtattgaatgcgttcttgacgtctagcgtgatgatggcacagtacttcttactgccgcctaaccatcggttaccgtcgagtgctttcctggcagcgtctgttacggatttgagagcgtcgagcgtacttttaccctttcggaagccatactgttggccctgaaggcctgtaggactttcagtgattagctcaatgcgcgcgtacagtatgcgctcaaagagcttgccaacaatgtccaacagacacaacggtcggtaactgcgtggaacatttgcgggccccttgcctttcggcagaaggacaaggtaaaaactgatcttgggaataaaataaaggatgtcgaaccattttatcggagaatttaaattaggcaaccacagtttagctctgctccagttaatcaatgaatttcctatcgtatagaatttgaaccttacttattacttaactttatcctgctcagatctccgatattgttgtgggcaaagaggacaacgtatccgctcgggaggctctgctgcgctgggcacgtcgctccactgctcggtatccgggcgtacgtgtcaacgactttacgtcgtcgtggcgagatggattggctttctcggcgttggtgcaccgcaaccgaccggacttgcttgactggcgaaaggcaaggaacgatcggccacgggagcgcctggagacggccttccacattgtggagaaggagtacggagttacgcgtctgttggatcctgagggtaagttaatccatgataatgcgtatagtgatccatctaactgcaattcctcgaatttagatgtggataccaacgagccggatgagaagtcccttatcacgtacatttcatcgctgtacgatgtgttcccggagccaccctctatccatccactctttgacatggagtcacaacgtcgcgttcatgaataccgcgacctggcccaacagttcatctactggtgccgcgagaagaccgcctacctgcaggagcgttccttcccgcccacgctaattgagatgaagcgtctgttgagcgatctgcagcgtttccgcagcgacgaggtaagcgcccgcaagcgcgagaaatccaagctcatccagatctacaaggagctggagcgctacttcgaaacagtgggtgaagtcgacgtagaggctgaactgcggccggatgccatcgagaaggcctggtatcgcatgaacacggcgctgcaggatcgcgaggttatccttcagcaggaaattgagcgactagaacggctgcaacgactggccgataaggttcagcgcgagatcaagcatgtagatcagaagcttaccgatcttgagggccgaattggcgaggaaggtcgccgcatcgagcgactacatcccgtggacgctaagagcattgtcgaggcgcttgaaaccgagatccggcacctggaggaacccatccaggacatgaaccaggactgccacgtgctcaacgagggtcgctatcctcatgtcagtgagctgcacaagaaggtcaacaaattgcaccagcgttgggctcaactgcgcaccaatttccacacgaacctggtacagaagctgtccggtttgaagtatcccgtccacgagaccacggtgacgcgtcaaacgcgcatggtggtcgagtcccgtcagatcgacacgaatccccatttccgcgatctgcaggagcacattgagtggtgccaaaacaagttggtaagtacaaataaataatatatgccgtcttttatatcaattaatcgattgttttcgtgttgcagaaacaattgcttgccgctgactatggcagtgacctgccgtcggtcaaggaggaactggatcgccaacagcacgagcacaagatcattgatcagttccacacgaaaatactcaacgacgaacgtcagcagaccaagttctctggagatgagctggctttgtaccaacagcgtctcaatcagctgcagaaggtgtatgccgagttgcttagcacctcgacgaagcgtctgtccgatttggattcgctgcagcacttcctgggacaggcctcggcggaactgcaatggcttaacgaaaaggagcaggtggagattacgcgcgactgggcggacaaacaactcgatcttccctccgtgcacagatactacgaggtaagtggtggcctatgccccgaatgaatccccccccttagagctagtgttatatatgtgttgttgtgcttctatccgtttacaagcgtgcatttggtaatggcgacgaggtaagaccccagattggttcataaataccatgagaaattttctattgcaaaaaaagagcaaccaaccaagtgcacttataaaaaaatttttaatatcgttacttataaaacgtttttaataaccactacagaaccttatgtccgaactggagaagcgtgagatgcactttgccaccatcctggatcgtggagaggcactgctgaaccagcagcatccggcctccaagtgcatcgaagcccatctgacagccctgcaacagcaatgggcgtggctgctgcagctaacactctgcttggaggttcatttgaaacacgccacggagtaccatcagttctttggcgagatcaaggatgccgagcagtggctggccaagcgtgacgaaatactcaacagcaagttctcacagtcagactttggcttggaccagggtgaaactctactcaggggaatgcaggatttgcgcgaggaactgaatgcctttggcgagacagtggccacactgcagcgaagagcccagacagtggtgcctctaaacaagcgacgacagccggtaaatcgacaaggacccgtgcaggccatttgtgcctacaaacaacagggtcaactgcagatcgaaaagggcgagactgttacgctgctggacaactcgggacgtgtgaagtggcgcgtgcgcactgctaaggggcaggaaggacccataccgggcgcttgcctgctattgccacctcctgaccaggaggctatcgatgccgccgaacgtctgaagcgtctgttcgatcgatcagtagctctttggcagaagaagcatctgcgactgcgccagaacatgatcttcgccaccattcgtgtggttaagggctgggactttgaccagttcttggccatgggtcctgagcagcgcacggccatccggcgtgccctcaacgacgatgccgacaaattgctgagcgagggtgatccaaacgatccgcagctgcgacgcctgcgccgtgaaatggacgaggtcaatcgcttgttcgatgagttcgagaagcgtgcgcgcgccgaaggtgagtgtgggagtactcgtatgggtatcggtattaataggggcctttgaagggtaggagatagttttcgcctcgcttttcaattgtcggcgctcgccagctgtccaaaacgtttaattgatggaggctaattgaatttaatgcctgtgtgttttctctgaggcaagtggcaagcaggaagccagaatgcgacttagtcttgtcaagtctagtcaacaatgaagaagctgttcgcaagtgccaaaacaaggggtaatcttgtgcgcttcggggatatctaatcttagcgatctaaacttttttgttaccatatttatcgttgttaatcccttgcagaggagagcaaacaggccagtcgcatcttcaccgaggaatgccttgccatcaagagcaaactggaggacatggcccgtgagctggatcagattatactggctccgttgccacgtgatttggactctttggagcatgtgctggaaattcattcggactacgagcgcaggttgcacctgttggagcctgagttgaaacacctgcaggaaacattccgcacgattgcgttgaagacgccagtgctgaagaagagcctggacaatctaatggagctgtggaaggagctgaacactcaaagtggcctgcacaaggaccgtctgaagttgcttgaggcttcgctggctggtctggaggacaatgagcatgtgatttccgaactcgagaacgagctggccaggcaccaggatctgccatcgaccgctgagggcctgcagcaagtgtttaagcaactgaaccacatgcaggacatcattacacaacagcagccgcaaatggataagatgaacgatgcggccgatcagctgggacgcatgggagtgcccaccaaggtgctcggcgacctcaagagactgcactcgaacgtggagcgcctgaacacgcgctggagtgcggtgtgcaaccaattgggtgaaaggtaggtccgctggcgccacctgctctctttttttttgtgtgggtgtcgcctcattggcgaccacagatggagatgaacctgcctctctaacaacgtgttactttgctttttcagaatgcgctcatgcgagacggctatcgggcttatgaagaatctccagtcgagcgtgcaagtggaggaatcatgggtggatggcaccacggagcgactgtctgccatgcccaccgccacttcggcatacgaactagatgtgagtacaaagacgctgcccctgtaaaaacgagtttagcatttcgataagcgatagtctctagctctagatttacatacatagatccttgtacagtttttccgaattttagctatcccttagggtctctgccagagatctcacttcgcaggccaaacacaaagtatatatacatagcctataaatggaaaccgtagtagccattgacccgcgtccaaagtagtttgctcccacagttgttgctcctatttttgttgttgggataaaacctgccggtgttggacatgtctccgtactcctatatatatatctatatattttatatatgtgtttatcttttttgtattttttgtttttgtactacatttccatttgttaactgtccccaaaagcagagagcaaatctccagtcccttgtccgtattccagcagtagttcttgtctaatctaacagcagtctttgacatgtagtgctggccaccacccacataagcataccacatgtacatatatatacacacagcagacgatcctccaaatgtggccaaatcgaccacctacacaacaatagccatattagtaatctgtagcgatattcccccgtcccacaacactgtaaattgataccaaatttgtgttgtagtttttaaacttacctacttttatgtttgtagtcttgtccccttagtattataagctgcacctatacatagaccgatatcgaatgatatcggttcctacattatatatttcttcacccagtattatcgtatttgtagttgaaaactaattgtatatgtatttttgtctaatttttgtattttcaccaaaatcaaaacaaaaattttaaactttttcacacaacaatcaaatattatcacacactataaaacgacacaaaacgatcaaattataaaaaaaaaaacaaatcgatttaaaaatcctgaaaatattcgaacaccaaaaatacccctcgaaaacccatagaaactgctcggagctgcaatcgaacgaaaaccaaaaatcgaaaatgtcaacgtggctggaggacgacttatacgcgaagctaaggtaaaaatttgaatgcctgttgtggtatgattggtctgattctaatgactgctgatccatcgtaacccatcgacttcagacatgtgcaattcgatcgcttgacatacgattcgatggactgactgggtctagtcaatgttgggttgcgataggtcagttggtggccgagtgccagcactttacgtatgactgtgtcgaatgattgtggatatttcgaacgaacaccgaaatccctccttttccgcaaggaaaacactttgtagccctataaacacctcttagctgtttctctaccgaatctcaaatatatttaatgctttttaaaccaattaccggactgtaagctccaattcttagttatcttgcgggttaaaggtgcgtgaataacacttgggtggaacagaaacagcctgacaaacaaactcttaaacacacaaacaaccaaaacaagaaatcaaccaaacaaacaaactaattaaaaagcaattttaccaaaacgtaatttcgtattgattaatcaataaaataaaaagcactaaatatatcaacaagcgccccccttctttccttgcctcctgaaaaataaactaaatttgtttaacacacaaaattactaacatttaaccgaaattaaccaaccaaccaaccaatcgaacaacaatgtcaccgtgggaccctgaattccgggagttagatctacgatagcaaatgcctacgcttcgtggactggctggtcgaggcccgtccgtcgttctcgccaccgcgccgggatctccggccggcggatagcgatccgggcgccacacagtattacagccaacgtttggacaacctgaacacgaagaacgacagattgctggaacaactgtcgcagcgtctgaaaacagcaatcgaagtcaatggcagcgatggtctggtgagtaatccaggtgaccctttcccctttttggaaggatctttgcgaggtggtgacgtcagggtatatttttcgcttcgtttgtctacctcgttagctggggttaggctcgaagtattcaattgtttcgtaatcgcaaagcggggttcaagttcagcaaacgagtttttacgctttcgttttctacaagtcaaaccgagttttcaaatgcaaatacgtacgtctacttctctgtggtatcattgtatctccccctccatcatctgtgcctgtgtctatctgtatctgtattattgtatctgttaccgctccgaatgcccggcagttggtatattattgaattaaccttcagaatcggtgcacactgacggcagaagcagccacataatgacatcacatcaaattgaccaaacattccgtcaatggcttgccgctataaatcacaacttgattaatttataaaaatttaaactatttttattttctgtcatcgtgaccgtcgttgatcgccgctgtcaactgatgcagcaatttgtttaatgtatcaaatttatttataaatattgcattatgtcaggggagtttcaatagaaagagtaacaaaaacgatagacattgtcatgcgcctgaccaattaggcaaattggagacagattcgaaattaataatgacgacgccgaattctataaatattaatgaggcccagcattcgtatggattcgtatatatactcgaaattcaatgccagggaacgtcatcaacgtctttgtcgccatctgtcaacttttcttttatttttttgaattccagttcccctcttattttgactatttttgctcaactggtttggaatttgtttatttcctagcagctccatcttcagaaattcaattaagaatattattaagcaaccagcttgtgcctgctacgaaaatatttgtttgcaaatatttaggaggcaattaccatattgtttaaatggagttcagatcgccggacatggtgtaaacataagttcaataaactttttaggctaatgctgtaataaatagcatcattaatactacagtgagaaaaaccaatttttctaaatttaatgataaataatataatatatatatatctgcttaaaaaacaaactataaatgccataaaattgaacatctttagcctcaatttctttctatgtagttgatccatttcaaagtaatccgaatttgttgttttgggatctattgaggcttttcgaaggtgttgccttcgcctcgagcgttggagtgacatcataactgctccattaccacttcgccttcaagccaacttgatatgcatagcaggggcgggcgctgaagctccgctggcttaactagactgaaaagcgaaataagttatttagaaggttagatggcggcacaaactggtttgatctgttcttctgatactttgttctcgacttccgtgtattgttttcgactttaatttggagccaactccagcagcgtatactcccttcccttccctttccttcccatcgccaatctccaccatttcatgccatgccattgtaaatggattgtttataatgttttggcgcaacagctggggaatgctcaccgaaaactagccggcatttgtaagctctccctctctctctctctcagtggcaattgctttctctcaatctcaacaaaagctcgctctcgctctccacttaaccatttgattctcggagtggcgctgctccattcagtaccgaaagcgacgtggttgtgtaacgtcgcgtatccgctgtgtgtgccgacttgctgccggtgaacgaaatttaacaaaggccaaaacctttaaaacctccggtttttgttggcaaccaaagtctatggaatttgaattcgaatcgagcgtgtaattattagtgaatagttgtgataactaaacgggcaaataacttcccaaaactcaaatagagaacattgctcatacgccgcatgggcagacatgatgtcacatatacggccggatagaaagtgtgtccgtgtcgttgtcttagtgccttaaatttcaattaaatgcgaaccgtgtcgcattggttcgcttttattttgttagaagaaatttaaattcgctgccatttgaatttgtgccgcaaagagttctattatagcccgaaatgaagtcactcgtcgagtgctttgcaacaacttaaatataaccgaaacgcaaacagaagagtgtgaaaacgaaaataaaagaaatacattattaatatagccttgaacatgtcgcaagaatcggaatgttgatattttcggccgtctgttttggtgttaatgaaagcgcacacacaaaaaaaaaaaaaaagaaaaaaggagaaaatgaaaatctatggctgaaatttcgtagtgagtcagcgagttttagggtcattataagttgcataaaaccataaaatgctgcacttaaaatgagaaacccgaaaaactgtggaaattattctcccgctcgattactagctgactagcgtgaattatgacttgctatcaacaggaggatcgcgggagtgtcagggctggcgcttatctaatctatgaggtgcaatccatcagaactaaatgtgatgcttggaattgagcgatcggtttaccaggaaatgccacccggaatgccgatggaagagtatttgtttgttcgcctagcatccatgcactttccctttgattttatcgattaaactagatgccttggtataccttctatatatacttcgttgcatatatatatatatatatttttagcggcattctaacgataaatcaggaatgaaagcgagcgttttggggtctatgcctccactgaagcaaaagggaggcgcctattttcatagtgccacaaaggcgaggtccaattgcaggctgtggtgcatgctgcacgctctcgttagagcttttcctctctcgtttgttcgctcttacccccatttaaagccggtacaacgtggcgtattagtcatgttatcaatgtcaagcgcatctcagccgattagggccaagaatctgtttaatctgcttgcggactcataggccattattttgtgctttagttcagctttagttactcgttgtgcgggcgctcgacaaacttgtttcggtttcatttataatcaaatattcgccactctgatgacatcattgttctcgtacttgtatattaactgtctaaatgtgtgtcggtgtgtgtttcgttaattataatttatttgttgcttttaccaactctagggcaaccttgaaaatcagcagcagcaacagcagattagttgtttattttgaaaatgcaaatcataaacgttgatcactttgtagattcgccattcaatgacttcatttgcagccctcttttgcaaagttgtatgtatgacgtcaatgcaattttaagttggggctacgacctgcagccatatgtcagtcatttgccattgaatcactgtctctggcaaatggtaaataaagataaaaattaaattaccagatcccgtcgataagacgcactccggatccccaactctttccgggtaatcacccatttattatggttgggacctcttgagagagtttgcactacatatttgcaggccgattgattgaggacttctccgtcatatagcgtcatttctattttcataaagcctttgggttcgctttttgtttgcgttttttccttattttttttttttttgttttcacttaactatacatatgtgcttcgtgtgatttgtgtgcgtcggtgcggggctgataaaaatgtatccttgtgtgtgactgaaagaactgaatctagtgaatgaattaagtgaatcaacaaacagagtagtataggacggtttaagggccgattaataatgaaagtccagcgatggctaccgtaaaattgtagagttcatgtcttttgacaatcttggaagtatttttagttactttatcgccggtgactttatcacgcggccatatcaaatcacgctcacgcatgccataaacattccacaaaaatggtttgagactctagggcaacttcaaagtgacgcgtctgccaagaaatctcgactcgtaaatttctaattgcttttgtcacaattaaatctcgcgcagtgtattcaagaagcccctaagccaacgaaacaaataccaattgctgactatgactttgtcgaactgaaccaaacgaaagccttagacatgcctcagcatagatcgggtcgcaaggcgactaaaaccaaatccaaaacccaaaccacgactgtccaagtggcagaggaaagtgactacgactttgcgttcgagtttcaggtaatacttcatctatcctccccattccctgctgccctgttttttttcccctcgcaaagatttcaacgaaccgagtttaatttgcctgttgcccagttgttaacttttactaaccgaaattgctttcatttggcatttagcaatacgctgagagtctacagaaaccgctcaagacctttagggttgacttcagtgcgggcagcgtgccaactggcgatggttacgctgcgcgccaggaggatctctacaccactacctacagcaccacacagtaagtacaatttatacaaaatttataatatatattaagtggatattattctccagaaagaaagaattttactgcattctgaaatcaacaaaatgattcatttaaatctacaatctacaatattatgcgaaagaaacgataacaacttttgacaaagttgtagaactatgaataatcttatatgtagatttgtagtcatacattcttttattatatactaataaagttctaatcgaatcctttcagaatcagctcaacgaagacaacgaaaagctctacgaagagcgtctatagtagcgatggcttggacgccgctagtcaggaggttagcactgctggcctgcctcaatcgcagatccaattcaacgaaatccgtacgctcaaacgctctcaacagctgggtggccattccgtgctggatatagccggaatacgcgatcctcgtacgggtcgcgttctaaccatcggtgaagccatccagcttcgcattctggacgtgcgcaccggcgagatgctagtgggtgatcgccgtatcacgctggaacaagctgccgaccaaggactgatcgatttgcaactggcaaagcaattgcttgagcctggtgccggccgagatgccagcggacgggagctgtcgctcctggaggttattcagcgcgagattagcgaagcggaatccggttacgagacggccgagaagcggatcaaggtaaacaacacagtcaccgtagagcaaacttccggagagctgggctctcccgagaatccacgcaacattgccgacgccattactgcggggagtgtggacaccaaaaccggcctgtatcgcgtcaaatccggacagacaatcagcctggcggaggcctacgagcgcggctacctcatccggcacgagtcggtgacaatcaaatcgaatgcgctgtgcctgagcgatgcgattgcgcatggcctggtcgatggcgccggctggatagcggatcgcaactccggcgacaagttccgactggattcggccattgccaatcaactaatagacgcgagtgtgcgcgaagtggtggacgcgaaacgcgatacgaagatcacactgcaggaggcactgcagtcgggcgtactgaatgcaaaaacgggtcgttatgtgaacgaggtgaccaaggagaagttaaccttcgcagaggcgcgaaaccgtcagttgatcgtgaaaccgtacacgctgaaggacatctgtgatctgaatctgctcgataaacaggctcagatcacgagtcccatgcgccgcgaaaagttaagcattatgcaggccatcgaggccggtgtactcgacggtaatttgctcaagtgtatcaccaaacgtaagggtgaattggtcacccttcaggaggccattgccgatggcatcgtgttgccggccgagtgcaagtaccgcgactttatgaccggtgagctaatcagcattccggaggcagtggaacgcggtctgattagctcggtggcgcagcgttcgatcttcgatattgacgggttcaaggatctgaggagcaatgactatgtaagctttaatgtggccctctcgcgcgatcttttgcgtcgcaagagcacgggctttgccttagagacgggtagggatagtctggtgccactagaggtggctgttagtgagggactggtgcgccaggaggtgtacgagatgtttagccgtggcattggcgttcagaatgccagtggtaaggagcttagcgtctttgatttggtctatcacaatctgattgacccgaagactggttatcttttggatcccaagaccggggagacagtgcccctggacaccgccatcgagcggaagtttatcactcccgagggtgctctactactaagtagtttgctcaatatcactttgacaacggaaacggtgacgcggacgatcaatcgttatgtgacaatcagggctggttcccaggagccagtcgacagcgtgttgctcaccttcacggaggcagtgcgtcaaggtttcattgacgaggagaggcaacttttcaaagatcccaaaacgggaaatatttactcagtacagcaggccctcaactatggcttgttggttcccgatagcaatcaaacagttccggagccaacaaataggaaaaagacaaaatccactattaccattgtgaccaagcaaatcataccggaagcagagcccatcaagctaaacacacagcacaccaagtacgtcgagaagtcggtggagattcctatttctcaggaactagtaaagccgcatcgtgtggtctccgaatttattaacttggaaaagtctagctatatcgaacaaaatgtaacggagcgtcagatcatggagttgcctccaggaggatggcgactaaaggacgccattgagcagcgcctgtttaatccagatacgggagtattccatgtccagggcacagatcgattggttaattttgaggagtgcatcaacaagcagataattaacaatctatcgctctccgtaattgatcccaacactggcgacaagatctccgtgcaatcagcctttgaacgtgatatcttggacagttatggcaactatacgaatagccggaaacaggtgcagggtatgcgtagcgctattgacgagagtaagatcattctggaaactgtcccggctacgagaggagccaaccaaaagacaattcttcgcatcactaaagtaaacaacattccagatgtgttagaggtttccacgcccctgaaagatgcaccgcccaagtttgtcgaggtgctcacctgccaacgagagctcgcctctccagagcccctgcaaattgcaccgggcgccatctatgatccgtccactgccctagtaatcttcacgcaaaccggagagactgaaaatatcttcgatgccgcccgtcagggtctggttgatgagcagctaattaaaatcgtggatccgacaaccaagcaacccatttccgttaccgaggcgatagcgcgttccatttacgatcccaagacagccactattcttgattctgagggacagccggtggatttgatcacagcaactaaacttggactattgagtgtggtaggtgctccattggttgccgccgagggagccctgcgaactgtgcgtttcgtcacagatccacgaactggtgagcaaattccagtggaggtggcctacgagcgaggcattgtctctcgggatcagttgcatcgcggaaggtcctttgacagtgaacccgcaacggtagaggacaaagttgtagtccttcagagaatgcgtaaggtcattctcaagccaaaggatgctttacgaaagggaatcatcgacgaagagacttgtgaaatacttgaaaacaccagtaacttcactaatcccaaaggagaggtggttaacataactgaggcactgaacaccggtctaattgatggacgacgtggtcaggtgatcgatccccaaaacaatagagtcttaaatttgaggcaagcagtggagcagaagattattgattccgagcagactaaccatattcttatgccgttggccaagagcttatcggtgccgcgtctggcagaccagggattaattgatccacaaactcagactattgtccatcctgagagtggttatccactgagcatccatgaggccatagtatgtgaggttctggatccgcattcaaaactgcataaacccgaaaaatgcacactagaggaagcgatcaccaagggcattatcaatgcagatgattccacattcaactataagaacaagacactcaacattactgaagccattgaagcgaagctctttgatcccagttacgatcagcaaaaatctaaggtggaaattccgccggtgggtatgatattccctgttgctgttgaaaagagccttgtggaaccgtccaagcgtgttgttctgcatccaagtacaaagaaagcacttccaattaagcaagccattgaggagaactttatcatgtccattccctattctcccaagccagatgctatcgaagtggttactgccatggagcaggatctcatcgatgtagctgcccaaacactaactgtaccgtccactggtgaacgtatacctctacgacaagctatggaaaatggtgttctggtggtaaagaatctctcagattttgtgattacccagaaacccattcccaaaacggagatcatggagacggtgcgtgcagtgcacacggtgactactaaaaccattgagcttatgcaaggctacgtcctcatttctaacaatgaagtgcagaacgttaacacaggcgaggtatgcagcttggaggaagctaaggagctgggaattctgcgcgaagaatccacaactcgggagacaaaagcagcggccggcgaaagtccggaatcggtgggcgacgttggtaccagtggcgatcaaactgttattgtagaagagcgcacccagacagttgtggtcagttcggatacccgcaagcaagagatgcaagtagttagcacgacgcaatccacgaaggatacatccgttccaagtgtaagtgaaatcgagacaaagggcagcaaggagccatcgaagacgttgcaaaatgtgaaagatgccgccaaattgggtgcattgggcgtaatcgcagctcctgtactggccggaggtgccatcgtaagtggcgttaaaagccttatcaaatctgtgaaatctcccacggaagatgccaagagcactgaaaaacctaaggaacctcaaaccagcttcattgaacaggagcgccgtaaagagctacagccgcaacaagtgccaagtgaggtggataatctcctcagtgaaacggagaattttatcagctctacgactgccaactttattgcaaacgaaaaacagcaggataagcccgatacgttgccacaggaaagcaatctgcccttggaagttgaatcaacaagcactctgaccacaacaacagtaacaacaattactacatcaagtacaacaacggagaccggaaatctggagccagttgtggtagaagatgtctcgaccacagttaaggaggataaagtggtggttaagccaagtacagttccagaagataaaacagaggtttccaaaataactgaaaccataaccacagtgacttctaatgaaacagatactgtaccagaaaagatatcacagaaatcagcttccgaggagtcagcaaagaaggatccagtggttacgaaagacacaagttccaggccagctgaaacggagacatctcctaagcctgttcaaaaggaaccaactcccgatccagctcaaaatacagaatttcctgaatctattaaaaaagatcctactcctgagccggattacaaggaaaccgctaccgaggcagcacaaatcacaccaaaggaagcttctcctgctccaaccaataagaacgaacaatcagctgaacctacctcaaagccagagccaatgccccgaactgctaaaaaggaggagatttctgaaattgagcccccgttcacagcaccactggctccatttgttgatcaattagcggaaaccaagatcactgaaattaaaacagaatttaaagaaccagttacaagttcccaaactatcacaaccatcaccacaacggttaaaacagtcgatgaacaccccatagtcgaggaagtagatgaggtcagcaaatctgagaaaattgtggatgtggaagaaccaacagttcaccaacaagaaccgattaaggtgaatgagacgagcgatgattccaccaggactgaacctaccaatgaaatagtgcatgaagaaagagttgtcactgtcgaagagccgacgatcacagaaactaccgtaacaacaacaactatcactacaacaacaacatcttcaagtgaggaaaccctgccccaagagaatacagccacagtaaaggaaacgcctttgaatgagcctgtgccttcatctccagctgaaactaaagagattgagcagacaactaatgatgatcaaaagaagccggaagaaattgtagataccgaaaagaaaacaacagagcagaagccggtggaaactatcccaaccgagccaataagcacatctgaaacaacaacagtgactcttaccaccaagacaacaattgttgatgaaggaaaactacatccaccaagtgatattgagcaaattattcaaccgcattctacttcggacaaacatcaatctcttgttgatttcattgaacaggagaagggcacacagccagcggaaggtggtagcaatattttgcagaatgtgaaggatgctgccaagctgggcgctctagccattgtaggagcaccagttcttgcgggcaaggctttggtagatgctctaaccacagaaaagacacttaagccagaacactccacatcacaagttgtaaccgagacagtggaagaactaccaacagagataattaccacaagcactgctacattagttaccaaagtcaccactacaactaccaccacaacgacatccaccagtgagggcactcccgatgatgaggctctggatgtagttaaactgcctgctgaattggttgaaagctctgtaaagcgagaagtgcccaggacactggccattggcgatgccatctcccaaaagttgattagccccgatgagtgccaggtgatcgtagatggagaacagcagtcgcagaccgtttccacgctactcaaggaggagcagcttagcccattggacgaagtacagatcatcgacgacaaactaattgttctgcagcaggtgtcttacctggtagacgcagacacagaactgacgccacagaatttgtatgaacttaacatctacgatcccgagaaccaatactttattgatcccagtactggccagaagatttccttccatacgctggtatttgacatgaatgtttttaacccagaaactattttggtaaagaactttagtaccggcaaatacgagactcttacagcagccttggagcgtccacttctggacaggcacacgggtcacatggtggatccgaagacaggcaagaaaatcccattctttgagtgcgttgaccgccaatggattatccgagccaatccggaagagcaaaagccatcgggcatcgagaacgtgacgatagacacacagactggacaggtggtgcttgacgatggtcgggtttgctccattgttgaggccatcaacagtggcaagctggacattcagtcgatatcggtgcgcgacccagtcagcggtgaggtgattccactgcgtatggcaattgagttgggggtggtagacatgcaggcgggcacagtgatagacattcagacgctcaaagagattcccatggagctagccttccagctgggtttcctagtgcccggtgcccgcaaacccatttccctggaggccgccgtacgcaaaggtctctacgacccggagacgggaaaactcttcgactcagagagtcaaaaccaggtcgatgttcagaagtcgattgaaattggtttagttgacccgaagatctcattgattgtggatactgtcactaagaaggaagtcaagctggattgcgctatcgaagacgatttggtgctgcccgccacgggtcaaatcaaagacaacaagaacaacactttggtgcccttcgatgtaggtgtacaacagtgtttgctgaaaaccgacaacgtcacctggagcctgccagagttgcttcagcgcgaatactacacgcccagcactggcaaggttcttaatcccgtcaccggcgaggagattcttcttcagcaagccattgaaatgggctttgtggagctagaaacgactttggtcaaagatgtcgatcatgataaaattttgccaggcaaggaggcggccaaggtgggtcttttggacactgttcgcggaacactaagctcgcccaacataagtctcgacgaggctttcgtaaagggctatcttataagcacgaaaaagccgctttccctggtcgattgtctgctgcgtggtctttacgatccttcgacagcaaaattcaccatcgacgacaagcagttggacctgaaggccgccattgcccaaaagctcattaatcccgaagagctggttttgcttgaccccaagacagagtctattatttccattacagaagctatcgcgaagggttatcttgatccgattgagggctatgtgattaacccatatgcctccaccaaactgtccctacacgaagccctggagaatcgtattctcatcccgcccaaacgaaagcgcagcttgcccgatgctgtctaccgcggtctttacgaccccaagactggtcaatttagcaatacggtgacccgcgaaaagctcacaactgaacgtgccattcgtaggggcatcctcgatcccgattcgacggtcgtcaatgtgggctcgggacagatcattccatttggggtagccaccgagactggaatcgtggacagtaaacatggtacggtgagggatgccgatgatcacccgattgactttaaggaagcattcgatcgtggtattttggttgaagccaagaagcctcttcgtcttattgaggctgtggtgaagaatgtctacgacgaggtggatggacactttgtcgatccgaagtcgggtgagaagctaaactttgccgaagccttaaacacgaatttactggacgagcatagtgtgcagatcagagacttcaagactggtctgtacaagcagctgaacctaacgcacgctaaagacaccggcattattgatgcccaaaattccaaactactgtataacaaccagacaatgacccttaagcacgcctttgatattggaatcctaatggatgtcaatgcgcccatcagcattcagcgagcaattcatcagggactattcgacgacaagaccggaaagctaagcgatcccagaactggtcgccagattacattacttgaaagcatgaggagtttcgttgttaatcctcacctgccctgttacttcgatgagcagaccgaacagatgtatactctgagcgagacctgtagaaatggcatcatcaatagaagggagggtgttttccgggagccgggaagcaattcgtttgttcctctgggcgaggccctaagcctgggtctcattgtggacattgagaatgccggttttggtttgtacgaactattgtcgatgggcttctatgaaacttccacacgtaaggttctgcatccagtcacaaatcgcaagcttaatctcaacgaagcttgcgtggaggatgtagttagcctatcatccagcttagtcaaacaccacgagaccggcaagtaccttcggcttgccaatgctattaaggagcagttagttgatgactctagaggttgttacaatctgggcaacgaacagttggatctccaggcggctagggccaggggtttaattgtttccaatcgtcgcctcctcagccttgaactcgtattgcgccaacaactttatcgccccgaaactggcaaattctgcgatccaacaacgggagaatatctagacctaatcgaagccatccattcgggtttcatagatcccgcgactaccgtatttaaaaaccagcttactggtaaggagttaccgctaacagaagctattgagaatggtgatattgatgtgtccaagggtagagtatttgatcccaagtctaagtcagcttataactacgacgtggcactctcgcgcggaatcctggtcaccattactcggccactaaccgatcgcaatgatgtggtacgtcgccaggatagcgttgaattactaaatcaaacacccgtgagtgttgtgattagcaaaccgcgtgaaatgtctctcgaagaggccattcgttacaacataatcgatcccaagaccgcgctcgttcgcgatttcgatagctttaagttcctgccttactcggtagccgtggaacgcggtctcgtggacaccaccaagcgcacactcgtggatccaaaggccctgtactttgccttcgatcccactttaatagtttacgtacgtgaaccggtcacctttgaccaggcggccgagtccaagtgtctggacttgcagaccggactgctgacctatgtgccagcaagtgtacctggatccgcaacagcggcaccagccagcgacgatagcgcaaacgattcgctgactgtcatcgagacgcccaaggtatacacgctcaaggaggccgccagtgccggtgtggtggatcccgactcggctctagtcaaggacttggccaaggctaagctggtccgtttgccagaggccttccgaaagggcctaatggatgccaacaaggcgaacgtgctcaacacccagacctcgaagctctgcaccctgcaagaggcctacgaaagtggcctgatctgcacgcctaagcgttcattcggtttgctagaagccatcacctttaacttgtacaacccaaccaatggctgcctagttgatcccttccaaatgcatccagatatcatccggcggcgcaagttcacgctggccgaggccattggctcaggtctggttgatccatcgtcgacagtggtgcgtgaccccagcactggagtcattgtcccactgacggctgccattagcagtggtctaatcgatgccaccgagggacgcctgaccgatgccaacgagccgaagaacaacatcgacctagtgaaggccgccgagaagggtctgctcctgccggcagaacagagggtaagtctcagaacactcgaggtgtactctttcaatttctatcaacaccgatctcgaaaacggaattgcgaatgcaagaaattactgaattattgcaagaaattacagcaaaattattctaattctaaattaaaagctttgttcgtggcatgtttggtattgtactatcgatattgatttcgatttttttttgagacattttgatcagcgcgctgtctttctatttctttctgtctatctctgtctctgccttaatctcaaattctatatcatcagactaaccaagatgtgagctttccacaatgaaaaaaaaataagaatcattctgcaaatttactttgcaaatcatatttattattattttgcaaatctcttatattgcagcgcatggcattcagttttatgttctatatatcgtatttttcgctgagatcgctttaagttctcaagcgacagcagccaaaaataatgcaatcaatcagagtcagcaagtacatcacagatcacatccaacagacatgcatccataaatatcgtactccatcgatcgcgctttatcaagccgaagagcaatgcgttatgtctcatactcctccgcataaatgacgtcggcaataggacaccatatgcaatactctatatactcaatattctatcgatttgtctataacactagcatacgaatcttttttcattcgaactcgcactcatctatttcttgttatttcttttccctatatccaattgtatcccaggcagtattttatgtaggatcagatcaatttttaactgactctaatatgcggttaaaaactgatctgactgagttagtgggattttccccgaaatatcccacaattcactagtctctatttagctcttagttttggagtaaggttacatatcctttttcagccccaatgcaatagcccaggctttagttattatttttgaaatcttgtttaaataccaattttctacctattttcagcaaccatatataaatattttttacatattatttcgtttgcagttttaatttgaaaaaataaacccaaaccacaattaacactaaccaatataaaaatccaacaaaacgaaaccaaaccaaaaacaaaaaaacaaaaccattaaaccgtagttagtgcatactaaaagtaaaacaactcgtagttgctagtccccagtagtgctcgttacccaaagtagtgaaccttggtgcttgtatgtctatattattgctttggtttatgttaactgcctatatacttcattgtatcttaatgcttgttataaaaccgctttgccctaagtctttgccttgcaatattttcaacaaacaaatgtgtttcttccagctatgtttgtgttttatatatattttgtgttccatttatctattgacacttatacgatatctatgaaatctctatatgaatccctttatagcgacccgtatcgagctaagaagtcatttcttttcttaccacttttctaataaattatttgctttgccctcccccacccataatatgtcacatatatagcaagcagtattcgagaagttcaacatgtgcgaagagaatgtcaacgatctgttgaaatgggttaccactgtggaacagaaaatctcaagtgtcggcggacctcgtgaaaagattgatgagttacgcaaccagattaatgcccttaaggttggtactattgatttatatacttgttacaaaattgaaaacaatgtattctttgtttaaatagcaaatcaaggatgagatcgagtctcagcaacggccagttgccacttgtttggagcaaatccgtcagatcgtgctcaccggtggtgatgttttgtctgcccccgaagtgaccactctggagaactctggccgggagttgcgttcgcgtgtggatcgtgtcaacgatcgcaccgtgcgtttgctccggcgcctggaagcaggtcgagatgagctcaccaaactgcgcagcgaattggatgtattctccgattggttgcaagtcgcccgacgcactttggaggacaaggaacgttccctgtccgatttgactcggctgccctctcaggccgattcggttcgtgagtttgtcagcgatgtgattgggcaccaggccgatctgcggttcatcacaatggccgcacagaagtttgtggacgagagcaaggagttcttggccatactgaacgacttccgtacttcactgcccgaacgcttgccacatgttgagccactgtccagtgccgagagtcccatacgccaagaggtatcgctggtctcggcacagtacaaggatctgttgaaccgtgtgaatgctctgcaagatcgcgtctccggtttgggtggacgccagcgtgagtaccaggatgcattggacaaggctaacgagtggctgaggagtgtacatccgcgtgtgtcgcgcattatctctgaaccgattgccggcgatcctaagggagtacaggatcagatgaacgaggccaaggctctacacaatgagctgctttctagtggtcgcttggtggacaatgcgcaacaggcacttgataatctgctgcgcagccttggtggccaactcagtcccatggagatcaatcagttggaactgcctattgccgatctgaagaacaactaccagcagcttctggataatcttggtgagcactgcaaaactctggacaaaactttggtgcaatcgcagggcgtacaggatgccttggacagtcttgtgggatgggttaaccaggccgaggataagttcaagatgaatctgcgacccgcctcgcttatcaaggagcgtctgcaggagcagatccgcgagcacaaggtcctgctagccgatcttcaatctcaccaggccagcatcgacagcgttcaagtttcggccaaacatctgcttgccagcgcatcgaatgcacgcattgccaagaaggtggaatcgaatctaaacgatgtgaccgtcaagtttgagaagctctacgagaaggccaacaaacgtggtgaattcttagatgacgtttacaaccgattaagccgctatctggatgaaatcagcaccgtggagcagcgtatggccagcttacaggaggctctagatagccgcgagacaagcctgctttcaactgaagagttggctcgccgcatgaacgaactgtcgcgtgacaaggaccaactggctccgcagtttgaggattgcgtgcgcagtggcaaggatctaattagcctgcgtgatgtcaccgatactggagttttgcgcgatcgcatcaaggcactggaatctcagtggcgcaacattaacatcagcatcgatgagcgcgccaagctgtccaagcaaaaggccgaacaacaactggcctacgagggactgaaggatcaggtcctctcctggctggccagcactgaagcgcgagttaacggccttccgccggtagcaatcgatctggacaggattaagcagcagcatgacgagctgaagcccatatgcaaggattaccgcgactatgcaccaactattgataaaattaacgatattggagcacagtacgatgcgctaatccgtccagagagtcctgcccgcaaacgctccacttatagtccgattaagcggaccagtccgttgcgccgcatgtccggagacgctagaagccccagccccaccaagggaggcatcctgtcgccactatcgactggttccagtggattcggtagccgcagatcctcccaggatggtttccagctgtctgagctatctccggtgcagcagcagctgagcgagatcaacaatcgctacgggctgattggcgtgcgtctcaatgaccgccaacacgagctggacaacctgaacgaggaacttcgcaagcagtacgagaatctgaagggactagctcagttcctggagcgcattcagcgccaattgcccaaggagtccgtatcaaacaaggatgaggccgagcgctgcattaagcaggcgcgcaagatcctcgaagacatgtacgagaagcagagtcttcttgacaccaccaaggctcaggtgaaggatatcctccgccgcaagtcagatgtgcccggtgccgaacaattgcgccaggagaacgatagcatccaagagaagtggaagaatctcaacgacatctgcaagaatcgcattgccttctccgagaagctgcgtgactttttggacacccatggaaatctgaagagctggctggacagtaaggaacgtatgttaaccgtgctgggacccatctcttccgatccccgtatggtccagagccaggtgcagcaggtgcaagtgcttcgcgaggaattccgcactcagcaaccacaactgaagcatttccaggagcttggacatgatgttgtcgaccatttggccggcacacccgatgctcaggcggtcgaaatcaaactgaaggacattctgggcaagtgggatgatctggttggaaagttagacgaccgggccaatagtttgggcggtgctgctgacagttccaaggagttcgatgctgctgtaaatcgcttgcgtgaggctctgcagaacataagcgataatctggatactttgcccacggatggcgatcaccaggagaatctccgcaaaatcgagaacctggagcgacagcttgagggtcaacgcccgctgttagccgatgtggaacaatccgccgccactctatgcaacattctgggtgatcccgcctcgcgcgctgatgtcaactctcgtgtcgcagctctggagaaacagtatttggcccttcagaagaaactggataccaagaaggcagaaacagaggcttcccttcgggatggccgccactttgccgagaattgctcaaagactcttggttggttgggcggagagctctccaacctgaccgacaggcttttggtctctgcacacaagccaacactgcagcaccagattgacacccatgagccgatctatcgtgaggtaatggcccgtgagcatgaggttattatgctaatcaacaagggcaaggatctaaccgatcgccagcaggatcgcggagttaaacgtgatttggatcgcatccagcagcagtgggagaaactgcgccgtgaagccgtcgatcgacacacacgactgcagacgtgcatggagcactgcaagaagtactcccaaacttcggagacattcctggcctggctgcgtaccgcggaggataagttggctgatcttacacccggcgtattgtcgaaggcaaagctggagacgcgtctgcgtgatctgcagaccttccgtagtgaggtttggaagcattccggtgaattcgaaaacaccaagggattgggagagacattcctcagcagctgcgacatcgataaggaacccattaaggcggaacttcaagacatccgcgatcgttgggagagactcaacaatgatctgattgcccgtgctcatgaaattgaaaactgctcgcgtcgtttggacgattttaatgatgagttgcgaaacctggatcattctttaggtcgttgcgaggatcgacttgctgcccacgatgctctcggtggagctgccaaggatcccaaacttttggagcgtgttaaggccatacgcgaagagctcactaacttgagcaagcctttgcagtcacttaaggctctggccaaggatatcagtgctgaggctagagctgctggcggagatgctgatcatttgaccagtgaagtcgatggcctggccgaccgcatgtccgagctacagggtcgcctggatgatcgctgcggagaactgcaatctgcagccaccgccgtatcccaattcaacgaacaaatgaagagtttgggcattgatctgaacgatctggagaccgagattgaaaagctttcaccgcccggtcgagaaatcaagattgtccaagtgcaaatcgacgatgttggcaagatccagaccaaattggatcgccttgtgggtcgtttggaggatgcagaacgtgccgctgatgttttggtagatgcaggattcgctgcagacaccacccagacccgtgagcaaatctccacgctgcgtaagacattgggtcgtttggacaacagagttcgcgatcacgaggataatcttcattccactttgaaagcacttcgcgaattctacgaccatcaatcgcaaactctggatgacattcaagacgtaagcgatgagttcaagcgcatgaagcccgttggctcggagttggatcagattcgccgccagcaagaggacttccgtaacttcagggagcgcaaggtggaaccactggccatcaatgtggacaaggtaaacgttgctggcagagacctagtgcgttcggctggcagtggtgtttctaccacggccattgagaaggatctggaaaagctaaacgaccgctggaacgatttgaaggagcgaatgaacgagcgcgatcgccgtttggatgtggctctgctgcaatctggaaagttccaggaggcgttggccggtttatccaagtggctcagcgacaccgaggagatggtggctaatcagaagccgcctagctccgattataaggtggtaaaggcacagcttcaggagcaaaagttcctcaagaaaatgcttttggatcgtcaaaactctatgggctctctagccaatctcggcaaggaagttgccaaccactgtgaacccggcgaacgtgcctccattgagaaacagttgaacgatttgatgaaacgctttgatgccctgaccgacggagccgagcaacgtgagttggatcttgaggaagccatggaagtggctaagcgattccatgacaagattagtcccttggaactttggctggacaacacggagcgatctgttaaggcaatggaactgatacctactgacgaagagaagatccagcagcgaatccgcgaacacgaccgtctacacgacgaaatcttgggaaagaagcccgacttttccgaccttgccgatgtcaccgcccagctgatgcatttggttagcgacgaggaagccgttaatctgggcgagaaggtgcgcggtgtgacagagcggtacacaggattggtggatgccagcgacaacattggggctctgctagccgaatcacgccagggattgcgtcacttggtcttgagctatcaggatctggtggcctggatggaaagtatggaagccgagttgaagcgctttaagtccgttcccgtttacgctgaaaagctgctggaacagatggatcatctgttggagctaaacgagaacattgccggtcacgcttcgaatgtggaatctactgtggaatccggagccgagctgatgaagcacatttccaacgatgaagctatccaactgaaggacaagttagactccctgcaacgtcgctatggcgatttgaccaaccgtggtggagatctgctgaagagtgcacagaatgcactaccattggtgcagcaattccatgaagctcacaaccgtttagtggaatggatgcaaagtgctgaagctgctcttgctcccagcgagccacgtcaagctgatgtgcttcggctggagggtgaattggctgatatgcgtcctattctggacagtatcaatcaagtgggaccccagctgtgtcagctttctccgggagaaggtgctgccaccattgagagcattgtgacccgggacaaccgtcgcttcgattccattgtggagcaaattcaacgcaaggcggagcgtctccacctgagcaaccagcgcgccaaggaagtgacaggtgacattgatgaactgcttgagtggttccgcgaaatggacaccactcttcgtgaagccgatctgcctgccatggagcccaagttggtgcgtgcccaattgcaggagcatcgttctatcaacgatgacatttccagccagaagggacgtgtacgagatgttactgcggcctccaagaaggtgctccgcgagtccccacagagcgagaacaccgccactcttcgtgagaaattggatgatctgaaggagatcgtcgacactgttgctcaattgtgcagcgagcgtctgggcatcctggaacaggctctgcccctgtctgaacatttcgccgattcccatcagggactcaccgcctggttggatgacatggagcagcagatttcgcgattgagcatgccggctttgcgtcctgaccagatcactctgcagcaggacaagaacgaacgtcttcttcaatccatagcggaacataaacctctgctagacaaactgaacaagactggtgaggctttgggtgcattggtggccgatgatgatggtgctaagatcaacgagattttggacacggacaatgcccgttatgccgcactccgcttggaactccgcgaacggcagcaggcgctcgagagtgctctgcaggaatccagccagttctccgataaactggagggcatgctgcgtgctctggccaacaccgtggatcaggtcaatcaattagatcccctgtccgctcttccgcagaagatacgtgagcagatcgaggataatgatgctttgatggacgatctggacaagcgacaggatgccttcagtgctgtgcagcgtgcggccaacgatgttatcgctaaggctggcaacaaagctgatccagctgtgcgtgacattaaggccaagctggagaagctgaacaatctctggaacgatgtacagaatgccaccaagaagcgcggcagctcgttggacgacatcctaagcgtagccgaacccttctggaagcaactgaacagcgtaatgaagaccctaaaggatctagaggaaacactatcttgccaggagccaccagcggcccagcctcaggacattaagaaacaacaggtggcgctgcaggaaatccgccatgagatcgaccagaccaaaccagaggtcgagcaggtgcgacgtcacggaagcaacctgatgaacatgtgcggcgagcccgacaagccagaggtcaagaaacacatcgaggacttggacaacgcatgggacaacatcacggcgctgtatgccaagcgcgaggagaacctcatcgatgccatggagaaggccatggagttccacgagacactgcagaacctcctcaagttcttgaccaaggccgaggacaagtttgcccatctgggagctgtgggttcggacattgatgccgtcaagcgacagattgaacaactcaagtcgttcaaggatgaagtcgatccgcatatggttgaagtagaagcattaaacaggtaaggccttctatatatatttatatatatatattcttattcaatcgaatctattcaaatttaaaaatctaatgttccattgccgtggtgtctatctcaacttgtgaattggcagaggtctcaaaaggcaagatagtttcaaaaaagtctagttcgttcgtgcgttgttgttgtgaatattgattacatttaagtgcttgcaactgcaatgatttaagatctccggtatctttgaacaaagttgagccgagcatgttttttgattgccacagtttatccagttgcatgcaatttcaaaatgaaaacaaaaaacacttgccatttattgtttttgcgcttgcttatgttacactgcagtttttgtaaattcttcggctaattgttaattgaatcttacagacaagctgtggaactgacggaacgcacttcacccgagcaagcggcatcgattcgcgaacccctgtcggtggtcaatcgccgctgggaggccctactccgtggcatggtcgagcgccagaagcaactggagcacgctctgctgcacttgggtcaattccagcatgctctcaacgagctgctggtatggatcaacaagaccgacagcacactggaccaactgaagccggtacgtagatatatatttcatgcttgagagaaacccaaatcattttccattatgtaaacttttagattcctggagatccgcaactgctagaggttgaattggccaagctaaaggtgctggccaacgacattcaggcccaccagaactcagtggacacactgaacgatgcgggccgacagttgattgaaaccgagaagggatctgtggaggcgtctactacccaggagaagctgcgcaaactgaacaacgagtggaagcagcttctgcaaaaggccagcgaccgtcagcatgaactggaggaggctctacgtgaagctcacggatatattgccgaggtccaggatattctgggatggctgggcgatgtagacgcagtgattggagctagcaagcctgtgggcggacttcccgagactgctactgagcaactggaacgtttcatggaggtgtacaacgagctggatgaaaacagacccaaggtggagacgattcaggcccagggccaggagtacatcaagcgtcagaaccaaatgaaggtctcgtccagcaacttacagcatacactccgcacgctgaagcaacgttgggatgccgtggtatcccgtgcatccgacaagaagattaagttggaaattgcactcaaggaagccaccgagttccatgacacactgcaagcctttgttgaatggctgacccaggccgaaaagctgttgtccaatgctgaacccgtctcacgcgttctggaaaccattcaggcccagatggaggagcacaaggtgctgcagaaggatgtgagcactcatcgcgaagccatgctgctgctggacaagaagggaactcaccttaagtacttcagccagaagcaggacgtgatcttgattaagaacctgctcgtgtcggtgcaacatcgttgggaacgagtggttagcaaggctgcggaacgcactcgtgctctggaccatggctacaaagaggctcgcgagttcaacgacgcctggagtggcatgatgcagtatctgcaggaaaccgaacaagtgctggatcaaattatcgaggaagccacagcgtccaaggaaccacaaaagatcaagaagtacattggcaagctgaaagagacgcatcgtcaactgggcgccaagcaatcggtctacgacggaaccatgcgcaccggaaagaatcttttggagcgagctcccaagggcgatcgccctgtgttggacaaaatgctgatcgaactgaaggaacaatggactcgagtgtggtccaagagcatcgatcgccagcgcaagctggaggaggctttgcttctttctggacagttcagcgatgctctgggtgagcttcttgactggttgaagaaggctaagagccgcctgaacgaaaatggaccagtccacggagatttggagacggttcaaggtctatgcgagcaccacaagcacattgagcaggatctgcagaagcgcgctgcgcaaatgcaaggagtgctcaagactggacgcgacctggagcgatctggaaacaatcccgaagttggacgtcagctcgatgagatgcagtccatttgggaggaggtcaagagtgccgtcgccaaacgcggcgagcgtctccaggtggcccttgttgatgccgagaagcttaatgcccgtgtccaggctctctttgattggctggatcatgccgagcacaagctacgatatgccaagaatgcccctgatgacgagaaggtgtcccgtgaaatgatggacatccacatggacttcatgaaggacctgcgagtgcgcgagcgtgaaaagaccgagacttttgagtacgccgaggacattatcaacaaggcctatcccgatgccattccgatcatcaagaactggctttcgattatccagcagcgttgggaggaggtgcgccaatgggccatcaatcgtgagtcgaagctggagcagcatctgcagtcgctcaaggatttggacgacaccattgaggagctgttggcttggctcagcggactcgagggcaccttgttgagtaagtattgattattaaattatttgagatagattttaattgacgttctctgcagacctgaagcacgaacagctgccggacgagattccacccgtggagaaattgatcgaggaccacaaggagttcatggaaaacactgctcgccgtcaaaacgaagtggaccgcgcatgcaaaccaagacagttgccaccaggagcgcgcaagccgtcgcgcagcggcaagacgccagtgtgagtagaataatagattcgcaagtagctgccgaaactgtagctctgctgtacatatccttggtatattattattattttgtatatttattttttccaatttctttttgtatactttcttttgtatccaccaccttattgctacaatattccaaacaaaaaccaaaaaacccccgcaacgtcttgcacacctatctctctgcctatccaaaaaccacaccaaccaatgaaccaactacctaccgaccaacagtcgtggctccagtcacgatctgcgtgagcagtcacccgacggcaccctgaggcgtcaaaggtttggccgcaagtttatactgtaatgcttgctactcgtttcatccacttgccaagtggcaaatgtgcttactcaccatctaatcacgaatggagttagtgattgcctaacatctgatataccgaaaccataccaagatacttgtttaaatccccaaagtagcgctaaaatacgtagctgctaacgcacaattcataccaaccgagcactcgtcaaaataaaaaaaaaaacaccctgcttaatcactgccgcttaacctattgcttgtttaatccgatacctaagtataattttgtaactaacgatatatattctcttttttcacagctttaagggatctcgtgaccagggactcaatgcccgcaagggaaggtgagttctcgttgggcttgtattattttttttgtaattcaagaatagatagattccgcatgtacttcgaaattctcaaatcgaatttgttttgttttcaacttttcaactacttttggaaatgctgcgtctacaactattcgaaatatttgtatatttaaatttgtaatatccatgtattatctatgttaatgtgttttgcgtattttgttcgttactgtaccattttgttttgtctctttttgattctactttcatcttgtctacacactacgctactacgtaaacgttgctcataccgctcgaatatcaaatatcaaaactttgcatcttgccgctttatttgcctatgtctatgtcaaaaaccaaaatctctgagcagtcgtatcacgcccacacgtgacacgcccgacagagatcgcctgccgcactatggcccccgattctcgccaaggtaagtccttgaaatcctccaaaatcatccatatcatctcaagctgtgcatgtccagtacaattgtttgtatttagtttggttcatgatgttcaccgggtttgaagaacttctaattaacagaaatatcacattttaatatagcacctcgggaccggaactggaattccgttcgccacgcgcgaagcttctgtggaccaagtggcgcgatgtctggatgctctcatgggagcgccagcggctgcttaacgatcatcttctgtatctgaaggatgtggagcgtgcccgcaacttcagctgggacgattggcgcaagcgcgtaagtatttttaactaacagtacttcactaagaatatgatttttaatatttctatccattcatagttcctcaagtacatgaaccacaagaagtcgcgcttgacggatctgttccggaaaatggataaggataacaatggcatgattccgcgcgatgtcttcatcgatggcatactcaatacgagtaagttcctccgatgcttatccttctatactaaactatattaacaacaaatataatttccttagaattcgatacatctggcttggaaatgaaggctgtagccgatttgttcgatcgcaatggcgaaggcctcatcgactggcaagagttcattgctgcccttcgtcccgattggcaagagcgtaagccagccaatgattcggacaaaatacacgatgaggtcaaacgtctggtcatgctgtgtacctgccgacagaagttccgtgtgttccaagttggcgagggcaagtacagagtaagtagcaagagtagtgtgtcacctggtcggcagttactaatgtgtaaaataacttatttcagtttggagactcccagaaactgcgcctcgttcgtatccttcgcagcactgttatggtgcgcgtgggtggcggttgggttgccctggatgaattcctgcagaagaacgatccttgtcgcggtaagtggtccatctatccatccgagtttagtcaaaacaccctatttagttgtgttgcgtacacacaatctcgaaatttgttggatttcatccattccacatccataccagccacataaattccatacatatatctaaaataataatctagcgtaatctagtagttcacatttttaatattccacccaaatcatgcattttgtctatacccagatactgtgcatcgtttgctcatatcatttaaatgcattcatatcacatctaggtacagttgtgcttaacaactaattatactataatgccaaataataataataataatattaccaaacggatatggtcatttaaccaaccaacaaacaaccaaccaacaataaactactgtgcctaaaataactagtcaatgaacccggaatataaaaagagaaacctttgttaaaacctcatcattaattcaggtccaaaagttgcctaaacaagctaaaatgatattaacagtgtgccttagggcgaattttacctttaattgccattcagccagcgccaaaagccacatcatatacacaattacccagcaaccaaaaccaattaaatataaaactgaccaatctagccaagggttgtaccatctactctactcatgctcatttttgtcgcttctatctaactgcgtaccaactagctgctataagaccatgaaaacacacacaaacgctcaccaaaaatatcccgccaattgtaggttcttctatttcctattagttagtgttattaaccaggtttctccacccaattcttagtcgtagttacattaaccctttgtttttaaccattagttgagaatgatattttgttaatcctatcctgctttcaaactaacatcctgctttatttgtttaacagtctagcatgctctgttaactaacagggtttgtgcacactgtacttcatgtcacccattttatgtttgaatcctcatcaatttcgttgtacgtcctgtatttaaattaaaattgttgtattaatttgtgttatttgtttttcgttttttactaatcaaactttatgtttacccctttttctttttttccaaaatggttttctttattataccgaaaatcgattgaatcttgataaaccgaacccgataaatatacatatatgtatactctacgcttgcgctgcccgctcgccacgcccacgaccacgcccgacatgcacccgcctgtgcccacaccaaatactaaacaacaaaaaaacaaaaatgttgtaaaacacaccatactgaaaacaaactgtgacaaatactttgcggtaacgaactttcgttgttattgttgttgtttatatgttcgccctacaacaaaacattgcctatccgtgtaaatgtgttatatgtgggtgcatctgccatgccaatgcgtacaaatgcgtatataaatgcatctgtgcatctgccactgcaactgcaatcgctaccaaaaccaatgccactgttatccgggagcagccaaaggacgcactaacatagagctacgcgagcaattcatattggccgatggcgtctcgcagagcatggccgcattcacgcccagacgttccacgccaaatgcggccgccactgcctcctcctcaccccatgcccacaatggcggcagctccaacttgcccccatatatgagtggacagggtcccatcatcaaggtaaatcaatcagcaaattgaatctgcaacggaaagtaaaggggagcctaagtgtcacaccgaatccatttccatcgtttttgtcgccaatcggaattaacttcttttgaagaacttaatacccaattatctactcttaaatattctttacttaaaaaccctcaaaattctaaactttggtcaaatcaatatgatatgtatattcacttaaaatcatttcaactaacctattatatttctgtttgctttaaacattttaactttctttaaatttaactataatatccaaaaagtattttaaaaagaggttctagctttatagaagaacaaatattctattatttctgaaaatgacaaatttaaacgaaattgagaaatgagaagaggtgccaaagtgttaagtggttaacgtcaaagggttaaacccttgctcaaatcccgatcccaatccatttacccatccaaacatatttccatccagcgagggcacaaggtaagtgctcctttcgtccttttttttgggttcgttgtgtgtgttgttgacaaagaaaagctattgctgctgcgccgccgactcttaaaatataatttctatatatctgcatgagaaccgaatacttggtaacaatgtgttcacattttttttgtatttgtatttgattaagtaattgcgacattttttagttaatgctagagcatacatatagtacaccccacactattcattgatgaggctatgaggtttttaggccaggttaggttgttgtccacggcttaaatgatcataaaccgtttgccaaatgaaatgcgttaattcattgttggttaaacatatcgaaattatatccttagccgacgaacacttggccgaactaatgccaatatttgagaaaatccgcgctcaagaccaggttccatgcgcctttcccattcacatgggtgccggcggcacggtattcgtccgttgcaataccagccgttcggtgccgctgagtccacacgtgctgcattgtcatccaacaacacactgggtaagttcgcaggcagcaggagcagaagacgccgaagctgctccagcaggagtgcccgatattggtttcatctttcacgggagagggggtgctaaacctacatgaatgatcccacattataatatttgtttatttatttttctgtaaaggtacgcgagcgctccgtccgctcgattcccatgtcacgaccgtcgcgctcctcactttcggccagcactcccgactccctgagcgacaacgagggtagccatggaggaccttccggccggtacacaccacgcaaggtcacctacacgagcacgcgcacgggtctcacgccaggaggctctcgtgccggctccaagcccaactcgcgcccgctcagcagacagggatcaaagccgccatcgcgacatggctccacgctgtcgctagatagcacgggttagtagcaagcaaatgagctcgtttgcagatctttggctgactggcatgtacttcctatttttgtagacgatcacacgccctcacgcattccgcaacgcaagccttcaacgggcagcacagccagcggtaccactccgcgtccggcgcgactttcggtgaccaccaccacgactcccggcagtcgtctcaatggcaccagcaccattacccgcaaaaccgcctccggatcggctagtccggcgcccacaaggtagggattttattattaaggcatctcatcgaatcaaatcgaaaatagcggggaaagtgggtgggatcaaacactattaattattcaaactcttattaatttattatttttattttcacactattttcggtttaccgcattaactattgaccactcacacaaaacaatcaacatcatgaaacgctaacttacaactgcaattggcatttgaaccatttgaaatttgcttgaacgcaactaaaaaaatgcaactaaaactcgtgcctgacaccaccgcccctcccaaaacaaacaaaaaaaaaaatatcaaaaaatgaaacagcaacggaggcatgagtagatcatccagtataccagcactaacaggcttcggcttcaaaccaattaggtaatacagccacgaacggcatagaacacgtaacataaatacatactcataagtttaggctagatttaagatcgatcatgtatcttaggcagcggttatggtttatctttgctaactatcgttgtacttactacctcccccaacataccaaaaagccggccatcacggataccgattaagataccctcattcgattccaagtcaacatcgcccagctcgactacgaatccaaccagcttggggtaaagttgataagcttacaacaaagacatttactagtcaatttcaactcagtctatagcaagtaattattatttgatacccgtctaaagttattgttaagtttcctcgtttgttcaaccttttccgcgcatgtgtatgttgatgtgcatgtccatgccacaaaaagaaaaaaaaaacagaataacaagcaaaaaatgctttcgactaatgcttaagttcgattaccagattacaatacatatttttgttatttttatgtgttatattgttgtgatcaactattgaaagaacagtcactaatcctgatacttttcgatcccaggcgaaacatcagcggtagctcaacgccctccgggatgcaaacgccgcgaaagagctcagcggagcccacattcagctccacaatgagacgcacttcgcggggaaccacaccgacggagaagcgtgagccattccggctataggaagccaccgttatggctgaggacgacgacgatagagaagcaaaagaatgccaatatttaaaccacatacaaaacactcaactctacgtactaactacgcactgaagttctaaactaaaccccccaaaaaccactccccaaactaatcgaggctacattagcaatgaatgtagcagcaggaacagcacacagttctacaaaagagactaactttgaagtgccctaatggattggtggagcgaaacaatttatagatgtttatactatatatattttgtaaaagacacagttaagatgaaagttatgcagacatatagctagcacacaaagttgatcagacaagcaacctacttacgagtactactactactaatactaccttttgctactactaatttgtaatgcccactacctttattcactagttatacacgtttccaaaattatgatttgtatatacttataaagcgaaaagcaagcgtaaattaatgaaaaatacactccaagtgctctacggcaattaaacaaacaaaaacaaaaaaaatacaaacaaaaacacataaaaaatatcgaaaaacttaagtgaaaaaaataaaacattcgaatgaaatgccgcggtctctgctgcaaaccatcttgagtctcagttctccactggaatcgccagtccggtggaattctagccaggagtggcacgtggcagaggcggaacggccaaaaaaataataactaaacccgttaaagagataaaatttgattttgttctgttattaaactaataggaaagtgaaaattgtaagccgcataaagaaaatatttaattatatactaaaagtcattactataagtttaattaatatttaactgttaagcgacaaacacacacacacacacagattttgtattgcataattattatgttttttatatgcaatatatcagcgaatgaattacgatgcagatgcagaagggcgaaagaaatcgaacccgtttctataaatactgtaaaatactaatactaaattattttgttgtacgaaacgaaagaaatgcattaaaactcgtgttttgtaattctatttaattaaaacaattcaaatgcgaaataaacatttacaaaaaaaaaaaataacaacataacccgacgactttttactttaatacccggcgataagaaataaaacccatgattctgttgattttcgaatttgatttattcattgaagttctcaatcgtagtagttatttgacacattgaaattgaattttcgatataataccatgatcgatccgtgcggatcactatttggttttctacaaaacactcaattaattgtgatatttaaatatgtgtgcatgcatgctaatgcagatgccctgtatcggggttactcctcctcctcctcctccttctacgttccctctattctgaccaccatttactgactagaaatgccgcttcaactttaatcatccaactaactcaagtacaagctgggttcatacgtttctttgtgctatgggctgccagagggggtttcatttcgactaaactttgaagtgcagttgcagattatgcgtaagtggatatcaataccgtctcctcctcgttcgtcccgatgctgtggtgtaatctcgtcaacgccagcgctgccagttggtgctcctaaatacatgctgctgctctacgcgctagctttcaaaggccctaataatatcggcttggcatgatgccgcaagtcttttgtaaattattataaatatcattatagttaaggtacaactaaatatcatcattaatatagtccaaattagctaacacggctcgctaaagctaactaaacataaatacataaatacatatatacgaacgtacgaacacaaacaaagtcacagaagtgcgcctcataaaactaaacctgggccgtttgggttggtgcttcattgtgtattagcagcatggcaacgcaatgggtatccggatccccatttctaccggaagccatcgtcacctggcaagcccggaactggctgactgggccttcgcctgcttgctattcgtgttgaccgcattcgatgtggagccacctgcgttggctggagctgcagccgcattctgctccccccgt

SEQ ID NO: 28274 - DNA, 18011 bp, DROSOPHILA
agtcaaatttgaaccgcgataccgagcggttgggcgtttatctgctagaacttcgttcccttaccagtgactgtgtgtgtgcgtgcgttgcgtccgtatatgaatgcatatatgtgtgtgtatagtgtggcaacaacaatttgttaacgcacacacttacgcgcagttaacgaacgcaacttggccctttaaaagtccatccaaccgagagcaataaaaataaaaatcacaaagtgccatcgcaaaacaaacataaactccaaaacgtgctaaaaatcgtaaaaaaaagatcgacagcgaaaaagaatttgcggcgaaagttgaggagtgtgttgttcatcacccaaagtgtttcgagtgtatccgagtcttttaatgtgccacccgcaagatgacatcgcattcctactataaagaccgcctgggcttcgatcccaatgagcagcagccgggcagcaacaactccatgaaacgaagcagctcccgccagacgacgcaccatcatcagagctaccatcatgccaccaccagtagcagtcagtcaccggcaagaatttccgtttcgccgggtggcaacaatggaacgctggagtaccagcaggtccagcgggagcagcgggatcgggagctgtacagcaacaacggcagtcttcaccaccaccaacatcatcatcatcatcatcgccactcgacgacgggcagtgcatcatcgccgctgtacgagaacagcagcagtccggctgctcccaaaaaggccaagcactcgtccacccaggcgcagccgcagggtggctacgaggatgcactcactcagtttaaagacgaacgcgatgccattcagaagaagactttcacaaaatgggttaacaaacatctgaaaaaggccaatcgtcgtgtggtggacttgttcgaagatctgcgcgatggtcacaatttactttcactcctggaggtgctatctggcgaacacctgccacgcgagaagggtaaaatgcgtttccatatgctgcagaatgcacaaatggctctggactttttgcgctacaagaagatcaaactggtcaacatacgcgccgaggatattgtggatggcaatccaaagttaaccctgggcctgatctggaccatcatattgcacttccagatctccgatattgttgtgggcaaagaggacaacgtatccgctcgggaggctctgctgcgctgggcacgtcgctccactgctcggtatccgggcgtacgtgtcaacgactttacgtcgtcgtggcgagatggattggctttctcggcgttggtgcaccgcaaccgaccggacttgcttgactggcgaaaggcaaggaacgatcggccacgggagcgcctggagacggccttccacattgtggagaaggagtacggagttacgcgtctgttggatcctgaggatgtggataccaacgagccggatgagaagtcccttatcacgtacatttcatcgctgtacgatgtgttcccggagccaccctctatccatccactctttgacatggagtcacaacgtcgcgttcatgaataccgcgacctggcccaacagttcatctactggtgccgcgagaagaccgcctacctgcaggagcgttccttcccgcccacgctaattgagatgaagcgtctgttgagcgatctgcagcgtttccgcagcgacgaggtaagcgcccgcaagcgcgagaaatccaagctcatccagatctacaaggagctggagcgctacttcgaaacagtgggtgaagtcgacgtagaggctgaactgcggccggatgccatcgagaaggcctggtatcgcatgaacacggcgctgcaggatcgcgaggttatccttcagcaggaaattgagcgactagaacggctgcaacgactggccgataaggttcagcgcgagatcaagcatgtagatcagaagcttaccgatcttgagggccgaattggcgaggaaggtcgccgcatcgagcgactacatcccgtggacgctaagagcattgtcgaggcgcttgaaaccgagatccggcacctggaggaacccatccaggacatgaaccaggactgccacgtgctcaacgagggtcgctatcctcatgtcagtgagctgcacaagaaggtcaacaaattgcaccagcgttgggctcaactgcgcaccaatttccacacgaacctggtacagaagctgtccggtttgaagtatcccgtccacgagaccacggtgacgcgtcaaacgcgcatggtggtcgagtcccgtcagatcgacacgaatccccatttccgcgatctgcaggagcacattgagtggtgccaaaacaagttgaaacaattgcttgccgctgactatggcagtgacctgccgtcggtcaaggaggaactggatcgccaacagcacgagcacaagatcattgatcagttccacacgaaaatactcaacgacgaacgtcagcagaccaagttctctggagatgagctggctttgtaccaacagcgtctcaatcagctgcagaaggtgtatgccgagttgcttagcacctcgacgaagcgtctgtccgatttggattcgctgcagcacttcctgggacaggcctcggcggaactgcaatggcttaacgaaaaggagcaggtggagattacgcgcgactgggcggacaaacaactcgatcttccctccgtgcacagatactacgagaaccttatgtccgaactggagaagcgtgagatgcactttgccaccatcctggatcgtggagaggcactgctgaaccagcagcatccggcctccaagtgcatcgaagcccatctgacagccctgcaacagcaatgggcgtggctgctgcagctaacactctgcttggaggttcatttgaaacacgccacggagtaccatcagttctttggcgagatcaaggatgccgagcagtggctggccaagcgtgacgaaatactcaacagcaagttctcacagtcagactttggcttggaccagggtgaaactctactcaggggaatgcaggatttgcgcgaggaactgaatgcctttggcgagacagtggccacactgcagcgaagagcccagacagtggtgcctctaaacaagcgacgacagccggtaaatcgacaaggacccgtgcaggccatttgtgcctacaaacaacagggtcaactgcagatcgaaaagggcgagactgttacgctgctggacaactcgggacgtgtgaagtggcgcgtgcgcactgctaaggggcaggaaggacccataccgggcgcttgcctgctattgccacctcctgaccaggaggctatcgatgccgccgaacgtctgaagcgtctgttcgatcgatcagtagctctttggcagaagaagcatctgcgactgcgccagaacatgatcttcgccaccattcgtgtggttaagggctgggactttgaccagttcttggccatgggtcctgagcagcgcacggccatccggcgtgccctcaacgacgatgccgacaaattgctgagcgagggtgatccaaacgatccgcagctgcgacgcctgcgccgtgaaatggacgaggtcaatcgcttgttcgatgagttcgagaagcgtgcgcgcgccgaagaggagagcaaacaggccagtcgcatcttcaccgaggaatgccttgccatcaagagcaaactggaggacatggcccgtgagctggatcagattatactggctccgttgccacgtgatttggactctttggagcatgtgctggaaattcattcggactacgagcgcaggttgcacctgttggagcctgagttgaaacacctgcaggaaacattccgcacgattgcgttgaagacgccagtgctgaagaagagcctggacaatctaatggagctgtggaaggagctgaacactcaaagtggcctgcacaaggaccgtctgaagttgcttgaggcttcgctggctggtctggaggacaatgagcatgtgatttccgaactcgagaacgagctggccaggcaccaggatctgccatcgaccgctgagggcctgcagcaagtgtttaagcaactgaaccacatgcaggacatcattacacaacagcagccgcaaatggataagatgaacgatgcggccgatcagctgggacgcatgggagtgcccaccaaggtgctcggcgacctcaagagactgcactcgaacgtggagcgcctgaacacgcgctggagtgcggtgtgcaaccaattgggtgaaagaatgcgctcatgcgagacggctatcgggcttatgaagaatctccagtcgagcgtgcaagtggaggaatcatgggtggatggcaccacggagcgactgtctgccatgcccaccgccacttcggcatacgaactagataaactgctcggagctgcaatcgaacgaaaaccaaaaatcgaaaatgtcaacgtggctggaggacgacttatacgcgaagctaagatctacgatagcaaatgcctacgcttcgtggactggctggtcgaggcccgtccgtcgttctcgccaccgcgccgggatctccggccggcggatagcgatccgggcgccacacagtattacagccaacgtttggacaacctgaacacgaagaacgacagattgctggaacaactgtcgcagcgtctgaaaacagcaatcgaagtcaatggcagcgatggtctgcaatacgctgagagtctacagaaaccgctcaagacctttagggttgacttcagtgcgggcagcgtgccaactggcgatggttacgctgcgcgccaggaggatctctacaccactacctacagcaccacacaaatcagctcaacgaagacaacgaaaagctctacgaagagcgtctatagtagcgatggcttggacgccgctagtcaggaggttagcactgctggcctgcctcaatcgcagatccaattcaacgaaatccgtacgctcaaacgctctcaacagctgggtggccattccgtgctggatatagccggaatacgcgatcctcgtacgggtcgcgttctaaccatcggtgaagccatccagcttcgcattctggacgtgcgcaccggcgagatgctagtgggtgatcgccgtatcacgctggaacaagctgccgaccaaggactgatcgatttgcaactggcaaagcaattgcttgagcctggtgccggccgagatgccagcggacgggagctgtcgctcctggaggttattcagcgcgagattagcgaagcggaatccggttacgagacggccgagaagcggatcaagcaagcagtattcgagaagttcaacatgtgcgaagagaatgtcaacgatctgttgaaatgggttaccactgtggaacagaaaatctcaagtgtcggcggacctcgtgaaaagattgatgagttacgcaaccagattaatgcccttaagcaaatcaaggatgagatcgagtctcagcaacggccagttgccacttgtttggagcaaatccgtcagatcgtgctcaccggtggtgatgttttgtctgcccccgaagtgaccactctggagaactctggccgggagttgcgttcgcgtgtggatcgtgtcaacgatcgcaccgtgcgtttgctccggcgcctggaagcaggtcgagatgagctcaccaaactgcgcagcgaattggatgtattctccgattggttgcaagtcgcccgacgcactttggaggacaaggaacgttccctgtccgatttgactcggctgccctctcaggccgattcggttcgtgagtttgtcagcgatgtgattgggcaccaggccgatctgcggttcatcacaatggccgcacagaagtttgtggacgagagcaaggagttcttggccatactgaacgacttccgtacttcactgcccgaacgcttgccacatgttgagccactgtccagtgccgagagtcccatacgccaagaggtatcgctggtctcggcacagtacaaggatctgttgaaccgtgtgaatgctctgcaagatcgcgtctccggtttgggtggacgccagcgtgagtaccaggatgcattggacaaggctaacgagtggctgaggagtgtacatccgcgtgtgtcgcgcattatctctgaaccgattgccggcgatcctaagggagtacaggatcagatgaacgaggccaaggctctacacaatgagctgctttctagtggtcgcttggtggacaatgcgcaacaggcacttgataatctgctgcgcagccttggtggccaactcagtcccatggagatcaatcagttggaactgcctattgccgatctgaagaacaactaccagcagcttctggataatcttggtgagcactgcaaaactctggacaaaactttggtgcaatcgcagggcgtacaggatgccttggacagtcttgtgggatgggttaaccaggccgaggataagttcaagatgaatctgcgacccgcctcgcttatcaaggagcgtctgcaggagcagatccgcgagcacaaggtcctgctagccgatcttcaatctcaccaggccagcatcgacagcgttcaagtttcggccaaacatctgcttgccagcgcatcgaatgcacgcattgccaagaaggtggaatcgaatctaaacgatgtgaccgtcaagtttgagaagctctacgagaaggccaacaaacgtggtgaattcttagatgacgtttacaaccgattaagccgctatctggatgaaatcagcaccgtggagcagcgtatggccagcttacaggaggctctagatagccgcgagacaagcctgctttcaactgaagagttggctcgccgcatgaacgaactgtcgcgtgacaaggaccaactggctccgcagtttgaggattgcgtgcgcagtggcaaggatctaattagcctgcgtgatgtcaccgatactggagttttgcgcgatcgcatcaaggcactggaatctcagtggcgcaacattaacatcagcatcgatgagcgcgccaagctgtccaagcaaaaggccgaacaacaactggcctacgagggactgaaggatcaggtcctctcctggctggccagcactgaagcgcgagttaacggccttccgccggtagcaatcgatctggacaggattaagcagcagcatgacgagctgaagcccatatgcaaggattaccgcgactatgcaccaactattgataaaattaacgatattggagcacagtacgatgcgctaatccgtccagagagtcctgcccgcaaacgctccacttatagtccgattaagcggaccagtccgttgcgccgcatgtccggagacgctagaagccccagccccaccaagggaggcatcctgtcgccactatcgactggttccagtggattcggtagccgcagatcctcccaggatggtttccagctgtctgagctatctccggtgcagcagcagctgagcgagatcaacaatcgctacgggctgattggcgtgcgtctcaatgaccgccaacacgagctggacaacctgaacgaggaacttcgcaagcagtacgagaatctgaagggactagctcagttcctggagcgcattcagcgccaattgcccaaggagtccgtatcaaacaaggatgaggccgagcgctgcattaagcaggcgcgcaagatcctcgaagacatgtacgagaagcagagtcttcttgacaccaccaaggctcaggtgaaggatatcctccgccgcaagtcagatgtgcccggtgccgaacaattgcgccaggagaacgatagcatccaagagaagtggaagaatctcaacgacatctgcaagaatcgcattgccttctccgagaagctgcgtgactttttggacacccatggaaatctgaagagctggctggacagtaaggaacgtatgttaaccgtgctgggacccatctcttccgatccccgtatggtccagagccaggtgcagcaggtgcaagtgcttcgcgaggaattccgcactcagcaaccacaactgaagcatttccaggagcttggacatgatgttgtcgaccatttggccggcacacccgatgctcaggcggtcgaaatcaaactgaaggacattctgggcaagtgggatgatctggttggaaagttagacgaccgggccaatagtttgggcggtgctgctgacagttccaaggagttcgatgctgctgtaaatcgcttgcgtgaggctctgcagaacataagcgataatctggatactttgcccacggatggcgatcaccaggagaatctccgcaaaatcgagaacctggagcgacagcttgagggtcaacgcccgctgttagccgatgtggaacaatccgccgccactctatgcaacattctgggtgatcccgcctcgcgcgctgatgtcaactctcgtgtcgcagctctggagaaacagtatttggcccttcagaagaaactggataccaagaaggcagaaacagaggcttcccttcgggatggccgccactttgccgagaattgctcaaagactcttggttggttgggcggagagctctccaacctgaccgacaggcttttggtctctgcacacaagccaacactgcagcaccagattgacacccatgagccgatctatcgtgaggtaatggcccgtgagcatgaggttattatgctaatcaacaagggcaaggatctaaccgatcgccagcaggatcgcggagttaaacgtgatttggatcgcatccagcagcagtgggagaaactgcgccgtgaagccgtcgatcgacacacacgactgcagacgtgcatggagcactgcaagaagtactcccaaacttcggagacattcctggcctggctgcgtaccgcggaggataagttggctgatcttacacccggcgtattgtcgaaggcaaagctggagacgcgtctgcgtgatctgcagaccttccgtagtgaggtttggaagcattccggtgaattcgaaaacaccaagggattgggagagacattcctcagcagctgcgacatcgataaggaacccattaaggcggaacttcaagacatccgcgatcgttgggagagactcaacaatgatctgattgcccgtgctcatgaaattgaaaactgctcgcgtcgtttggacgattttaatgatgagttgcgaaacctggatcattctttaggtcgttgcgaggatcgacttgctgcccacgatgctctcggtggagctgccaaggatcccaaacttttggagcgtgttaaggccatacgcgaagagctcactaacttgagcaagcctttgcagtcacttaaggctctggccaaggatatcagtgctgaggctagagctgctggcggagatgctgatcatttgaccagtgaagtcgatggcctggccgaccgcatgtccgagctacagggtcgcctggatgatcgctgcggagaactgcaatctgcagccaccgccgtatcccaattcaacgaacaaatgaagagtttgggcattgatctgaacgatctggagaccgagattgaaaagctttcaccgcccggtcgagaaatcaagattgtccaagtgcaaatcgacgatgttggcaagatccagaccaaattggatcgccttgtgggtcgtttggaggatgcagaacgtgccgctgatgttttggtagatgcaggattcgctgcagacaccacccagacccgtgagcaaatctccacgctgcgtaagacattgggtcgtttggacaacagagttcgcgatcacgaggataatcttcattccactttgaaagcacttcgcgaattctacgaccatcaatcgcaaactctggatgacattcaagacgtaagcgatgagttcaagcgcatgaagcccgttggctcggagttggatcagattcgccgccagcaagaggacttccgtaacttcagggagcgcaaggtggaaccactggccatcaatgtggacaaggtaaacgttgctggcagagacctagtgcgttcggctggcagtggtgtttctaccacggccattgagaaggatctggaaaagctaaacgaccgctggaacgatttgaaggagcgaatgaacgagcgcgatcgccgtttggatgtggctctgctgcaatctggaaagttccaggaggcgttggccggtttatccaagtggctcagcgacaccgaggagatggtggctaatcagaagccgcctagctccgattataaggtggtaaaggcacagcttcaggagcaaaagttcctcaagaaaatgcttttggatcgtcaaaactctatgggctctctagccaatctcggcaaggaagttgccaaccactgtgaacccggcgaacgtgcctccattgagaaacagttgaacgatttgatgaaacgctttgatgccctgaccgacggagccgagcaacgtgagttggatcttgaggaagccatggaagtggctaagcgattccatgacaagattagtcccttggaactttggctggacaacacggagcgatctgttaaggcaatggaactgatacctactgacgaagagaagatccagcagcgaatccgcgaacacgaccgtctacacgacgaaatcttgggaaagaagcccgacttttccgaccttgccgatgtcaccgcccagctgatgcatttggttagcgacgaggaagccgttaatctgggcgagaaggtgcgcggtgtgacagagcggtacacaggattggtggatgccagcgacaacattggggctctgctagccgaatcacgccagggattgcgtcacttggtcttgagctatcaggatctggtggcctggatggaaagtatggaagccgagttgaagcgctttaagtccgttcccgtttacgctgaaaagctgctggaacagatggatcatctgttggagctaaacgagaacattgccggtcacgcttcgaatgtggaatctactgtggaatccggagccgagctgatgaagcacatttccaacgatgaagctatccaactgaaggacaagttagactccctgcaacgtcgctatggcgatttgaccaaccgtggtggagatctgctgaagagtgcacagaatgcactaccattggtgcagcaattccatgaagctcacaaccgtttagtggaatggatgcaaagtgctgaagctgctcttgctcccagcgagccacgtcaagctgatgtgcttcggctggagggtgaattggctgatatgcgtcctattctggacagtatcaatcaagtgggaccccagctgtgtcagctttctccgggagaaggtgctgccaccattgagagcattgtgacccgggacaaccgtcgcttcgattccattgtggagcaaattcaacgcaaggcggagcgtctccacctgagcaaccagcgcgccaaggaagtgacaggtgacattgatgaactgcttgagtggttccgcgaaatggacaccactcttcgtgaagccgatctgcctgccatggagcccaagttggtgcgtgcccaattgcaggagcatcgttctatcaacgatgacatttccagccagaagggacgtgtacgagatgttactgcggcctccaagaaggtgctccgcgagtccccacagagcgagaacaccgccactcttcgtgagaaattggatgatctgaaggagatcgtcgacactgttgctcaattgtgcagcgagcgtctgggcatcctggaacaggctctgcccctgtctgaacatttcgccgattcccatcagggactcaccgcctggttggatgacatggagcagcagatttcgcgattgagcatgccggctttgcgtcctgaccagatcactctgcagcaggacaagaacgaacgtcttcttcaatccatagcggaacataaacctctgctagacaaactgaacaagactggtgaggctttgggtgcattggtggccgatgatgatggtgctaagatcaacgagattttggacacggacaatgcccgttatgccgcactccgcttggaactccgcgaacggcagcaggcgctcgagagtgctctgcaggaatccagccagttctccgataaactggagggcatgctgcgtgctctggccaacaccgtggatcaggtcaatcaattagatcccctgtccgctcttccgcagaagatacgtgagcagatcgaggataatgatgctttgatggacgatctggacaagcgacaggatgccttcagtgctgtgcagcgtgcggccaacgatgttatcgctaaggctggcaacaaagctgatccagctgtgcgtgacattaaggccaagctggagaagctgaacaatctctggaacgatgtacagaatgccaccaagaagcgcggcagctcgttggacgacatcctaagcgtagccgaacccttctggaagcaactgaacagcgtaatgaagaccctaaaggatctagaggaaacactatcttgccaggagccaccagcggcccagcctcaggacattaagaaacaacaggtggcgctgcaggaaatccgccatgagatcgaccagaccaaaccagaggtcgagcaggtgcgacgtcacggaagcaacctgatgaacatgtgcggcgagcccgacaagccagaggtcaagaaacacatcgaggacttggacaacgcatgggacaacatcacggcgctgtatgccaagcgcgaggagaacctcatcgatgccatggagaaggccatggagttccacgagacactgcagaacctcctcaagttcttgaccaaggccgaggacaagtttgcccatctgggagctgtgggttcggacattgatgccgtcaagcgacagattgaacaactcaagtcgttcaaggatgaagtcgatccgcatatggttgaagtagaagcattaaacagacaagctgtggaactgacggaacgcacttcacccgagcaagcggcatcgattcgcgaacccctgtcggtggtcaatcgccgctgggaggccctactccgtggcatggtcgagcgccagaagcaactggagcacgctctgctgcacttgggtcaattccagcatgctctcaacgagctgctggtatggatcaacaagaccgacagcacactggaccaactgaagccgattcctggagatccgcaactgctagaggttgaattggccaagctaaaggtgctggccaacgacattcaggcccaccagaactcagtggacacactgaacgatgcgggccgacagttgattgaaaccgagaagggatctgtggaggcgtctactacccaggagaagctgcgcaaactgaacaacgagtggaagcagcttctgcaaaaggccagcgaccgtcagcatgaactggaggaggctctacgtgaagctcacggatatattgccgaggtccaggatattctgggatggctgggcgatgtagacgcagtgattggagctagcaagcctgtgggcggacttcccgagactgctactgagcaactggaacgtttcatggaggtgtacaacgagctggatgaaaacagacccaaggtggagacgattcaggcccagggccaggagtacatcaagcgtcagaaccaaatgaaggtctcgtccagcaacttacagcatacactccgcacgctgaagcaacgttgggatgccgtggtatcccgtgcatccgacaagaagattaagttggaaattgcactcaaggaagccaccgagttccatgacacactgcaagcctttgttgaatggctgacccaggccgaaaagctgttgtccaatgctgaacccgtctcacgcgttctggaaaccattcaggcccagatggaggagcacaaggtgctgcagaaggatgtgagcactcatcgcgaagccatgctgctgctggacaagaagggaactcaccttaagtacttcagccagaagcaggacgtgatcttgattaagaacctgctcgtgtcggtgcaacatcgttgggaacgagtggttagcaaggctgcggaacgcactcgtgctctggaccatggctacaaagaggctcgcgagttcaacgacgcctggagtggcatgatgcagtatctgcaggaaaccgaacaagtgctggatcaaattatcgaggaagccacagcgtccaaggaaccacaaaagatcaagaagtacattggcaagctgaaagagacgcatcgtcaactgggcgccaagcaatcggtctacgacggaaccatgcgcaccggaaagaatcttttggagcgagctcccaagggcgatcgccctgtgttggacaaaatgctgatcgaactgaaggaacaatggactcgagtgtggtccaagagcatcgatcgccagcgcaagctggaggaggctttgcttctttctggacagttcagcgatgctctgggtgagcttcttgactggttgaagaaggctaagagccgcctgaacgaaaatggaccagtccacggagatttggagacggttcaaggtctatgcgagcaccacaagcacattgagcaggatctgcagaagcgcgctgcgcaaatgcaaggagtgctcaagactggacgcgacctggagcgatctggaaacaatcccgaagttggacgtcagctcgatgagatgcagtccatttgggaggaggtcaagagtgccgtcgccaaacgcggcgagcgtctccaggtggcccttgttgatgccgagaagcttaatgcccgtgtccaggctctctttgattggctggatcatgccgagcacaagctacgatatgccaagaatgcccctgatgacgagaaggtgtcccgtgaaatgatggacatccacatggacttcatgaaggacctgcgagtgcgcgagcgtgaaaagaccgagacttttgagtacgccgaggacattatcaacaaggcctatcccgatgccattccgatcatcaagaactggctttcgattatccagcagcgttgggaggaggtgcgccaatgggccatcaatcgtgagtcgaagctggagcagcatctgcagtcgctcaaggatttggacgacaccattgaggagctgttggcttggctcagcggactcgagggcaccttgttgaacctgaagcacgaacagctgccggacgagattccacccgtggagaaattgatcgaggaccacaaggagttcatggaaaacactgctcgccgtcaaaacgaagtggaccgcgcatgcaaaccaagacagttgccaccaggagcgcgcaagccgtcgcgcagcggcaagacgccagtctttaagggatctcgtgaccagggactcaatgcccgcaagggaagtcgtatcacgcccacacgtgacacgcccgacagagatcgcctgccgcactatggcccccgattctcgccaagcacctcgggaccggaactggaattccgttcgccacgcgcgaagcttctgtggaccaagtggcgcgatgtctggatgctctcatgggagcgccagcggctgcttaacgatcatcttctgtatctgaaggatgtggagcgtgcccgcaacttcagctgggacgattggcgcaagcgcttcctcaagtacatgaaccacaagaagtcgcgcttgacggatctgttccggaaaatggataaggataacaatggcatgattccgcgcgatgtcttcatcgatggcatactcaatacgaaattcgatacatctggcttggaaatgaaggctgtagccgatttgttcgatcgcaatggcgaaggcctcatcgactggcaagagttcattgctgcccttcgtcccgattggcaagagcgtaagccagccaatgattcggacaaaatacacgatgaggtcaaacgtctggtcatgctgtgtacctgccgacagaagttccgtgtgttccaagttggcgagggcaagtacagatttggagactcccagaaactgcgcctcgttcgtatccttcgcagcactgttatggtgcgcgtgggtggcggttgggttgccctggatgaattcctgcagaagaacgatccttgtcgcgccgacgaacacttggccgaactaatgccaatatttgagaaaatccgcgctcaagaccaggttccatgcgcctttcccattcacatgggtgccggcggcacggtattcgtccgttgcaataccagccgttcggtgccgctgagtccacacgtgctgcattgtcatccaacaacacactgggtacgcgagcgctccgtccgctcgattcccatgtcacgaccgtcgcgctcctcactttcggccagcactcccgactccctgagcgacaacgagggtagccatggaggaccttccggccggtacacaccacgcaaggtcacctacacgagcacgcgcacgggtctcacgccaggaggctctcgtgccggctccaagcccaactcgcgcccgctcagcagacagggatcaaagccgccatcgcgacatggctccacgctgtcgctagatagcacggacgatcacacgccctcacgcattccgcaacgcaagccttcaacgggcagcacagccagcggtaccactccgcgtccggcgcgactttcggtgaccaccaccacgactcccggcagtcgtctcaatggcaccagcaccattacccgcaaaaccgcctccggatcggctagtccggcgcccacaagcaacggaggcatgagtagatcatccagtataccagcactaacaggcttcggcttcaaaccaattaggcgaaacatcagcggtagctcaacgccctccgggatgcaaacgccgcgaaagagctcagcggagcccacattcagctccacaatgagacgcacttcgcggggaaccacaccgacggagaagcgtgagccattccggctataggaagccaccgttatggctgaggacgacgacgatagagaagcaaaagaatgccaatatttaaaccacatacaaaacactcaactctacgtactaactacgcactgaagttctaaactaaaccccccaaaaaccactccccaaactaatcgaggctacattagcaatgaatgtagcagcaggaacagcacacagttctacaaaagagactaactttgaagtgccctaatggattggtggagcgaaacaatttatagatgtttatactatatatattttgtaaaagacacagttaagatgaaagttatgcagacatatagctagcacacaaagttgatcagacaagcaacctacttacgagtactactactactaatactaccttttgctactactaatttgtaatgcccactacctttattcactagttatacacgtttccaaaattatgatttgtatatacttataaagcgaaaagcaagcgtaaattaatgaaaaatacactccaagtgctctacggcaattaaacaaacaaaaacaaaaaaaatacaaacaaaaacacataaaaaatatcgaaaaacttaagtgaaaaaaataaaacattcgaatgaaatgccgcggtctctgctgcaaaccatcttgagtctcagttctccactggaatcgccagtccggtggaattctagccaggagtggcacgtggcagaggcggaacggccaaaaaaataataactaaacccgttaaagagataaaatttgattttgttctgttattaaactaataggaaagtgaaaattgtaagccgcataaagaaaatatttaattatatactaaaagtcattactataagtttaattaatatttaactgttaagcgacaaacacacacacacacacagattttgtattgcataattattatgttttttatatgcaatatatcagcgaatgaattacgatgcagatgcagaagggcgaaagaaatcgaacccgtttctataaatactgtaaaatactaatactaaattattttgttgtacgaaacgaaagaaatgcattaaaactcgtgttttgtaattctatttaattaaaacaattcaaatgcgaaataaacatttacaaaaaaaaaaaa

SEQ ID NO: 28275 - protein, 5496 aa, DROSOPHILA
MTSHSYYKDRLGFDPNEQQPGSNNSMKRSSSRQTTHHHQSYHHATTSSSQSPARISVSPGGNNGTLEYQQVQREQRDRELYSNNGSLHHHQHHHHHHRHSTTGSASSPLYENSSSPAAPKKAKHSSTQAQPQGGYEDALTQFKDERDAIQKKTFTKWVNKHLKKANRRVVDLFEDLRDGHNLLSLLEVLSGEHLPREKGKMRFHMLQNAQMALDFLRYKKIKLVNIRAEDIVDGNPKLTLGLIWTIILHFQISDIVVGKEDNVSAREALLRWARRSTARYPGVRVNDFTSSWRDGLAFSALVHRNRPDLLDWRKARNDRPRERLETAFHIVEKEYGVTRLLDPEDVDTNEPDEKSLITYISSLYDVFPEPPSIHPLFDMESQRRVHEYRDLAQQFIYWCREKTAYLQERSFPPTLIEMKRLLSDLQRFRSDEVSARKREKSKLIQIYKELERYFETVGEVDVEAELRPDAIEKAWYRMNTALQDREVILQQEIERLERLQRLADKVQREIKHVDQKLTDLEGRIGEEGRRIERLHPVDAKSIVEALETEIRHLEEPIQDMNQDCHVLNEGRYPHVSELHKKVNKLHQRWAQLRTNFHTNLVQKLSGLKYPVHETTVTRQTRMVVESRQIDTNPHFRDLQEHIEWCQNKLKQLLAADYGSDLPSVKEELDRQQHEHKIIDQFHTKILNDERQQTKFSGDELALYQQRLNQLQKVYAELLSTSTKRLSDLDSLQHFLGQASAELQWLNEKEQVEITRDWADKQLDLPSVHRYYENLMSELEKREMHFATILDRGEALLNQQHPASKCIEAHLTALQQQWAWLLQLTLCLEVHLKHATEYHQFFGEIKDAEQWLAKRDEILNSKFSQSDFGLDQGETLLRGMQDLREELNAFGETVATLQRRAQTVVPLNKRRQPVNRQGPVQAICAYKQQGQLQIEKGETVTLLDNSGRVKWRVRTAKGQEGPIPGACLLLPPPDQEAIDAAERLKRLFDRSVALWQKKHLRLRQNMIFATIRVVKGWDFDQFLAMGPEQRTAIRRALNDDADKLLSEGDPNDPQLRRLRREMDEVNRLFDEFEKRARAEEESKQASRIFTEECLAIKSKLEDMARELDQIILAPLPRDLDSLEHVLEIHSDYERRLHLLEPELKHLQETFRTIALKTPVLKKSLDNLMELWKELNTQSGLHKDRLKLLEASLAGLEDNEHVISELENELARHQDLPSTAEGLQQVFKQLNHMQDIITQQQPQMDKMNDAADQLGRMGVPTKVLGDLKRLHSNVERLNTRWSAVCNQLGERMRSCETAIGLMKNLQSSVQVEESWVDGTTERLSAMPTATSAYELDKLLGAAIERKPKIENVNVAGGRLIREAKIYDSKCLRFVDWLVEARPSFSPPRRDLRPADSDPGATQYYSQRLDNLNTKNDRLLEQLSQRLKTAIEVNGSDGLQYAESLQKPLKTFRVDFSAGSVPTGDGYAARQEDLYTTTYSTTQISSTKTTKSSTKSVYSSDGLDAASQEVSTAGLPQSQIQFNEIRTLKRSQQLGGHSVLDIAGIRDPRTGRVLTIGEAIQLRILDVRTGEMLVGDRRITLEQAADQGLIDLQLAKQLLEPGAGRDASGRELSLLEVIQREISEAESGYETAEKRIKQAVFEKFNMCEENVNDLLKWVTTVEQKISSVGGPREKIDELRNQINALKQIKDEIESQQRPVATCLEQIRQIVLTGGDVLSAPEVTTLENSGRELRSRVDRVNDRTVRLLRRLEAGRDELTKLRSELDVFSDWLQVARRTLEDKERSLSDLTRLPSQADSVREFVSDVIGHQADLRFITMAAQKFVDESKEFLAILNDFRTSLPERLPHVEPLSSAESPIRQEVSLVSAQYKDLLNRVNALQDRVSGLGGRQREYQDALDKANEWLRSVHPRVSRIISEPIAGDPKGVQDQMNEAKALHNELLSSGRLVDNAQQALDNLLRSLGGQLSPMEINQLELPIADLKNNYQQLLDNLGEHCKTLDKTLVQSQGVQDALDSLVGWVNQAEDKFKMNLRPASLIKERLQEQIREHKVLLADLQSHQASIDSVQVSAKHLLASASNARIAKKVESNLNDVTVKFEKLYEKANKRGEFLDDVYNRLSRYLDEISTVEQRMASLQEALDSRETSLLSTEELARRMNELSRDKDQLAPQFEDCVRSGKDLISLRDVTDTGVLRDRIKALESQWRNINISIDERAKLSKQKAEQQLAYEGLKDQVLSWLASTEARVNGLPPVAIDLDRIKQQHDELKPICKDYRDYAPTIDKINDIGAQYDALIRPESPARKRSTYSPIKRTSPLRRMSGDARSPSPTKGGILSPLSTGSSGFGSRRSSQDGFQLSELSPVQQQLSEINNRYGLIGVRLNDRQHELDNLNEELRKQYENLKGLAQFLERIQRQLPKESVSNKDEAERCIKQARKILEDMYEKQSLLDTTKAQVKDILRRKSDVPGAEQLRQENDSIQEKWKNLNDICKNRIAFSEKLRDFLDTHGNLKSWLDSKERMLTVLGPISSDPRMVQSQVQQVQVLREEFRTQQPQLKHFQELGHDVVDHLAGTPDAQAVEIKLKDILGKWDDLVGKLDDRANSLGGAADSSKEFDAAVNRLREALQNISDNLDTLPTDGDHQENLRKIENLERQLEGQRPLLADVEQSAATLCNILGDPASRADVNSRVAALEKQYLALQKKLDTKKAETEASLRDGRHFAENCSKTLGWLGGELSNLTDRLLVSAHKPTLQHQIDTHEPIYREVMAREHEVIMLINKGKDLTDRQQDRGVKRDLDRIQQQWEKLRREAVDRHTRLQTCMEHCKKYSQTSETFLAWLRTAEDKLADLTPGVLSKAKLETRLRDLQTFRSEVWKHSGEFENTKGLGETFLSSCDIDKEPIKAELQDIRDRWERLNNDLIARAHEIENCSRRLDDFNDELRNLDHSLGRCEDRLAAHDALGGAAKDPKLLERVKAIREELTNLSKPLQSLKALAKDISAEARAAGGDADHLTSEVDGLADRMSELQGRLDDRCGELQSAATAVSQFNEQMKSLGIDLNDLETEIEKLSPPGREIKIVQVQIDDVGKIQTKLDRLVGRLEDAERAADVLVDAGFAADTTQTREQISTLRKTLGRLDNRVRDHEDNLHSTLKALREFYDHQSQTLDDIQDVSDEFKRMKPVGSELDQIRRQQEDFRNFRERKVEPLAINVDKVNVAGRDLVRSAGSGVSTTAIEKDLEKLNDRWNDLKERMNERDRRLDVALLQSGKFQEALAGLSKWLSDTEEMVANQKPPSSDYKVVKAQLQEQKFLKKMLLDRQNSMGSLANLGKEVANHCEPGERASIEKQLNDLMKRFDALTDGAEQRELDLEEAMEVAKRFHDKISPLELWLDNTERSVKAMELIPTDEEKIQQRIREHDRLHDEILGKKPDFSDLADVTAQLMHLVSDEEAVNLGEKVRGVTERYTGLVDASDNIGALLAESRQGLRHLVLSYQDLVAWMESMEAELKRFKSVPVYAEKLLEQMDHLLELNENIAGHASNVESTVESGAELMKHISNDEAIQLKDKLDSLQRRYGDLTNRGGDLLKSAQNALPLVQQFHEAHNRLVEWMQSAEAALAPSEPRQADVLRLEGELADMRPILDSINQVGPQLCQLSPGEGAATIESIVTRDNRRFDSIVEQIQRKAERLHLSNQRAKEVTGDIDELLEWFREMDTTLREADLPAMEPKLVRAQLQEHRSINDDISSQKGRVRDVTAASKKVLRESPQSENTATLREKLDDLKEIVDTVAQLCSERLGILEQALPLSEHFADSHQGLTAWLDDMEQQISRLSMPALRPDQITLQQDKNERLLQSIAEHKPLLDKLNKTGEALGALVADDDGAKINEILDTDNARYAALRLELRERQQALESALQESSQFSDKLEGMLRALANTVDQVNQLDPLSALPQKIREQIEDNDALMDDLDKRQDAFSAVQRAANDVIAKAGNKADPAVRDIKAKLEKLNNLWNDVQNATKKRGSSLDDILSVAEPFWKQLNSVMKTLKDLEETLSCQEPPAAQPQDIKKQQVALQEIRHEIDQTKPEVEQVRRHGSNLMNMCGEPDKPEVKKHIEDLDNAWDNITALYAKREENLIDAMEKAMEFHETLQNLLKFLTKAEDKFAHLGAVGSDIDAVKRQIEQLKSFKDEVDPHMVEVEALNRQAVELTERTSPEQAASIREPLSVVNRRWEALLRGMVERQKQLEHALLHLGQFQHALNELLVWINKTDSTLDQLKPIPGDPQLLEVELAKLKVLANDIQAHQNSVDTLNDAGRQLIETEKGSVEASTTQEKLRKLNNEWKQLLQKASDRQHELEEALREAHGYIAEVQDILGWLGDVDAVIGASKPVGGLPETATEQLERFMEVYNELDENRPKVETIQAQGQEYIKRQNQMKVSSSNLQHTLRTLKQRWDAVVSRASDKKIKLEIALKEATEFHDTLQAFVEWLTQAEKLLSNAEPVSRVLETIQAQMEEHKVLQKDVSTHREAMLLLDKKGTHLKYFSQKQDVILIKNLLVSVQHRWERVVSKAAERTRALDHGYKEAREFNDAWSGMMQYLQETEQVLDQIIEEATASKEPQKIKKYIGKLKETHRQLGAKQSVYDGTMRTGKNLLERAPKGDRPVLDKMLIELKEQWTRVWSKSIDRQRKLEEALLLSGQFSDALGELLDWLKKAKSRLNENGPVHGDLETVQGLCEHHKHIEQDLQKRAAQMQGVLKTGRDLERSGNNPEVGRQLDEMQSIWEEVKSAVAKRGERLQVALVDAEKLNARVQALFDWLDHAEHKLRYAKNAPDDEKVSREMMDIHMDFMKDLRVREREKTETFEYAEDIINKAYPDAIPIIKNWLSIIQQRWEEVRQWAINRESKLEQHLQSLKDLDDTIEELLAWLSGLEGTLLNLKHEQLPDEIPPVEKLIEDHKEFMENTARRQNEVDRACKPRQLPPGARKPSRSGKTPVFKGSRDQGLNARKGSRITPTRDTPDRDRLPHYGPRFSPSTSGPELEFRSPRAKLLWTKWRDVWMLSWERQRLLNDHLLYLKDVERARNFSWDDWRKRFLKYMNHKKSRLTDLFRKMDKDNNGMIPRDVFIDGILNTKFDTSGLEMKAVADLFDRNGEGLIDWQEFIAALRPDWQERKPANDSDKIHDEVKRLVMLCTCRQKFRVFQVGEGKYRFGDSQKLRLVRILRSTVMVRVGGGWVALDEFLQKNDPCRADEHLAELMPIFEKIRAQDQVPCAFPIHMGAGGTVFVRCNTSRSVPLSPHVLHCHPTTHWVRERSVRSIPMSRPSRSSLSASTPDSLSDNEGSHGGPSGRYTPRKVTYTSTRTGLTPGGSRAGSKPNSRPLSRQGSKPPSRHGSTLSLDSTDDHTPSRIPQRKPSTGSTASGTTPRPARLSVTTTTTPGSRLNGTSTITRKTASGSASPAPTSNGGMSRSSSIPALTGFGFKPIRRNISGSSTPSGMQTPRKSSAEPTFSSTMRRTSRGTTPTEKREPFRL

SEQ ID NO: 28276 - DNA, 2681 bp, DROSOPHILA
tcacgaaccgcagagactcgcgaataaacgccgggatagtttggtctagcacaaccgtagccccaggagaccacgccccaaaggacaccatcagcagcgagaggtcctccggagtcaccttggcaggcgtccttgccgccctccggcaatccggcgcagagcatgcgatccgtgatgctgccaaagttgccataagcctctgtgcactgcgtctgactgactttgggcaccgtaacggaccgcagaacggctgaggtctcctgggcgctctgcgtgtttccccagccggaaaccaggaccggtgtaccatcggcaatgtccgcatcctgttcgggaagcccaacgaaagcctgcgtcacgttcttggcactatattcctccagttcgagcagcgaaaagtcaaagtcaatggtgtaggcatcgaatttgggatgtcgatgaactcgcttgatccccaccaattgaccgcccacagaagtccgcgaggagccaatacgaactttggataagagtatcgcagatccttcagtgcagtgggcagctgtgagcacccaaccctgagcgattaaagagccaccacagaagtgatagctacgctgcagggaaacctgatagggaatgtcctttatgttagccacctggccgcccacaatgcgtccatccaggcgtgggcgccttacagtggctcctaagctcagatttaccaggagaatcccgccgataaacagatgaagaatcgtctttgccatgccggtcaatccaatgctcgatcgcatatgctgcaggtgcaaacaaatccgtctttatatatagtttgccaatcgatcaagctattatcaactgcgttttcagggtcaattcctgcactctcgctctgaccacttggcctagttcgatgagcaggcacttcgacgacaataaactttattgccgccaaaataaacgatgttatctaggagcgggtaatagcgccccaatagccttagtctagtgcactactttatagctttagccaggtcaggaacttgttgtttgatggcatcttgacgagcttttccagctgcagtccattttcggccgccaagaccttcaggtccttaatgtcgcgaacgccccaggaggcgtccctctgtcgcaggctccgatcgaagtccacattgctctgtggaacgagtataccgtcttgtgcatatggtccgtaggtgaacatcctgccgcccttcttcaacagctgtccggcagcccggaatagtccaatggagcaggaccacggactgatgtgcatcatgttcgagttgaacatgtagtcgtagctggctggtgctggtggagcctcccagtctccgggatcccgggtgatgtccacatggaatggcgggcgaatatttcgagtgggacaatcccctgcataggcagcaatcgaaccgaactgattcctttcgtactccgtcggctggaaggtgatgttgggcagcaggggcgccaggaatccagcatgttgtcccgagcctgaagcaatttccagcaattgcaaattctcggtggttttgtccacttgagagagtagcgcctccgaaatcggttgcgaattgcgatccgccgagggatgcgatctcttggagaagctgcaacggggatggatgtgcagaagtcgcttggtcaggctgtgtttgttttgcatttaatagattaaaaatttcgatattcagtttatttacctcattttacttgtcaaaaaaaaaggatgaaaacaaatgccaatgtaaatgatgggcagcactgttcgaaaccagggatgggcaaagctttacaaccgttaagtagcaggaaagcagtcacggaatttggaaaataaatatcggtcacttgaaatgataacaatatatttttctcttctaggatataaataattgcaaattaggtatcagtcactatttctgttgctcatctctattagtcacagttatcgatttcaacagctgatagccacatttggcggcaatattttgctattcaccaaacggtcacacagtttttaggctttgtgtttttttctagtaaaaatattatagattggcaataatttgctcataaagcgtagtttacaaagccaaacccgtaaaatgtccgacaacgatgatgattttatgtgcgacgatgatgaggactatggattggtaactactacagcaatttgcctgttttaggcaaattcaaattaagccggcttctattgactcgcaactttgaaaatcttataggaatattccgaagatagcaactcggaaccggatgtggatctggagaatcagtactacaacagcaaggctctgaaggaggaggagcccaaagcggcgttggccagtttccaaaaggtgctcgatctggaaaatggcgaaaaaggagagtggggcttcaaggcgctgaagcagatgatcaagatcaactttaggctggtaaggaagtgtgcagccggttaatatattatatatccctagctaatggcttatcccttcagtgcaactacgatgaaatgatggtgcgctataagcagctactcacctacatcaagagtgccgtcaccaggaaccattcggaaaagagcatcaattcgattctggactacatatccacatcgaagaatgtgagtccttttctttcctttgtgtttttccatttaa

SEQ ID NO: 28277 - DNA, 681 bp, DROSOPHILA
atgcaaaacaaacacagcctgaccaagcgacttctgcacatccatccccgttgcagcttctccaagagatcgcatccctcggcggatcgcaattcgcaaccgatttcggaggcgctactctctcaagtggacaaaaccaccgagaatttgcaattgctggaaattgcttcaggctcgggacaacatgctggattcctggcgcccctgctgcccaacatcaccttccagccgacggagtacgaaaggaatcagttcggttcgattgctgcctatgcaggggattgtcccactcgaaatattcgcccgccattccatgtggacatcacccgggatcccggagactgggaggctccaccagcaccagccagctacgactacatgttcaactcgaacatgatgcacatcagtccgtggtcctgctccattggactattccgggctgccggacagctgttgaagaagggcggcaggatgttcacctacggaccatatgcacaagacggtatactcgttccacagagcaatgtggacttcgatcggagcctgcgacagagggacgcctcctggggcgttcgcgacattaaggacctgaaggtcttggcggccgaaaatggactgcagctggaaaagctcgtcaagatgccatcaaacaacaagttcctgacctggctaaagctataa

SEQ ID NO: 28278 - protein, 226 aa, DROSOPHILA
MQNKHSLTKRLLHIHPRCSFSKRSHPSADRNSQPISEALLSQVDKTTENLQLLEIASGSGQHAGFLAPLLPNITFQPTEYERNQFGSIAAYAGDCPTRNIRPPFHVDITRDPGDWEAPPAPASYDYMFNSNMMHISPWSCSIGLFRAAGQLLKKGGRMFTYGPYAQDGILVPQSNVDFDRSLRQRDASWGVRDIKDLKVLAAENGLQLEKLVKMPSNNKFLTWLKL

SEQ ID NO: 28279 - DNA, 2569 bp, DROSOPHILA
ggtctagtgttgcggacagaaaagctgtttgcgattctggtcttgacgaagcatatgccgccttaatgaatacttagtccgtctattgatatttagccttttatttaagcacaacaagctaattactgtattattgcatcattaaatgattttgagaccaaggttaaaaaaaaacttttgagctttttgagcactatcttatcggaaatgctgaggttgctaaggtgtaatgaggagaaaaacaaatatgttttatctaggcatatgccattatggcagattgctgtaaatattctttaaagcctaagtactttgttaattacttagctcttttattgacatcctacctcaaggaacgttttttgtagttgtagtgagctaagtgggctactaaattattttattgggtaaccttatattcaatttttgcaattaacaatcaaccgatgacgggcaataaactgccgagggtctctttttgttaccctcgatgaagcgaataattattcactgaatacataataatagtgcgctcaacgaagcgaatgaactgtgtggtaaattgatccataaatgatgctacccccagcgtgccaatttatataattatatgaatattcagccatacaatagtggcattattagcacgattaagcagtctactaggcttcagctcttgaaccttcgaaacttgggtttcgcattttgcacactagcctgtaacctttttgggtcggcttaatcttaaaaacagggaagatttaactacccattatggttatggcttagtagataaactaagcaaacaaaaaatggcacaaacattggtcaaaggttcagggataaatgttaaatggaaaaccttattacgtatagtcaaatttaattcaaatttacgtaagcaatgcgcacacagtcgtaagaccaaaatttgtaaaaaatatgtcgagccaatagtgagtgtttcttaaaacagaaatattggtcagtacacatccttctagggctccattccaccagattcggcatcgatcttgtgatcggtatagatgggttgcaatatctcacgggcagcttcgtgatcagcttttcccagggcctgtgatcttccatacagcttgatgtacttcttttccttgtcgtgaaccaagtaaccacctccaagaccctgggtgcacaagcccatcgactcagcctcctttttcaactcatcgtatacatcaactgggaaaatgaaagaatgattgtaaccttaaggtcatgagaactatcttaactcacgatggtacttggccttggaaaggctacgaatcacctgcttggcgctacccatttccccatggatataaacgtgggccatcatgtactttgattttccactttccaccttggcaacaggaaaagcgactagacttcgcattggcttctcacaataaagtcgagccgctacatttacatatgttgttccatggtaaataggataacccactagtcattcagagtaaatggctacttaccttgcatcattggccgccaaacgggtttaagaaattttccagcaaactccatgtcaaaaaaaaaaatatttttgctttttttctttttatttgtgtactagctgtcgactatactgagaatgaaaaataaatagcctaacgtctcggaacaagctcgatgagtgttttataaatgtttacttgggttctgaaaattgtttgctaaaataatattactacgacatagatgtttataaatagaaaatatgaaatgaaaagcatatccatctatagtaaacaaatttattcttattaatacaatcagattgtttatagctccacgtcaagatataatgttctttagtttatattgtattacaggcagccataaactattgcattctggtgtgtttatagctaggcaataattttatggtcccaaatataattaattaagtttatttttctgtttattaaaactgtaatttccctctaattatagtgaatcgtgataagcactatacagctgcgcggagaatggaatcgctgagtacgattggtattgcataatcgtgctgggaatcactgctttcgcaaaagctccaaaccaaatataaaatcagcatcttaagggctcagaagctagatgagcaggatgagcaaactacaggtgatcgtacacccagtgaagaaagagttccagcgcaaaagctgcggtttcgaccatgatacccccgatgattttgtcaagtctcaggtaagaattaaataaaggtgggaagggggtgatgggtcaatttaaatagttcaatgaaacgttgacgacagtacaaataatcgcgtccttgggcctacgagaaaaacgcctccactcgtcacgcacctgagcaggtgtgcttctatttgctttgcactcaggtcaatgtacacggtgggcatataaaagtgcaggctgtcgatactataagatagctctagagatcaatctggttacacttgtcaaaggtctttaaattacatcgctgtattaatgtctcagattcaaagtaaaagcttactgttaaatataaaac

SEQ ID NO: 28280 - DNA, 483 bp, DROSOPHILA
atggagtttgctggaaaatttcttaaacccgtttggcggccaatgatgcaagtgggttatcctatttaccatggaacaacatatgtaaatgtagcggctcgactttattgtgagaagccaatgcgaagtctagtcgcttttcctgttgccaaggtggaaagtggaaaatcaaagtacatgatggcccacgtttatatccatggggaaatgggtagcgccaagcaggtgattcgtagcctttccaaggccaagtaccatcttgatgtatacgatgagttgaaaaaggaggctgagtcgatgggcttgtgcacccagggtcttggaggtggttacttggttcacgacaaggaaaagaagtacatcaagctgtatggaagatcacaggccctgggaaaagctgatcacgaagctgcccgtgagatattgcaacccatctataccgatcacaagatcgatgccgaatctggtggaatggagccctag

SEQ ID NO: 28281 - protein, 160 aa, DROSOPHILA
MEFAGKFLKPVWRPMMQVGYPIYHGTTYVNVAARLYCEKPMRSLVAFPVAKVESGKSKYMMAHVYIHGEMGSAKQVIRSLSKAKYHLDVYDELKKEAESMGLCTQGLGGGYLVHDKEKKYIKLYGRSQALGKADHEAAREILQPIYTDHKIDAESGGMEP

SEQ ID NO: 28282 - DNA, 3756 bp, DROSOPHILA
accacttgcaaacaaaattttaagatttaccgaattgcatacgactgccaaaagagaattgcatttaacaacttgttttgagcgcacttgtaaaggatatggccaggatgcgttcgtgcaggatcatgtaggagaaaaactgcaggacactgaggaacaagtactcgttcttgggcacatcgaactggcgatcatggattatggtagccgtgtacatcaccatgcagacggccaccagggcgaatgtgttccgaaccgcaaaatatattccctggtagttgataaataggacattgataaagaatatgatcatcataatgttggctattgccaccaaacagctgagcagcagatcaccgggaacaatgaacatgggaaagtaggcgccccaaaatatcgaggccaacatcaaggcaaccactacaatgccggcgtagaagttgacgagtctattctcattgtgcttctgttccatggctatataaatagttgagctttccacgatcgctgcgataatgatgtagttaaagggcaccttgcgtcctagcttggtccacgataaagtggcgactgcgaaaaaggtacacagaagccaccagccgtagcgctcctccgatctgctgtggctcagcatatgggtgtaacctataatgatccactgtgtcaatgcgatggcggccaggatcacactaagtccgtatatcttggccgcatgactgatgctctcatccggtggctcgccatagacctcctgatcgatgttccgaaaagtgtttttttgaatacttggcattggactaggaaataccagagttgataaaattccaattatcgatttcttgactttattgctcgaaacaaattcaaatctttaaccgaaaggtttctactgggttatctagatcggatttacaatacttgccttgagcggtctgcattctgtacatattgtagcaggtggaaatgtataacaattagtaaacatttttattaatcacgttcacattggaatagtagataggccgtgtaaatcaactgccaaacttccaagaatctccccttcaatcgtattagagaacacgcatatgcaaaagaacagggtaaatgagttaaggtagatcagcatggagcagatcggttcaagtccaagcggggagtattgcaatcgtccgtgcataaactgcgcttccagggggatgactattaataccagggcgctcagcacagcacagaaggtcggaaaaaagtatcgcgtggatactacagacaaaacgctgagcggaaggagagctaccaggaaaatggtcacaatcactccggtgacgaggccattgggaagaaacgattttcggcatttagctccagagaacatcagtccgcccaaaaccagtgccattacggtaaagtagagcaccaagtcgggaatgtcatacatgtttacatagtatgcggcggacagcgttaagagtcccacaaccccgccgaccattgtccagacgatcagtggccgaacgcgactgatgggcaggcagatcaggactgccaggatggcgagggcgaaaagcagccacacgtacggcggaaccggcaggattctaacaatgcttatcttgagcgacgcaataaacattaagggaaatgccgatgcggaacacagtagtacggcttctatgtaaacagtacgggcaaacactagctgcacctcgtctgcttcctcttccaattccacttgctcatgctgacaacaactcatcgatccgaattttttgagacagaaatttcaaaaattgatgtaattcgacattttgctaagattgttcactagtattactgaggtataccaatcaaaaaccaaatggcctgttcattgattttcgatggtttaatttaagccaacaacatgcacttaaaaccattcagtttttatccaacatagtcgcaaatacatttctaggctatttgcacatcagcctcaacatattttttattcaactattaactagcttatagtacagggcaaaaacgagcatgcaggagagtagaaaaataaagtgtaggtaaatgccattggcgcaatccgcagtctccccataaggcacctgctgcagccttccacaaatgaaacgagcctgaaatggagccatgaatgcgatcaggatgacgaacactatggcaagtgccaggagataccgcatatcattgatgatcaggaagagtattagcaggacgatcatggtgacggtgagcagcagaaaaatgcagcaagtacagataatgttgggtagcagaacctccggacttttggccccatacaaatgcagcagggccagcagggatccggcaaccaaaatggcaatcaaaaggacccagacgcgcactagatgcatataatacgctccgaacagggtgagaaagaacaaggatcccagcaccaatccccagcataacaaggtcaatgctggagtctgtgcgatgcagccgagcactgagagaatgatgaaagctaatatcagccaaacgaacggcggcactggaattgccttgtagaccctcacagcgagtgccgacagtatgatccacgaaatggaagacagcaggcacagcactacggaggataggtacacccggaagatgaaggcccgcaactcccgctcgttgatgactaagacctccggtccctccgcaggaactggctcgccaccaggtcttccggttctaaggccataacgaccccaaccccgattgcgattattcatgtgttaatcaattattttaggtcaatataatgtaattttgaagaaaaaagcaaagtaagtgattcattttctcttatattgagactaggacttttcataatactctggctttattctaattgccttgcaatgagaatatatttatattttctgtaccgcctaggctacaccgcactaagtaattagactggatgacagtatcctttggtctggaacaccatagtaacttgccagatcgctaatcagtttcgatcacacagtgacagctatttctctcaatcaaaatcattttcgagtgaaattttcggagcttcagatgtttgtctgatggcctcctttctctcgtcgaccaggatgaagtagcacacgcagaagaagaacatcattgaatgcaagtataaagtcagggtgcagaccatgaggtgctcttcgggaaccacttccacgacgttcagacggccatggttgaactgcgcctgaatggggatcgctatgatcagcatcaggaacagaatgctgacgaaggtgtcgagcagctcaacactcccggtgcagagctggacgattcccacaatggtcaagaccaacagcagtgccatcatcagcagcgtggagcaaacaccgccgggcaggaactcctgcgggcacatggccccagagaagttgagtaacataatgatcagggccacgccgatcatcacgaaactgataatgagcgggctcaagtcgtggatgaaatggcagccaaacaaggtggtacacacaaccaccagacctgtcatgaaccacttacagggagagtagtaggatattctcgggatacaatgcatgcatatcatcaccagaaaaattattagagccaggacgtagcagggaaacggaaggtacctctgcaggtgaatatgggtcagcatgagcagaatccatgcgcccaccgtaattccgataaggatcaggccaatgttatagatgctgcggatgaactgggtcattgggtcca

SEQ ID NO: 28283 - DNA, 1395 bp, DROSOPHILA
atgaataatcgcaatcggggttggggtcgttatggccttagaaccggaagacctggtggcgagccagttcctgcggagggaccggaggtcttagtcatcaacgagcgggagttgcgggccttcatcttccgggtgtacctatcctccgtagtgctgtgcctgctgtcttccatttcgtggatcatactgtcggcactcgctgtgagggtctacaaggcaattccagtgccgccgttcgtttggctgatattagctttcatcattctctcagtgctcggctgcatcgcacagactccagcattgaccttgttatgctggggattggtgctgggatccttgttctttctcaccctgttcggagcgtattatatgcatctagtgcgcgtctgggtccttttgattgccattttggttgccggatccctgctggccctgctgcatttgtatggggccaaaagtccggaggttctgctacccaacattatctgtacttgctgcatttttctgctgctcaccgtcaccatgatcgtcctgctaatactcttcctgatcatcaatgatatgcggtatctcctggcacttgccatagtgttcgtcatcctgatcgcattcatggctccatttcaggctcgtttcatttgtggaaggctgcagcagcatgagcaagtggaattggaagaggaagcagacgaggtgcagctagtgtttgcccgtactgtttacatagaagccgtactactgtgttccgcatcggcatttcccttaatgtttattgcgtcgctcaagataagcattgttagaatcctgccggttccgccgtacgtgtggctgcttttcgccctcgccatcctggcagtcctgatctgcctgcccatcagtcgcgttcggccactgatcgtctggacaatggtcggcggggttgtgggactcttaacgctgtccgccgcatactatgtaaacatgtatgacattcccgacttggtgctctactttaccgtaatggcactggttttgggcggactgatgttctctggagctaaatgccgaaaatcgtttcttcccaatggcctcgtcaccggagtgattgtgaccattttcctggtagctctccttccgctcagcgttttgtctgtagtatccacgcgatacttttttccgaccttctgtgctgtgctgagcgccctggtattaatagtcatccccctggaagcgcagtttatgcacggacgattgcaatactccccgcttggacttgaaccgatctgctccatgctgatctaccttaactcatttaccctgttcttttgcatatgcgtgttctctaatacgattgaaggggagattcttggaagtttggcagttgatttacacggcctatctactattccaatgtga

SEQ ID NO: 28284 - protein, 464 aa, DROSOPHILA
MNNRNRGWGRYGLRTGRPGGEPVPAEGPEVLVINERELRAFIFRVYLSSVVLCLLSSISWIILSALAVRVYKAIPVPPFVWLILAFIILSVLGCIAQTPALTLLCWGLVLGSLFFLTLFGAYYMHLVRVWVLLIAILVAGSLLALLHLYGAKSPEVLLPNIICTCCIFLLLTVTMIVLLILFLIINDMRYLLALAIVFVILIAFMAPFQARFICGRLQQHEQVELEEEADEVQLVFARTVYIEAVLLCSASAFPLMFIASLKISIVRILPVPPYVWLLFALAILAVLICLPISRVRPLIVWTMVGGVVGLLTLSAAYYVNMYDIPDLVLYFTVMALVLGGLMFSGAKCRKSFLPNGLVTGVIVTIFLVALLPLSVLSVVSTRYFFPTFCAVLSALVLIVIPLEAQFMHGRLQYSPLGLEPICSMLIYLNSFTLFFCICVFSNTIEGEILGSLAVDLHGLSTIPM

SEQ ID NO: 28285 - DNA, 6305 bp, DROSOPHILA
caaatcaacatagtacagacctaaagaactacaattatgttaattataaagtttaaataggacaatttattatttaatttaaataaaaagtggaatatttaattcaaacccgatgagaattgtgacatccacaaaaaagttaaataataaaaaaagaactaaaaaatgatataaaatctgttttatgcgaggacctggtttttgtagctcgcaggtcaaaaagaataaaaaaagcttcttcagatttttgactcgggcaactcaaattaaaaataagagataccaatcatatttataaaacaattgtcctggcaatttctatcaataggtatctgttagtcgtcaaactcgactgcagcatactctttgcgtctgtcaaaaatgttgttggctgatctatataggccttactcatctgagtcgcacaaagatgaccacaaatcatcctgggttgctgcaaattccttagttcattgcgtggaggtagacatcactaaaaacatccaacaaagaaagagtcgatacgttacgcagaaacatcacaataagattgtattactgagagagaaagtagaaaactattagggtcgaaatgctctcttaatgcacattctatttggccaatcgttaaacaagaatacactggtatttttatattttttggctaatttatgtatattttcttttacactcccaaaattgtatcatacattttaataacaactttattatgcaatacatatttttcgttttaattatgcttatttgatttattttttttttaatgaaagaaatacttgataggtttatacaatatattttttgttttctttagtttcgttttttgcttagatgtggatgcgcagatgcgactatataaacgtaagaagcgcatatcatctggtttagaaaaactctgtacagcggcgcactcataaaattaagaacacaaataataataacaacaaaatatataaacaatcgaattgaatggaacaatttgtagaggatagttgcttgtatttgttctgccattacagtgaattgctttttggaatgccaacaaaaaatcgaatttttctctcaatactttctaagaactgagggcgtacacggaggtatgggctaacaaaaacttagtttaaacggggaacaaacatgcgcttaaagatagcaagaacaaacatcattgcaagtgtgatggagaagcggaggatcaggctggagatatagatccccctacgactcttattgttagttaaggtttcaggctggcggcctggctaaaatatttgttgtgtgcctgtgcatggatgacttgttgattagaccacctaggccttgccagcgatgggggcggcaccttgtttctggttctcgttttccttctccagctgcttgcccaggtattccctgataaaaacaaagagagaaacaaacgcattttgagtacacagagaattttgatgataatcctggtcatgaattgaaaacaaatgatatgaggatcactggacctgaatgtggagaaggggagcgcatgagatgataggcattgaaagtccatactaaccaattgtgtaccatcagcttttgcacagccagcagggcttcgtatcgcacattgggatcctcgtggccaagatgctgcatcacgatctgcttgcctccgagttgttccaagacgctagaagaaaatgatttggtaattggattgtatgtaacatagtataaaatctaaacttactgcttgccgcggggatagtggcgcacatactccccgatgtcgaagcaggcgacggaaaggatgatggcatcttttgaggtttccaggaggtggacgaggatgcgcagcaactcgtagttcttttcgtttaggcgctgggcattctcgcgccagaacttggccgacttgtgcacaggcgaccattccaagcgaccgctgcgcacctctgtggcgtactcatcaaaggagctcaagtcttgcaccgaattctggagcttctcgctcaggtactctacgtcggcggtaatgtcctcgtcgtcgaagcgacgctgctccaggatggatagctgcttcagcaccttgcactggaccatggcgatgcaatggtccttggccaccgatgaatcctccggcttctcgatcagattgcggaagaccgcgaggataatgcgtgtcaccttctccttggcacaatcgctgaggatatcagccaggatggggatcacgctgaacttattcatcttggcggccagcaggggattgaaggtcagcacccacaggcaaaagatcaactggtattgcacctatgaataagaaatcgaatttaaattgtaccaaacaatttacgcatttcaatttcaaactcacctggaagttgacacgggtcgacaagatacggatcagagtgctgattccgtcgactcccacaaaggcaaatcgatactcatccacacggagcatcatctgcaggcaccgggccaccgactggatgtattcgttgttctattaatggtagaaggttgcgattagttttactctcgtattcgattatagtttcgttggttaggattgttagttatgacgatatctgctgaaatctatttttcgctagctacgacaacgataattactaaagctacgtacaatatacgaaataaagtgaaaaagaatgtggacaacatttaagagagatagagttggtaatgcaacatcatcaatgggagttcgaacagttcaccttatgccattggtttatctgtgtgtaattttggttgattttcgtgtagttttaaccatcacccgggcctcaaattaccgttacaccacactgatatgcactgattcatacactgcttgacaacactgtcagctagagctttcacgccggattttccttgctgtcttctgacgcgctattagttgggttagtaaacagttacgaaatagactaggatttaccacacaaacacacggatctcagtcgaagaggtaggaattataaagaataaaagttaaaaatgccttatgtaatttcagaaactacgaaatactttttttttagtttttagttattacatatttacgaattgagtcaaaatcattgatcagttgttgttacataataaatgttacaatttcctgttatacgaaaataacagaacagttgtttatccttttatatttcataaaattaagtttttctatttctatatttctttaaaaattgcaactataagggttgactgagcttatcgactgtgttccttcgtgtgaccataaatgttttatagtttattcgtgtttttgtgcggtttttggtgggtgggtaagtgtatgttttgggttgtttcggcgagtggattgctgagagtttggtttggggtttagttgtttggaataccggtatcacacatttgccatcctgctgctggtgatcactgccaacgcccacttcgcgatagctttcgttggccctctcggccagctcgtgctgctgctgcagctgggccagtgtgggactgtactggtggccatggtggtctttgtctttgccatgcgtgtgcacaaggatcgtttgtgtccgcttggccagctgggccatctcttgcagatatgctaaaccctacggttgggatcagaggtcgagggtcgttggttgtgggggcggttcgtccatagacatcgattcaatcaattcatagacggtaaattgcatataaattaaaattgttcacagggttcgagtgtagcggaacaaattaaaaccatagatggacaagaacacaaggtaataacaaacttagattctggtgcataattgacacatgacaacgattgcacgtgatgatcggtagaagtgaggtggcgaatttaaaaaaaatccaggataatatacggttttggtatggtgtgacaagattctgagtgctgatgtatggcagaatgtagtaacaaacttgttgtgttgacaacccgttcgcagagatttcacaaatatttcaccaagacgaggtcagttttgtttggttttccaacgtatacaaggtcagtatagcttggtttagttagattaaaataaataagaggtattcaatattggcaagacatgcagaatgcagattatttggtttcttagctgttaacagatttaagaggttaattaaagactcagtccataaggagatcgttaacggattagagtaaatttgtattagaaatgtttttcaacgggatttttgaagcatataactcaaacaaagcatgctaaccagtatcataagccatatattacatgctgaaagctaaatgcctgcctaggaaacccatgtatcaattataaaaactgtttgttttgactatatacaaatttgggaggttgattcagtgcaagcattccttagaaaactacttatactgatacaatcttcacatgctctcctatcttcttaaacagataaaaggctacaatagacatgctaacgaaggggttaacccagtaccgcacacaatcagactcacattgctggccagctgatccttcaggaactgcagatagaagttcaggtcggacttgggcatggtctcatggccccagcaggcgaatttggccaggatgcgcgacgacatgttgacaataaagccatcctgacggttcagcaggttcaggaacggaccccagatgcactgcttcagcttgccggctgtgtcatggaatagatccacacgggagcgatcctcctgcagcaaatcgtcgagcagcacaaggatgtactgaatggtggagtccttcgacagatgcgaaaccagattaagcagcgtcttcaccacctggctggagttctgggccaagaagctggcacgtgacttgtccaacgcgctgattgccttgtagtcctcctcgctgatcatctgcgactgcatgtacgaagcccagttgatcgtcctggtgcggatgtccgccgcctgctgctgcagcaccgaggtggcagcaatcatatctgggggcaagcagtaagccaagttaatgggtggattacaaacggggtgctgcgctggacggacaccccacacactcacacactcgcacttcgatttttcgcaaaggtcgattgagaggtgcggtgagggggaaaactcaccaatgttctcctcgggcaaatacaaggcggtagtcattttgagggctttcttgagacgacgctcggcacacacaaattcaagcacagaatttatgaaaatctatcaaatacaaccgagtgtttttcacactactgcgacacagcaccgaaattcagctgactggtcttgtgacttttctgcagccttcaatcgaatattcgatatataagaatatcgatatgacgagcagagccccatgttatcggtagcttggagctgccaacgcgacttctgtacttgtggtatattaaatttgaaaaatattaagttatataaaaaagtaaattggatctttattcattatactttttatttccgtcataaggcacacattttaaagattttttaaagattttgtggtctttatgtgtagttgtttggtaatttatttcaattaattttcaaatctaccaaatacaagcacatacgttgtgtcttgaaattaacttaaaagctttatttactcttcaacctaaaagtatgaatcacggagatcacggcaggcatttcctttggtatttacccatattcgatataaccgaaaacctcttattgcagttggagcacctatacggtttttcccccgtgtggatgtgaacttttaaatcgctagcgcggggaaacgtctttgagcagaactcgcactccataggtttcttcccattgtgcaaccgcttgtggcggcttagattagacggatacttaaaggacttgtcgcaatggctgccgatctgccgatatgactttgaacattgctcacacttgtgcgaccgctccttggagtgggataaaacgtgggcacgcaatgcattgggacactggtatgggcgagtcttctcgtgacttagtagatgaagactccaactggaggaaaacggaaacatcttggtgcacttgaggcatttgacaacccgattgggaggatctgatggcggacactttggtctatcgcatcactgcatttgcaaaagtctttcgacactgggaacacttgtatcgctttccatgggatcgaaggtataatctataggagtccttgtcttcaaaatattttgggaagtaattacatttgtagggcatgtaagtagtacgatgcactatgctgcatgatgcagccaac

SEQ ID NO: 28286 - DNA, 1907 bp, DROSOPHILA
tcagctgaatttcggtgctgtgtcgcagtagtgtgaaaaacactcggttgtatttgatagattttcataaattctgtgcttgaatttgtgtgtgccgagcgtcgtctcaagaaagccctcaaaatgactaccgccttgtatttgcccgaggagaacattggtgagttttccccctcaccgcacctctcaatcgacctttgcgaaatgattgctgccacctcggtgctgcagcagcaggcggcggacatccgcaccaggacgatcaactgggcttcgtacatgcagtcgcagatgatcagcgaggaggactacaaggcaatcagcgcgttggacaagtcacgtgccagcttcttggcccagaactccagccaggtggtgaagacgctgcttaatctggtttcgcatctgtcgaaggactccaccattcagtacatccttgtgctgctcgacgatttgctgcaggaggatcgctcccgtgtggatctattccatgacacagccggcaagctgaagcagtgcatctggggtccgttcctgaacctgctgaaccgtcaggatggctttattgtcaacatgtcgtcgcgcatcctggccaaattcgcctgctggggccatgagaccatgcccaagtccgacctgaacttctatctgcagttcctgaaggatcagctggccagcaataacaacgaatacatccagtcggtggcccggtgcctgcagatgatgctccgtgtggatgagtatcgatttgcctttgtgggagtcgacggaatcagcactctgatccgtatcttgtcgacccgtgtcaacttccaggtgcaataccagttgatcttttgcctgtgggtgctgaccttcaatcccctgctggccgccaagatgaataagttcagcgtgatccccatcctggctgatatcctcagcgattgtgccaaggagaaggtgacacgcattatcctcgcggtcttccgcaatctgatcgagaagccggaggattcatcggtggccaaggaccattgcatcgccatggtccagtgcaaggtgctgaagcagctatccatcctggagcagcgtcgcttcgacgacgaggacattaccgccgacgtagagtacctgagcgagaagctccagaattcggtgcaagacttgagctcctttgatgagtacgccacagaggtgcgcagcggtcgcttggaatggtcgcctgtgcacaagtcggccaagttctggcgcgagaatgcccagcgcctaaacgaaaagaactacgagttgctgcgcatcctcgtccacctcctggaaacctcaaaagatgccatcatcctttccgtcgcctgcttcgacatcggggagtatgtgcgccactatccccgcggcaagcagcgtcttggaacaactcggaggcaagcagatcgtgatgcagcatcttggccacgaggatcccaatgtgcgatacgaagccctgctggctgtgcaaaagctgatggtacacaattgggaatacctgggcaagcagctggagaaggaaaacgagaaccagaaacaaggtgccgcccccatcgctggcaaggcctaggtggtctaatcaacaagtcatccatgcacaggcacacaacaaatattttagccaggccgccagcctgaaaccttaactaacaataagagtcgtagggggatctatatctccagcctgatcctccgcttctccatcacacttgcaatgatgtttgttcttgctatctttaagcgcatgtttgttccccgtttaaactaagtttttgttagcccatacctccgtgtacgccctcagttcttagaaagtattgagagaaaaattcgattttttgttggcattccaaaaagcaattcactgtaatggcagaacaaatacaagcaactatcctctacaa

SEQ ID NO: 28287 - protein, 505 aa, DROSOPHILA
MTTALYLPEENIGEFSPSPHLSIDLCEMIAATSVLQQQAADIRTRTINWASYMQSQMISEEDYKAISALDKSRASFLAQNSSQVVKTLLNLVSHLSKDSTIQYILVLLDDLLQEDRSRVDLFHDTAGKLKQCIWGPFLNLLNRQDGFIVNMSSRILAKFACWGHETMPKSDLNFYLQFLKDQLASNNNEYIQSVARCLQMMLRVDEYRFAFVGVDGISTLIRILSTRVNFQVQYQLIFCLWVLTFNPLLAAKMNKFSVIPILADILSDCAKEKVTRIILAVFRNLIEKPEDSSVAKDHCIAMVQCKVLKQLSILEQRRFDDEDITADVEYLSEKLQNSVQDLSSFDEYATEVRSGRLEWSPVHKSAKFWRENAQRLNEKNYELLRILVHLLETSKDAIILSVACFDIGEYVRHYPRGKQRLGTTRRQADRDAASWPRGSQCAIRSPAGCAKADGTQLGIPGQAAGEGKREPETRCRPHRWQGLGGLINKSSMHRHTTNILARPPA

SEQ ID NO: 28288 - DNA, 20486 bp, DROSOPHILA
acccaggccggaggctccacgcatcccgctgccagtgccaattgccacggttacgggaagccggacgcttatcccactttccggatacgattgcctagcagatctgccgtccgtacatattgaacagacctttgagcttaacgatggtaagtacaagcccaaaaattagctaaaatcgcttctaatagttcgtcttccctttgcagccctaacaggcgtctcctcggagaatcgatatgtggtgcgatctccactgggtgatgccattttcgcggccaacgagagttccacagaaaaaaatcgactactttggggagctggtcgaccctttcagatgcacctgctggataaaacgcaccaggaagctctggtttttcgcaaaaaactagcgatgggatccatgtgctgccaggcaaaaagtctagaaatttggataccacctggtaatttgctgggtaaagtggtgcagtcgcccaccttcatgcagccggagttctttatcgaagacgaaagcacaggacaactaacattctgtgtagagggtcctgtcggtttaggattctgctgcttcagtttgcccaaagattgttattttaaggttggtagtagctttaacattcggaacagaatattcaattatagtgtttttgttcccttacagatccattcgggaggcaatatgagggcttccatagaccacaaatggctcgccagcaagtctcagtacaccacaaatatatactttagtgacgccaagctaaccgccaaggagcgggctttgatactgggatcagcctttctactggtactgtgctcctagtttatatacatatatcatttgccacaataatgttttgtattcgtttttcaggaatatctattcttccaaacccgcttttgacgtgattaatcaataaaaaaaaacattgtatattcacattgatttctttattttttgtcatttttttgtataagattttatgtttgtttgtgttttgttttttttttttctcagttttttgatatattttacaataatgtaatagatcacttcattttcttgttgtttaaccacatacacacattcaaatatatagatatatatctatgtgtatatatagattttgctgcagcgcttgccatagcagtttgtacaatatttcatttatatctatcaactttgtgtagtttgtttatctaacctaccgcttaatgcatatatgacaacatattgattatttacagttagcgttttttttcatcatttcgtttctcttctgtcaaatacaaaattaaaagaaacaattaaatgagtctcgtggtctcgttgtttaaagaattaaaacaaaactaggggcgcaagtcatttctcattcaccgttaatagttgcgcttcaaaacttggtgtgataacaatttgaaataaggaagaactacgtgattttcaaagggcaaaacttggatttggacatagaaaaccaatatacttagtgtgcgggtgtgttctggttcggtttggaggttcattttcggggctaggccttaaaaataacacacttctctcgctctcggatctttacatttgtagatagactcacagcacttcaggagtttttgcatttatgcatttcgaaaacaaattatggttaagtgtatacaatatagatagatttataagtgtgctcgttggttggcttataactagggctagctgatgacgattccttaacctaaatacttaagaggcagatcgaaacgatctgtgtggggtgactgccttttaaaaccgtaaaaggctttgtatatgattattttagcgcaattcgcctagagtgtttacactggaatagctgactcgcttatctggctcccctatcgtttgattactactcgcgattagcccaatactagttgggcccatcatcgaagagaggtgggtcttataggctagctctagagtaagttgtgtgtgtgcccatatgcgatatgcttagacatttgatatgcgctcgttggaggtggtttggtcatggcggccctcgatcctggaattgtagatgccgtactgactgctgtccaggtggtagaccgcgggatactgataacctcagctgggctgcagcatgtacatgtactgtcagttgcttgccgctgctgaagcagccacgggaacggccacgggaacaggcagctcctggccagaacgagcccgcttctcgccactgctttccggtggattatcgctctcctcgcccgtactgctgaaactgcccggcaaacgacgcttcaggctatggtttaggccattggccaccgtttcatcctcggacatcgagctggctcgcttgggtgtgttgccagcactgtcgttgtccagcgaagctatagccgaggcaattgcggcactaaagccatcctcggacgcactatcctgcgagacgggacctgctgcatcctgggccagctgcatcatgccagaaggtgtggtatagctactgagcttaccaggatccttctcctgcagtttctgggccagcaacttgagtgatatcagcgaattttcacagtcgcttgtatcgatttcagtgagactaattccggcacgttcaatttcagcataggtcccgaagggcaacttctgcagacactctagcttctgaacatgcgtcttggagcgcaaatgcttggccaaatgcccatggatgcggaaggcgatcttgcagtcggtgcactcgaagggtcgcggatttgaggtggttggaacaccaaaagtcgacgtcatcataaccttgtttttgtgcgcttccgatcgctcgtgcttctgcagatgtccttgcgtgcggaaggatatgctgcatggctcgcacttaaactttcgctccatgtaatgaatattcatgtgcagggtcagctgatgttgccgctgaaacgtcttggagcacatggtgcaggtgggacgtgcatcacctgcaatgggagctggcggcactcctctgccatacgatacatgctggagatcgccgctcttgctagtgggagtagagcttttgaagccatcttcacccacaatcacagtacgctgcgcgggctgagttgagttggcagtggatgagggtgccacaggtgcagctgttgttgtgcttactgaagtagcagtaacagacgatgttggtggtgcagtcggatttccaagtactccagtaaattcattgacatccggttgctgcactgcagcaggcagattggcattgtgtggctctgcgatattaggctcctcgttttcttcctgggcaatctgagcaagaataaccggggcctgttcaggtgcactccgaggtgactcaatggcctctggggtctttacttcgtgcacttcgatgctaggtacctcatttacgctcataacgggcctgctgttggcggtaaagagagtgctactactgctcattacaggagacgccgctgtgtataatgtgttgatcagatagctgcggctaaactgactctgctttatcttggcttgatgcagcgcatgctccttaatgtaggtctgtagttgaacatcctcgccctcggcctcgtgcttggcctgctcttccatttcggcagatattcgcactttgtccgaaaccgagattagagtcttcatgaaaccgctttcgttgccggaggttccaaagataacatcgtgcatctgttgggcctgcgatttgggaagatcatgagcgggcaccgaaacaggcgagggggatattaataagatggagccgcgtggcttagtgagatccatgggagcactctcctcgttggccacactccgtttcggtttggactcctccggattggagtaatactgttcctgcttttggtagtcgaaaggcggcttcggcgatgtaaaggagcacactaatcttttaggttgcgaacccgaagagccaatgctgtttgcaggactggccgctggtaggggtgtatcctgcaactgcggatagggcgatacgctctgcggtatgggcggcgtcattgataacgagagtaggcctctggctgcttcgtgctctttctgtcgcgacttggactcatccgtatctgtgaagagattataatgaatcagctatttgaacatataagtgtatatgattgctttcttaccactactttcagattcattatcactgtagtcatcggaatccgattccccagccatcgatgatgtgcgtcctcctgccgaagtggatgactgctggtcaaagtccatatctacatccaagaactcgctgtctggcggcattggtcccggatttattcccagttcaatgcacttcttaaagtgagttttcgattgcatatgcttggtcagatttcccttggtcttaaaactgtggaatggaacaaagtttataataagttatctcttaagtacggaaaaaatgcaatgactcacctgaagttgcaatggctgcatgtgaatggcctcacgtccgtgtgagtgcgaatgtgcttcttgagcatcgacggcttcttgcaacgaattccgcactcggagcaaacatatcttccccttccgcggccacggatgtacgtgtaatcctcatgagactcgtagccacccaccaggggctgcccggatggacttgtctccaactttttggcctgtgcctcctcattcgccttggccgccacatttgcctcactgagagcggcaatcgtgacagtgggtggggtctttaggggtccttgatagaaagcactgctagtggaggacgtcgagggggaggatacgatttgctgggaagcgactaagttgtagctaagttttcccgatccagccatggcggttgagctgccatttcctaacatcctttgacgtgagtcgtagagtgccataacttgctttagtttgaatccaagtggatgtggctggttctcctcgcaaacctgccacacactatacatcgatagtttgtgcattcctgccacatacgaaggctgtggacagttcaccgtacagtaaaacatctttgtgctgcatttgaggcccagatatgtgtaggcgtgtccattgagatacagttgcacacaggatttggacggcctgggggtctccggcgagatcagcggcaatgtattggctgtcggtgtaatgccatgatggcgtttaggagtaaaagtaccgggtttaagtggcaaactagtaggccgcagaaacttggacttcgccgatgctgaggcactggctacgggactggtctcttctggagcgtttccgttgggagtatcaacatgtagcggtgttaggggcaactcttgctgtttcccagaaatcacattttccaaattaaagtgtcgaacttcaggttcagtggtcttcacattatcagccatgcgtagaaagttaaatggtgctttcttcggtgcctccttgctgttccactgcagcgcttgccgctgggcaggagttggtggctgtcgactgaactcgcttggcacattctgaactccaccgaatggcgatagggccttcagttcaccggatcctcctcccaacagcagcggactgggttgctttcgatttggactgcgacctcgactagagggaatgggtagctgcagctgttgtggcggaggcggcagtagcggcatttgtggtgtcagactaccgggtcctggcattccaggcacatgaggtattggtgttactggagtggttttatctccaccgctcatcggtggcagcgttagcggattgaaggcagttattgagttaatgggcggaaattgaaagtgctgcggacctgagctaacgccgagaagtccactgccactgaccagtgccatcagcttgcgctccttactggatgatcctgtttcgttgttgactttgaccgaaacatcctggaagcttccgccggacagcaacggtgttctaatcatcttggggctgttgtccaagtctgggcactccgaaatgggaatcatgctgcctcccgaagaggtgaatctgcgcagtcgctcctccttggaggactgcaattccggcacactattactgctattctgattattaaaggaaaagttgaaacttgtcggttgctgagaggaggatgctacaaccaaatcgctagtcttgatgcgtttggcaggctgagcttcaatcacaaattgccgatcctcgtgcattttggttatgaccacagaatcctgggccttgcgtggtgtactttgctgagcatagtccactaagggagtttttcccaacaatggaccaggcgatggtagaggcgcatccacaaagcgcagtgcttcaatctggggggcaggtgctgatgatggagcagtgaccgtagcaacagcaggagctggggcagaagcggttacagtgggagctgttacagttgatgtccttgctggcgtctgtgctgcacttaggcgacttaataccaaactgctccttttggtcttcaactgcgaccaggccaacttggccagagataagggattcttcgagttggccatgtggctcttcagctccggtagactcagcgagatcgagttggagcggaatggcgaagatgctggactcattggggcacttgagctcgcatcctgacagtaagtgctgttgtgcagcttcaaatcgtccgcactgcggaattcgcttgcacagataggacacgaataaacagcatcatcgccttcgccaatcggcacggccaatcctcgagcattaagcagtaggttcttaattatcgagttattaacctgagcaggtggtggagcagttttggagctactagtcggattggtagaagtcgttggagtcggtgccagagaactggtggacaaggaactgacgggcacagtgaccagagttggtttaggcttcgctgatagattcagaggcataacaggcactgccgtcgtcggttgctcaattttcgtcactggtgttgcaggatcctggcgatattgcattgtttgcatgggcaacggggacggcggtggaggaagttgctgctgttgcttcaccggcgtagtcatcactactccaggcttataggcattccttttaaccaccccatttggtggttcgagctgttgctgttggcattcctgttgctgttggatgtacgtatagtagttctgttgctcgagctgctgctgctgctgctgggttatctgctgctgttgctgttgctgaagctgatgttgctgtttctggaagatggcctgtgccaaattcactttagtctcgcgctccggcatctgtgcgttggtgttgttttgactattgtttgcatgcaatgccgacgcgttgctcccgtgctgcgaagcattattgctgttggcattgttgaaactgcgggaacgactaagctgtttggggtacttcttctgcaacaatatctccttgttttcaactatggcttcattttgagagatcaacttggaaatgtgttcctgcactttcgccacattctgaaaaggataacacaaattttagtttagtttttctgtaaaaataaacttttagtgcaacactcactacttgcttgccaccacttgagctggcaaaagtgctgagattggcggcgggcgtgggagtggctggtgctgttgctacactggaaatctggctattggcacgcaccaactgtaaacaataaaggtatatagattataattaatctcctcgttcaaaaacaatcgttcttaaccaacctgttgcggcgggagactcggaggttgttgcattggtggtgtcgccttgaccaacggtgggtgttgctgctgctgttgttgctgctgctgtgccaggtggatttggaattgctgaatggctaacgcatgctggtgaatggcagccgctgtatcttggttgtagtatgaaggttgccccaggtaatacaccccgccaggtggcatggcagctagcaatgattgctgggccaaaagggattgctgctgctgcaattgcaactggatctgatgcgagttaatgtggtgcttcatcttcatttgcgtgcttggcgaaagcgtgggatgcgccagtgacggctgctgaaccagaggaagctgaatggacagcttttgctgcgccaattggtgttgctgttgctgttgctgtatctgcagttgctgctgctgctgttgcagctccttactgctacatgagtacaacgaggcattgtggaacttgggcttatatggcttatagtcgatcgactggcgatgctgggcagtggccgagtggtgattgtccgctgtggtgggtggcaatgttcctgctgccggcgagcccagaggcaattgctgcatgtaagtgggcagcggaggctgttgaatgtatgcgctcttggccgcagacagtgtggaaggtgagggtgtgggcgaattgattggctcctcgtaaggcgaaccagcgcgactcggctgcaaaaacgtaaggagttacacatgtttgcgataacaatcacagttatatttgacttaccaactctgaactactgttgctcagctctgcatcctgatcggataaaccatcgtccgcatcggctggcacttccaggccccgcgctcttgccgcatgcgatctcgagcggcaatgtttgtacaaattactcttcgtcttaaacgcaatgccgcacgtgtcgcacggatacggccgttcgttcgtgtgggcccgtatgtgcttctccagcaccgagggcttggcacagatcaagttacagtactgacaaacgtatcgtccggacttctcgcatgcaggatttggcgctgctgctccgcctggaataccaggactcactgttgttggctgcgtcaattgctgatgctgggcaaatgaagccggtgacagtgtggcatttgctgcatggttactgttgctgttgctggtgctgttcgtgttactgttgctgttggctagaggcgttcgcgttcttcccgccgctttgtagccactattgctgatgatgctctcctcatgaccaatggcattgacatgattgctatttacaaaattggcactgaattcatgtattgctactgaaggcggcggcgtctgttgctgctgctgctgctgctgcacttgctggtggctttgttgttgggtcatcagatggtgaccgttggccagcggcgttgttggtggcggtgaaagcgaactgtttgaggagagcgatgtggtgcgaacggcatcgccacttgcttgcagtgctccgccgccattcgtcgcactccagctgtccacctcggtggtgctggccaaacgtttgaacttcttgtgcagatagcgtgaaatatttgaccgatcccccaacggagcctcatcggtggcgggtgtggcatttacggtggtctgctggctgttgatgatgctcgagttgctcatcgtgttggccacattgggagccactggctcctggttgctgctgactgctgccatctgttgtagcgtcattttgctatcacttagacttgctttatctctactcttaaattcataattattctcactaatactattatcactgtggtggttgttgttgttattattacttgtgttgttattgttattattattattgttgttgctgatgatgtggttgctgtcaacagtcggcagcggcacctcgcctagcttatctcgtgtgcttgtgctgggtttgctgctgctgttgctgttgccactagcagcatctgttgttgctgctgctgttgctgccgctttagaagctgttaatgttgcatctgttgctgttgctgttgcagatgctgatgctgatgctgttgcctctgttgctgctgccaatgcaattgctgcagcgatgttggccttgttggttgatctctgagtgactatggttgctgttgcagtttcccgatatgtccgcttcttggttggcgttgctgctgttgttactgttgtggttgctgctgctgctgctgctgctgccgctgctgctgtggcacgtcgcgtattgttcactttattggtcttgtactgtttgcctgcggttttgtaatgcttggccgttgtggtggttgcattttccatattattatcgaatttattatcctgtgacgtatttgcagtgggctcatctataccgaaacgagaagatagagggagagggagagagaaaaccgaaattaattcaatgtgtttcgcataatttaatttaaatagcaatgctaattgatacattcatgataagcccatttatatacactgatatccctgctaggtaatccagtagaaatcaaccacatctgactttgtggatttgcaaatcttcggacgattaaatatttaatattagtttctaatacacccttgtcccctataagtcctcacatgattagtgagaggtttggttttatcttttatatgttaattgcgctgttatgttactgttactgcattgtattgattcatcgcttctaaataaataaatatataaaaaaaaaaaacccttgtcccctggccaataaacatctgcggtttgcatttgggtttcccaagacgagttccctgcccatatagtacacttttatttcgagccccattatcagcactaattcgggctcaatcttatcaacgcgtagccgagaatgccagatacggagcacgctaattctctccatggcgatcaatccgtcaggtgaatcacaagctggcgaattcccgtgctctattgaaaatcaatttcccactctgtgaacgtgtcaacatcgataaagcacagtggcgaaaatatacgaacacacacaaatgtatattcgccttgtttctttttatcaactttctattttgaattcccaacttagctggggttcaggccccacctgccgaaaaccagacatgcgaccaaaagatacaaaaatccaagaaaagtgacaagtgaagtgtaatgactggtgtcgctggcatttcgtttgttgttgggggcttccttatcaccgctcgtgcacacatgtgtgacaacagtgcgtatcagtactgtaaagctgctggcaggtgtgtgattagcaatgggattataaagcgttgccaaatatgaagagtgagtatttgagaactccatttgctcgcattaattaaggcttcagtttgaaaaacaatttaggcagtctttggtaaattctttgttttgtgcatgccaaacgaaacgaaaagctgcaaaaatcttttaaaaatttttcacttttgctgctatttatgtgagccccactgtctgcatagatggtattatatgactcttggccggctgggctgtcgggcgattagtaagccggggcagttctcaaatcacaatcgcacacagactgaacacaaaaaacgctcactggcaaccgagctgggtcgcgttaattgactcgactgcggcgactgtttagcattcagcgttattattatacacattatacggcattatgcgatcgcagcgactctcgtcgcgtaccaatgtttactcaatttgttatcagcacggctggctaataaggctttcaaaccgtgcgaccgcaaaaaaaaaaataaataaataaaaaaaaaatgaaaaaaattgcccaaaagttccattgataatgccaagctctacatgcacaggcggtaaggtaagtattttcggtacgtgtgtttgccagattcattatcagttatcagtggggactatcgtgcgcgcctgagtcagaaacagagcacccgataagcgagccccgttgtaagccaccaagtgattgccaatttgccggagttcagacgcgttgacgtcagttatccgatacgtagtactattcgttcgcaatcgtaaggggctatatcagattgtcaactcattgggcaattaagtggcattcgctggcgattagctgttcgaggatacaaatcctaattacataatcatgtgtagtaaatatgtgtatgcactcgacttattaataaaacgagtgagtgggtcaattacaaggcgccaactgcgccacaattgaaatgcatacatatgtgtggcgattacacggaatgtgttgtttcttgctagtgaaaacaaaagcggagcagacagtgtgtgtgagcattttgactaaataagtagaataaagtttaataacacaacgcccagaatctgtctttcgaaataatatttacatttgtgttcattcgctgtgcgagaaactattgaagttcaactgtacataatgacaaagtgggctatacattcattatacagcagaaactggcgaaactaatgccatcatctacagtcacgacagtataataaagtcaagcgggaataaagaagataagctaatcagaagtaggcgcttataaaaacgccagcaattaaaaccagaatactcatatgcaagataccccgccacccaatgtgcaaacaattagcgcaaagtgcacagtgacgtttaaagatcccaagttcgtttatccaccatttagtttattgttagccacgtaaatccaattgtcagagtcatcaatatcaatacgacgttttcattatcacgaacttttgtttaacgatcgggggtcttctaattacgcctgtttgccagcattttgaggcgtgaaaacggcaagtgaacgcgaaacacatgggaacgtatttcaatatatgtgaacaaactggaactgcatttgcattggcattttcatttgcatgcacatttttattgagccaagcgaaatacaattgcccctgttcaaagtgcacataaataaagcgccacggcaaataatcgaatagggttcggtacactcttacaaatatctaaaaattggttgcaattagtagttcttctaaccagtaaataaacacacaatcttagattttaaacaccaacttccgcgccaaacttcatgaatatctaagatacataaataaatcacttcttattaaatcatatttacatttgttcagagagtttgtttttcgaagcatatggaaatgctggcattgtttctgtgtagaaaagcttgataagtttgcagctcatattgagcacacgctatctcgcctacgtcacaagtgcatttcgcgtttgactgagtgactgcctgaattcgaaattataataaaaccaaaaaaaaaacgagaatacatataaaaacacccacaccagcgcagcgaaataatgaaaaataaataacaaaatcaacgaggtgcggcggcaacggcgccacaaagtccacacatctgtctgacggtcagtctgtcagtccgtcactctgtcaatcggtcattcgctcaatccgcgcgatgacgactacgtcatcgcagagcaaaaagcactaagcactcgcccacttggcaattgtttataatttattagtaagaagcgttttacagcggttgagcagaacgaacgaaaaatgcatatgtaatagtataatacgtcaaaaaaaattcgcggaaaagattccgaaattccagcgaacggccaaaatgcgaaatgcccgacaaaaatgacgaaaacggcacaaacggtaaagagaaacatacccaagtttaattgtgaccacacgcatttttccgcctgtaccgctcatttgcatagttggtgttgttgttcgtttggtttgaagcgcaacaattggaagtgcacggcgagaaaaatctggcggcgcgaatagcaagaaatcgaaaaggcgacaatcgacaatcgacgacaaccgacgcgcctgaaacatttaaggcaactagacgaggcgaccagcgaaattcattcagagtgtgctcagcgtgtgtgcttgtgtgtgcatgtgtgtggtgtgtgcgaaaagaaaacgaagaagcgaccgaacgaagcaaaaacaacaagtaagaagcccaaagtcgcactagtcgactacaatgtacccttgagtggcagtaaaagttattcttactacaaattacgtataattagtaggaataggctaaacgttttggcattctgcgattttgagttgagcataacgaaaatatcagttcagaaaataagtatatattaggaaagttgaagtcttcatgcccgaaaaggttttatagggcagtctatatcccagaatattcggtagtagctccaatagatcataagcttattaatttttctcatattgaaaatacatctgtattcaaataaagataggtggaaagatttcttgctatagcgttttttggtaaatctattaattggtataatattaagaagttgttttgtaatatctttacttattttaaaaatgccatatacccatgttttcattcagttactgagtgttaaagaggcgcgacgtcagcgcaggcagcaaaaaaagtacaataatcaaataattgcggcagcttcgtcgtcgccccccgcacactcacacacaaacacacacatgtgctctcaatctcctctccactcattcgcaattgtcaatcaaatgtaagcacagggtcgccacttctttttgttcagcttttgattttgcggcagccactgagaaatgatcaaatcaagcaaaaattaagactcaaaaaaaagtataaaaattaaacaacaacaggtgacgcgaagtacgaagcgaaatgaaacgaaacgattcgaaatgaaagactgtcgccagccagtcagacgttgctgttgttgctgcagttgttgttatttccccctattgttgattacgtaccccatacacacacactcacacacaagtgcgctccgtaaaacacgcgcacgcacaccaacaaacgaccccatcggcgaccacattcccccgcacaaatatgcgaaattttgctgactaaggaaggtctggggagcaccaggcagaaaaaaacagcaaaaagcaaaaagaggctaaaaagcacaacgcgataacaacaaaagcatttaaaacgtagaagcacaaaacgaagcaacggaaaaagtgataataaaataataattgctacagcgcacaccgatcgcgcgctcgagagagagagagcaggccagagttgccatattagctgcgagagagaaaccccatcagcaacccccactccatccccaatctactaattcagcacgatctgcccaactgtgtatcaccttaacttgtttatagctgaccttttttttttgtaagtcagttaggactatcgtaagagatataatttagagcatataatgtcatgctttaagaaggaagtctggttttgtacaattcgaacgctgaatatacacacattaacagtaagcttttatttactagacggcatcgctttaattatctacaggtattcttagctttttttagatctggctacttttccatggctgcatcactgtctgccatgtggcgacgaagccccacagccagagccagtgctcccccgctccccgctccatacctctagcggttcgctcgcgaacatgactaagccaaacaacttgacaacactgtcgggaattgttgctgcttttgagtcaattcataagaaacgaggaaacccgccgccatatcgttgttgctgccgtatttatttacgtacatatgcctgtgtatatatgcatgtgagattgttggtgtgctggcatgagcatgaatcaagttaaaaattttaataattttgcccgatgttgtggttgaaaacgagtttagcttgttgagcttgagtgtgtgtgtatgtatttcagtgcggctacttgttttcttcagtcctcttcttcttcttcctagtcgtcgtcttctcttcttcttgctccagcttggacactgcgataatattttacactcatgcacacatacatttacactacgacgaacagaagagcttgataagcgctttgtgcgccatctccctctttggtaattgaaaggcaaggggaaagggtaggcggctgtgacgtacccgtgtctcactgttattgttgttgcccactcagccgtgctgaagtgttataggaaatcaaattaaggcgattaaagagcgagtgcatgcgctctcgaacgaaaaaaaagagagagagagtgacgatcgctcttgacggaagatagaagatgactacttaagtggggcattcgtgaagattgataccctacgatgataattactgtttgcctacaaaaagcttttttactttgatgtcttgtcaactttaacatacagatggaatagttatgctttatctttttgaccaaaacatactttgaaacaaaaaggaaagtttataagatgtgtttctttttaaattttttccttttaaattgcacacaaacgacgtacatatgagaagcaaatgtttaatattaaactgtttaatgaatttaactatttatgacccataaatagtcaacccatagtgtccaagaactgataagaacaaagacatcttgcctttgagcagaactttgccatttgctgataagtttgaaagcgatgcgagccaagtcggtatacagtttcatttatttattatttatttaaaatgggtttccaatgcagaatattgaaataaacaagcacaacgccaaacggttgatatattatggggaattgcgaaaacagttctcgaaaagtgctctgacgtcgatcacttgactaatctggcgttcttttcgagaaataaatttcgattacggaggcttatcaatcgacgggccgtggactcttttgtggaaagtgaaaggtcaaggtacgcttacggaaattggtaaatagataagacatttcgatggaatatttgttgggtctataagcctctttgcaggagatctatttcgtttatctatcgtcgaatgagtaagcaatatattaagcgatttggcgtacacaaccaaattctcggcacattatacacttttcacattagcacggaaattcccaaattttctttgacgtcagcagagaaaatttgtaaaatttctcgagagtaaaaatcatgttcttttcgtactgaaatgttttccgattgccaaggtctctgggtttacatgtatgtaggtgaaaatctgtataaacaaaattgatttttggcacagcaaaacaaaacagtttaaacaatataatttagcactttttagacattcctctatagatttatggactattaaaatatatctaatttaataaaggtgcctaaaggaaaagcttaaaaacttagcaaaaacgaataaattttccagattcataatcatatattttcgaatattattatgattattgcttgggggcacgataatcgtaaatatgatatgagttcaaagtaaatatcgaattatttccttctccgtattgcgaaattggtaagagaacccctttaaatataggaattcgtggccaaaagtgttaaataattgccaggccaacaattttttgtttacacacaaagcgaagcgaaacacagcagaagatcaagaaaagcagacagaaatcgttcgataatttgtgtttatttttattttcccactgtctttgacttttgactttgctctgctggctgatagaatgtgattttctccattttcttgattttcttgattttcaattttgttttggtgccgccgcctcgctagaaaagtatttttaaatgctccaactacgtaagacgacattcaagtgttttattttagacagtagacggtatagagccaactagtcggctatatatacacacattggcgtctatatatctgcataaatatttttagttgcctctattggccttttgcgttagcacatttttgttaaatattatctatttgtatttgcctttatgacagcaaaatggaaaactcgaaacacttcgattacgcaatttggcgcagcccataacgatcataattcaatttcgcccccccataaaacgaatcttgaaacattctcgatatttcaaactttatggcgccgcaaaagcaaaggctggtgctttttttttatctaatgtcacgttatttcgtatatttcttatttcgtggtctaattaaattaaactgtttataaatacttctgctctatcaaaggccaccaaagcaaacgattaaagaaaagaatctccaaatcgtgcatttgagagcaaaccaaaaatgtttcccagcgccaagccatcaaaataaaaattttcacaaattgtgtgcgttgttctttcttgaaattttttttcttttcttttcgtttttttctttcttcttctttctgcttgtcttggcgttttggcatttgaaggacggaaatacgttggcggcgttgtgaatttttgcatattagcaaaaagtgagaaaaaagaaatagccataaatacacaaaaattttgataaattcaaagcgcttacgtaggcaaactcatggggctatgcgaatgattcgcttcgattcaattcgattcgattcgattcgaatcgagccgatgaaatgtatgcacaggcatgcgcattggccgtgaaaaaaaatggtaacagatttccagacgcgcaccgaaagtatctgtatctgtatcggtatctgtgtctgtggctgtggctgtgagtgcggagtatctgttgctctgtagctctgttgtcaaggtcatgactgctctttaggggttgccccgtcgataaacatgtgtcgtcattccccaggcggcagggcattcctcaaaactcacaagcggcacacaggcagcaaaggcggaacgtattataactgttgcatgtttaattgttcgcaaaacacttgagagcagcagtcttaagaccctgagatatgtacgtgtacagtgaaactccgccatgggaaacatcaagctgaagtactgacaatctgattttttaagtgattgtatttttaatatatagtttaaaaagatcgataaatgcttaattcgactcctaattttttcacgctactttatatcctagttttagatacatcccgcagaatctttagtttctaaagatttcaaagagcaaatgtttaagttcgggtcgtaacttgcaacaaattggtgtcatgctagaagtttccactgtggcagcaggaacagcaacagcaacagcgatttcggctgaacgccccgtggtgcagtcttaagtggatttccaccttaagttgcattagtatcgatgttgttgctgctcacgttgcacatcgatgtggttgttgttgctgctgctgccgccgctgctggcgtgtcaatgacgttgcaagccttttgtttgtctttctacctagccaggtatcctggcgccggcttaatttacgaaaaggtaaaggtaaacggcaggtaaaacgcctcaaagtagttcaagtccaatcagcatgctctcccgctcccgcacgcacaccaaccaatgcacctttttacccacaccaatgcagagattatccatccactcacccgcacacgttgctcttcttgttgctgtagaaactaacactaatactaatctgagagatattgcggcccggccgcgcggggttgcccagatttaagtgttgtttttgtgttgcttctccttcggtattgtattctcttgtgagtgggacggggggttggggggatcgctctttcgacttttgtttatttcgaattttcacagtttttcttggaattccttccacactcgcttgctcactcgcacgcacttactcactcgctctcttttctatttcctttactttttaagagagatactttgaaatttgcactttgattccgtgcgtgttttcgtatactatttttgcaccgtagctaattagcatattatgacattcatttcgctgtaaccttttcctcttcgtggctcttgccgtgcactcttttgcgcgctatgatctaatttgattaatacaaaacttgttgtggcggctgcactcgcacttctcgcccacacacactattatacacaaacatgcatgcacacacaagtatgctgagcagaaacatacgcgcgattgttccgttcttttgtggtttcttttctgccttttgtttatgttgtgctgcgttgttgtttattccgacttgttcgaattaattcatcgcaccgccgaaaaattaattaatagccacgccgcaccgaacaagcgaacaaccgcaccgaacgacgaaagatcgaagaatggcgcgcctcgactgtttttttcgccgtcgacgctggcagcgacgcgggcagcgcagcaggcagcgacgcttaacccttgtgtagactttcgaagagctgcaaagtgcaggtgccaactctcagttgatcttgatcataaagttatagatctaacgcggttatcatgatttagtttatttaattttcgtatctatatacgcattgcttaaaagtttagttttattattaaaatatgatatttttacattcagatgagatgtttttccagttttattattgaagctaagacgatatgttatcaacaccatttaagacattccctattaccatttatttaatctttatgacattgccaggagtggaaatactaattattattttatccgtaccctaaccctgaaccagtcga

SEQ ID NO: 28289 - DNA, 8919 bp, DROSOPHILA
gagaatacaataccgaaggagaagcaacacaaaaacaacacttaaatctgggcaaccccgcgcggccgggccgcaatatctctcagattagtattagtgttagtttctacagcaacaagaagagcaacgtgtgcggatgagcccactgcaaatacgtcacaggataataaattcgataataatatggaaaatgcaaccaccacaacggccaagcattacaaaaccgcaggcaaacagtacaagaccaataaagtgaacaatacgcgacgtgccacagcagcagcggcagcagcagcagcagcagcagcaaccacaacagtaacaacagcagcaacgccaaccaagaagcggacatatcgggaaactgcaacagcaaccatagtcactcagagatcaaccaacaaggccaacatcgctgcagcaattgcattggcagcagcaacagaggcaacagcatcagcatcagcatctgcaacagcaacagcaacagatgcaacattaacagcttctaaagcggcagcaacagcagcagcaacaacagatgctgctagtggcaacagcaacagcagcagcaaacccagcacaagcacacgagataagctaggcgaggtgccgctgccgactgttgacagcaaccacatcatcagcaacaacaataataataataacaataacaacacaagtaataataacaacaacaaccaccacagtgataatagtattagtgagaataattatgaatttaagagtagagataaagcaagtctaagtgatagcaaaatgacgctacaacagatggcagcagtcagcagcaaccaggagccagtggctcccaatgtggccaacacgatgagcaactcgagcatcatcaacagccagcagaccaccgtaaatgccacacccgccaccgatgaggctccgttgggggatcggtcaaatatttcacgctatctgcacaagaagttcaaacgtttggccagcaccaccgaggtggacagctggagtgcgacgaatggcggcggagcactgcaagcaagtggcgatgccgttcgcaccacatcgctctcctcaaacagttcgctttcaccgccaccaacaacgccgctggccaacggtcaccatctgatgacccaacaacaaagccaccagcaagtgcagcagcagcagcagcagcaacagacgccgccgccttcagtagcaatacatgaattcagtgccaattttgtaaatagcaatcatgtcaatgccattggtcatgaggagagcatcatcagcaatagtggctacaaagcggcgggaagaacgcgaacgcctctagccaacagcaacagtaacacgaacagcaccagcaacagcaacagtaaccatgcagcaaatgccacactgtcaccggcttcatttgcccagcatcagcaattgacgcagccaacaacagtgagtcctggtattccaggcggagcagcagcgccaaatcctgcatgcgagaagtccggacgatacgtttgtcagtactgtaacttgatctgtgccaagccctcggtgctggagaagcacatacgggcccacacgaacgaacggccgtatccgtgcgacacgtgcggcattgcgtttaagacgaagagtaatttgtacaaacattgccgctcgagatcgcatgcggcaagagcgcggggcctggaagtgccagccgatgcggacgatggtttatccgatcaggatgcagagctgagcaacagtagttcagagttgccgagtcgcgctggttcgccttacgaggagccaatcaattcgcccacaccctcaccttccacactgtctgcggccaagagcgcatacattcaacagcctccgctgcccacttacatgcagcaattgcctctgggctcgccggcagcaggaacattgccacccaccacagcggacaatcaccactcggccactgcccagcatcgccagtcgatcgactataagccatataagcccaagttccacaatgcctcgttgtactcatgtagcagtaaggagctgcaacagcagcagcagcaactgcagatacagcaacagcaacagcaacaccaattggcgcagcaaaagctgtccattcagcttcctctggttcagcagccgtcactggcgcatcccacgctttcgccaagcacgcaaatgaagatgaagcaccacattaactcgcatcagatccagttgcaattgcagcagcagcaatcccttttggcccagcaatcattgctagctgccatgccacctggcggggtgtattacctggggcaaccttcatactacaaccaagatacagcggctgccattcaccagcatgcgttagccattcagcaattccaaatccacctggcacagcagcagcaacaacagcagcagcaacacccaccgttggtcaaggcgacaccaccaatgcaacaacctccgagtctcccgccgcaacagttggtgcgtgccaatagccagatttccagtgtagcaacagcaccagccactcccacgcccgccgccaatctcagcacttttgccagctcaagtggtggcaagcaagtaaatgtggcgaaagtgcaggaacacatttccaagttgatctctcaaaatgaagccatagttgaaaacaaggagatattgttgcagaagaagtaccccaaacagcttagtcgttcccgcagtttcaacaatgccaacagcaataatgcttcgcagcacgggagcaacgcgtcggcattgcatgcaaacaatagtcaaaacaacaccaacgcacagatgccggagcgcgagactaaagtgaatttggcacaggccatcttccagaaacagcaacatcagcttcagcaacagcaacagcagcagataacccagcagcagcagcagcagctcgagcaacagaactactatacgtacatccaacagcaacaggaatgccaacagcaacagctcgaaccaccaaatggggtggttaaaaggaatgcctataagcctggagtagtgatgactacgccggtgaagcaacagcagcaacttcctccaccgccgtccccgttgcccatgcaaacaatgcaatatcgccaggatcctgcaacaccagtgacgaaaattgagcaaccgacgacggcagtgcctgttatgcctctgaatctatcagcgaagcctaaaccaactctggtcactgtgcccgtcagttccttgtccaccagttctctggcaccgactccaacgacttctaccaatccgactagtagctccaaaactgctccaccacctgctcaggttaataactcgataattaagaacctactgcttaatgctcgaggattggccgtgccgattggcgaaggcgatgatgctgtttattcgtgtcctatctgtgcaagcgaattccgcagtgcggacgatttgaagctgcacaacagcacttactgtcaggatgcgagctcaagtgccccaatgagtccagcatcttcgccattccgctccaactcgatctcgctgagtctaccggagctgaagagccacatggccaactcgaagaatcccttatctctggccaagttggcctggtcgcagttgaagaccaaaaggagcagtttggtattaagtcgcctaagtgcagcacagacgccagcaaggacatcaactgtaacagctcccactgtaaccgcttctgccccagctcctgctgttgctacggtcactgctccatcatcagcacctgccccccagattgaagcactgcgctttgtggatgcgcctctaccatcgcctggtccattgttgggaaaaactcccttagtggactatgctcagcaaagtacaccacgcaaggcccaggattctgtggtcataaccaaaatgcacgaggatcggcaatttgtgattgaagctcagcctgccaaacgcatcaagactagcgatttggttgtagcatcctcctctcagcaaccgacaagtttcaacttttcctttaataatcagaatagcagtaatagtgtgccggaattgcagtcctccaaggaggagcgactgcgcagattcacctcttcgggaggcagcatgattcccatttcggagtgcccagacttggacaacagccccaagatgattagaacaccgttgctgtccggcggaagcttccaggatgtttcggtcaaagtcaacaacgaaacaggatcatccagtaaggagcgcaagctgatggcactggtcagtggcagtggacttctcggcgttagctcaggtccgcagcactttcaatttccgcccattaactcaataactgccttcaatccgctaacgctgccaccgatgagcggtggagataaaaccactccagtaacaccaatacctcatgtgcctggaatgccaggacccggtagtctgacaccacaaatgccgctactgccgcctccgccacaacagctgcagctacccattccctctagtcgaggtcgcagtccaaatcgaaagcaacccagtccgctgctgttgggaggaggatccggtgaactgaaggccctatcgccattcggtggagttcagaatgtgccaagcgagttcagtcgacagccaccaactcctgcccagcggcaagcgctgcagtggaacagcaaggaggcaccgaagaaagcaccatttaactttctacgcatggctgataatgtgaagaccactgaacctgaagttcgacactttaatttggaaaatgtgatttctgggaaacagcaagagttgcccctaacaccgctacatgttgatactcccaacggaaacgctccagaagagaccagtcccgtagccagtgcctcagcatcggcgaagtccaagtttctgcggcctactagtttgccacttaaacccggtacttttactcctaaacgccatcatggcattacaccgacagccaatacattgccgctgatctcgccggagacccccaggccgtccaaatcctgtgtgcaactgtatctcaatggacacgcctacacatatctgggcctcaaatgcagcacaaagatgttttactgtacggtgaactgtccacagccttcgtatgtggcaggaatgcacaaactatcgatgtatagtgtgtggcaggtttgcgaggagaaccagccacatccacttggattcaaactaaagcaagttatggcactctacgactcacgtcaaaggatgttaggaaatggcagctcaaccgccatggctggatcgggaaaacttagctacaacttagtcgcttcccagcaaatcgtatcctccccctcgacgtcctccactagcagtgctttctatcaaggacccctaaagaccccacccactgtcacgattgccgctctcagtgaggcaaatgtggcggccaaggcgaatgaggaggcacaggccaaaaagttggagacaagtccatccgggcagcccctggtgggtggctacgagtctcatgaggattacacgtacatccgtggccgcggaaggggaagatatgtttgctccgagtgcggaattcgttgcaagaagccgtcgatgctcaagaagcacattcgcactcacacggacgtgaggccattcacatgcagccattgcaacttcagttttaagaccaagggaaatctgaccaagcatatgcaatcgaaaactcactttaagaagtgcattgaactgggaataaatccgggaccaatgccgccagacagcgagttcttggatgtagatatggactttgaccagcagtcatccacttcggcaggaggacgcacatcatcgatggctggggaatcggattccgatgactacagtgataatgaatctgaaagtagtgatacggatgagtccaagtcgcgacagaaagagcacgaagcagccagaggcctactctcgttatcaatgacgccgcccataccgcagagcgtatcgccctatccgcagttgcaggatacacccctaccagcggccagtcctgcaaacagcattggctcttcgggttcgcaacctaaaagattagtgtgctcctttacatcgccgaagccgcctttcgactaccaaaagcaggaacagtattactccaatccggaggagtccaaaccgaaacggagtgtggccaacgaggagagtgctcccatggatctcactaagccacgcggctccatcttattaatatccccctcgcctgtttcggtgcccgctcatgatcttcccaaatcgcaggcccaacagatgcacgatgttatctttggaacctccggcaacgaaagcggtttcatgaagactctaatctcggtttcggacaaagtgcgaatatctgccgaaatggaagagcaggccaagcacgaggccgagggcgaggatgttcaactacagacctacattaaggagcatgcgctgcatcaagccaagataaagcagagtcagtttagccgcagctatctgatcaacacattatacacagcggcgtctcctgtaatgagcagtagtagcactctctttaccgccaacagcaggcccgttatgagcgtaaatgaggtacctagcatcgaagtgcacgaagtaaagaccccagaggccattgagtcacctcggagtgcacctgaacaggccccggttattcttgctcagattgcccaggaagaaaacgaggagcctaatatcgcagagccacacaatgccaatctgcctgctgcagtgcagcaaccggatgtcaatgaatttactggagtacttggaaatccgactgcaccaccaacatcgtctgttactgctacttcagtaagcacaacaacagctgcacctgtggcaccctcatccactgccaactcaactcagcccgcgcagcgtactgtgattgtgggtgaagatggcttcaaaagctctactcccactagcaagagcggcgatctccagcatgtatcgtatggcagaggagtgccgccagctcccattgcaggtgatgcacgtcccacctgcaccatgtgctccaagacgtttcagcggcaacatcagctgaccctgcacatgaatattcattacatggagcgaaagtttaagtgcgagccatgcagcatatccttccgcacgcaaggacatctgcagaagcacgagcgatcggaagcgcacaaaaacaaggttatgatgacgtcgacttttggtgttccaaccacctcaaatccgcgacccttcgagtgcaccgactgcaagatcgccttccgcatccatgggcatttggccaagcatttgcgctccaagacgcatgttcagaagctagagtgtctgcagaagttgcccttcgggacctatgctgaaattgaacgtgccggaattagtctcactgaaatcgatacaagcgactgtgaaaattcgctgatatcactcaagttgctggcccagaaactgcaggagaaggatcctggtaagctcagtagctataccacaccttctggcatgatgcagctggcccaggatgcagcaggtcccgtctcgcaggatagtgcgtccgaggatggctttagtgccgcaattgcctcggctatagcttcgctggacaacgacagtgctggcaacacacccaagcgagccagctcgatgtccgaggatgaaacggtggccaatggcctaaaccatagcctgaagcgtcgtttgccgggcagtttcagcagtacgggcgaggagagcgataatccaccggaaagcagtggcgagaagcgggctcgttctggccaggagctgcctgttcccgtggccgttcccgtggctgcttcagcagcggcaagcaactgacagtacatgtacatgctgcagcccagctgaggttatcagtatcccgcggtctaccacctggacagcagtcagtacggcatctacaattccaggatcgagggccgccatgaccaaaccacctccaacgagcgcatatcaaatgtctaagcatatcgcatatgggcacacacacaacttactctagagctagcctataagacccacctctcttcgatgatgggcccaactagtattgggctaatcgcgagtagtaatcaaacgataggggagccagataagcgagtcagctattccagtgtaaacactctaggcgaattgcgctaaaataatcatatacaaagccttttacggttttaaaaggcagtcaccccacacagatcgtttcgatctgcctcttaagtatttaggttaaggaatcgtcatcagctagccctagttataagccaaccaacgagcacacttataaatctatctatattgtatacacttaaccataatttgttttcgaaatgcataaatgcaaaaactcctgaagtgctgtgagtctatctacaaatgtaaagatccgagagcgagagaagtgtgttatttttaaggcctagccccgaaaatgaacctccaaaccgaaccagaacacacccgcacactaagtatattggttttctatgtccaaatccaagttttgccctttgaaaatcacgtagttcttccttatttcaaattgttatcacaccaagttttgaagcgcaactattaacggtgaatgagaaatgacttgcgcccctagttttgttttaattctttaaacaacgagaccacgagactcatttaattgtttcttttaattttgtatttgacagaagagaaacgaaatgatgaaaaaaaacgctaactgtaaataatcaatatgttgtcatatatgcattaagcggtaggttagataaacaaactacacaaagttgatagatataaatgaaatattgtacaaactgctatggcaagcgctgcagcaaaatctatatatacacatagatatatatctatatatttgaatgtgtgtatgtggttaaacaacaagaaaatgaagtgatctattacattattgtaaaatatatcaaaaaactgagaaaaaaaaaa

SEQ ID NO: 28290 - protein, 2532 aa, DROSOPHILA; identical to SEQ ID NO: 17187

SEQ ID NO: 28291 - DNA, 4845 bp, DROSOPHILA
ctttcatatcttttttatgtatttggaatccaatcccttctttaatgtactaagtaattaacttaccgattgtgtaggtggcaccatccaccgtgaatgtggccgctttgcatttgttgaagaaacgcgatgcgaagtccagagctgattttttcaagctcgacgatacccggcggatgggtgagtccggacaggaactgggtggatgccgctccgaagacacctgatggtgcaacacctgctggcttgccactccgctggccacggtgttgtccgaggtcagtcgtgccgttagcactgcgggcactgcagctggaacagccggactgctaccgggaacaggagctctgctcatcacaggtgtggccgtcccgggggccaaacggcgtggagcattcgttagattcaaattggacattttgcacactcgcctgtccctcgtttccttttcgctagatggatttttatttctgtcgcaggtcacttgataacactcattttgtttggcactgaacaaaggtcagcgtttcaattgggcacctgctcatccgaaaaaatagttataggtcagacctctggtcctgaccaagccaatttgttgcaattaacgtttggaaattgaaaggcaaacagaaattagttcgcctgtggcacggattaaatggcaatatctggttcgtttgtaaattgaaaatgggtgccacggaaatcaattggcttttcagttatatcgtttatcaacaagtaaaaaatattatagttttagtttagaaatacgattattaattttagtttttagttgacttcttcagaccaagtaagccagcaaaatttctctggtcacatattcatgaaagttttaactctataaaatctgtgttcttctgccattcaaagaagtttatttcttaaattactacttttgtttggaaagtttaaatgggaacttcggacaatttccattttcacagcacgaagtatgcgtggagttgccgcaggcatgccagcctgcgtagagtagagtgcctgaagtagagtgcttcgtgcgacgtcacgaaatcgatgtattactgctcagcgagacacactgcaagggggcagagacgcctaagctattcggatttgtagcctacactgccaatgatccgagtggtggcaacgccaaaggcggagcagctatcttaatcaaaaatagccttgcccactttccgctaacaccaatagccactgccaaggtgcaacttgcgccggcggttattgaaacggcacttggtcctataagctttggagcggtctactgcccaccgagatttgcatggactacggacgagtttaaggacattttggaagagttccagacgaagttcattgttgcaggcgattggaacgcgtcccactggctctggggtgcgggaaggagcaaccaaagaggcattgcattagcgaatctcgtcctaaattcggaggtggactcgctagcaacaggaggaccaacaagatacccgtacggctgtagaggctcaccagggtacatcgattttgcactgacaaagggtgtgctgggcatccacgctaacataagtgcggttgttgagcttagctccgaccacctgcctctggtaattacgctggatgcgggggcaatatcctaccctaagatggagcggcttatcactaggcgtactaacctggaggtattccaatcgcaactggagtccacactgcccctcaacactgccataaactctggacaggacgttgatgatgctatcgaactgctcaccaacaatatcaagtcagcagctagattggcaactcgcagcatatctcggcagcccgcggcagatcgaatcccaatacccagggagatcctgctgcttatagctgagaagaggcgcttacgcactaggtggatgaggtctcggcacccgtcggacaaaacggaatggaaccgagctctgagtaggctccgatgcgcgttggtgctgcacaaagccgcatggttcgacgaaaggcttgccaataccggagtcgaaagcgaagcgacgcattcgctgtggaaggccacgcgcgcaatcaaaaggcgttgcacgaggaaggcgcctctagtcgatagcaacgggacatggtgtcggaccgacttgggacaagcggaggtattcgctgcgcacctcgccgagcgatttcaaccattcaagcttgccagcctgcaacaggttgaagaaactcaggaccagctgaaccaagcgcttcaaatggatatgccaatcacgccgtttgaaccctgcgaggtagccgaagtcattgtgcgccagagtaacaacaaagcacctggacatgacgtcatctgcaacgccacattgaaggccctgcccagacaagcgatcctctacataacgttggttttcaacgctattgtgaggttgcaatacttcccttatcagtggaagctcgggataatctccatgatccacaaacctggcaagccggaaagggagcccgcctcctaccggccgatcagtctcctcccttcaatttcgaaggtgtttgagagattgattgctgtccggattgtaagcattatggaagcccaggggattacccctgagcaccagttcggtttccgtgctggccactgtactgtcgagcagctccatcgagtcgtcgagcaaattctgactgcctacgacagtaaggaatattgtaacagcctcttcttggacattcgagaagcgtttgatcgagtgtggcacattggactccaactgaaaatcaagcagacgctgcctgctccatattttgggttgctgaaatcgtacctggaaggaaggaggttcgctgtgcgctttcattcagcaatttccaccgagcacaacgtggcagctggtgttccacaaggtagtgtcctcggccccctgctctactgcctgtatagccacgacatgccgcagccagatgtaagcctttacgggaaatctatgctggccacatttgccgatgacgtgtgcgtcacctacaggtcccgatgcgagcacgacgcagccgatggtatccaggactttgcataccggttctcggaatgggcaagacgatggaatattggcatcaatagcagtaaatccaacaacgtctgcttcactttaaagcggagaacgccaccgcccgtctacatcgaggaagtccccgtaccacagccgaacgcagcaaagtaccttggagtgcttttggatcgcagactcacattttccaagcatgtgaccgacatcagaacgcgcctacgtgctaaggtggcgaagcactactggctactttcttcgcgcagtaaattgtcgctatccaacaagctgacaatttacaaacagatcctagcaccaaactggaagtatgggtgccaaatctggggcttagcctgcgacagccacatcaaaaggatccaggctattcaaaataaggtagcaagactcatcaccgggctgcgagtggtttgttcgaaacaccaccctgcacagagacctgaaactcgcaacggtatttgacgaaataaacaagcactcgagcagataccatgacaggctggagcgccacagaaatcggctggccagcgctttaaacagatctcgcccaccaaggaggctcaatagaaggcaaccgagggatctcattacccgatctcctttgacaagggtccgcagaagctgacgcttatcttaaatcctatttgttatatatgattgttatgtaattgtagttaaattactgtaaatttgaaaaagctaactatagttagccggcgagcccaaatgggctgaattaatagataagaaggacacaaaggggattcaagacttccccgtatgccttaataaataaattaaaaaaaaaaaaaaaaaaaaaaagtttagaaatacgattattaattttagtttttagttgactccttcagaccaagtaagccagcaaaatttctctgagctagtcacatattcatgaaagttttaactctataaaatctgtgttcttctgccattcaaagaagtttatttcttaaattactacttttgtttggaaagtttaaatgggaacttcggacaatttccattttcacagcacgaagtatgcgtggagttgccgcaggcattccagccaaacagaatttccattcgaaacatttaattgagcaataaaaaaacgtctgaatgtctcattaccgaagttaatttaaattttgaaaatattttgccataaccgcaattcagcaaattgtgtttctgtgtgggatagtgtgtatttatatttgtgcgggcggctcaacaatagatatgtatcactttatctcccaactgtttcgccatttgcagtttcaatttgctttcatcgaaaattttaagcaaaattgcaattacagctgtgtgtgagtgtgtgaaaagcaaaatcctggaaaattactgtccgcatacaaacacatcgaatgcgaccgaaaagcaagcaaggcattgatgatggtgatcatgatgatgatgatgatgatgattgcagtcaataaaaacggaattacccaggctgaaccaacgttttcggtgggtggagttttctggtgggtgggcacaggttaagcggatgcagagtggggttaagtggaaatcgagggaaagtgccggtacactttggcattgagttgatgatgactttgccgctgtctctggcatatttccctggccgggccgtctaaaatgcgacgaattaaagtaaattgcttggaaataatcacatccagtgccacatcatacaggcctcctagaaacacacagatacacaaccacaaacaagattcacccgcacaaacag

SEQ ID NO: 28292 - DNA, 2775 bp, DROSOPHILA
atgccagcctgcgtagaagtgcctgaagtagagtgcttcgtgcgacgtcacgaaatcgatgtattactgctcagcgagacacactgcaagggggcagagacgcctaagctattcggatttgtagcctacactgccaatgatccgagtggtggcaacgccaaaggcggagcagctatcttaatcaaaaatagccttgcccactttccgctaacaccaatagccactgccaaggtgcaacttgcgccggcggttattgaaacggcacttggtcctataagctttggagcggtctactgcccaccgagatttgcatggactacggacgagtttaaggacattttggaagagttccagacgaagttcattgttgcaggcgattggaacgcgtcccactggctctggggtgcgggaaggagcaaccaaagaggcattgcattagcgaatctcgtcctaaattcggaggtggactcgctagcaacaggaggaccaacaagatacccgtacggctgtagaggctcaccagggtacatcgattttgcactgacaaagggtgtgctgggcatccacgctaacataagtgcggttgttgagcttagctccgaccacctgcctctggtaattacgctggatgcgtcgcaactggagtccacactgcccctcaacactgccataaactctggacaggacgttgatgatgctatcgaactgctcaccaacaatatcaagtcagcagctagattggcaactcgcagcatatctcggcagcccgcggcagatcgaatcccaatacccagggagatcctgctgcttatagctgagaagaggcgcttacgcactaggtggatgaggtctcggcacccgtcggacaaaacggaatggaaccgagctctgagtaggctccgatgcgcgttggtgctgcacaaagccgcatggttcgacgaaaggcttgccaataccggagtcgaaagcgaagcgacgcattcgctgtggaaggccacgcgcgcaatcaaaaggcgttgcacgaggaaggcgcctctagtcgatagcaacgggacatggtgtcggaccgacttgggacaagcggaggtattcgctgcgcacctcgccgagcgatttcaaccattcaagcttgccagcctgcaacaggttgaagaaactcaggaccagctgaaccaagcgcttcaaatggatatgccaatcacgccgtttgaaccctgcgaggtagccgaagtcattgtgcgccagagtaacaacaaagcacctggacatgacgtcatctgcaacgccacattgaaggccctgcccagacaagcgatcctctacataacgttggttttcaacgctattgtgaggttgcaatacttcccttatcagtggaagctcgggataatctccatgatccacaaacctggcaagccggaaagggagcccgcctcctaccggccgatcagtctcctcccttcaatttcgaaggtgtttgagagattgattgctgtccggattgtaagcattatggaagcccaggggattacccctgagcaccagttcggtttccgtgctggccactgtactgtcgagcagctccatcgagtcgtcgagcaaattctgactgcctacgacagtaaggaatattgtaacagcctcttcttggacattcgagaagcgtttgatcgagtgtggcacattggactccaactgaaaatcaagcagacgctgcctgctccatattttgggttgctgaaatcgtacctggaaggaaggaggttcgctgtgcgctttcattcagcaatttccaccgagcacaacgtggcagctggtgttccacaaggtagtgtcctcggccccctgctctactgcctgtatagccacgacatgccgcagccagatgtaagcctttacgggaaatctatgctggccacatttgccgatgacgtgtgcgtcacctacaggtcccgatgcgagcacgacgcagccgatggtatccaggactttgcataccggttctcggaatgggcaagacgatggaatattggcatcaatagcagtaaatccaacaacgtctgcttcactttaaagcggagaacgccaccgcccgtctacatcgaggaagtccccgtaccacagccgaacgcagcaaagtaccttggagtgcttttggatcgcagactcacattttccaagcatgtgaccgacatcagaacgcgcctacgtgctaaggtggcgaagcactactggctactttcttcgcgcagtaaattgtcgctatccaacaagctgacaatttacaaacagatcctagcaccaaactggaagtatgggtgccaaatctggggcttagcctgcgacagccacatcaaaaggatccaggctattcaaaataaggtagcaagactcatcaccgggctgcgagtggtttgttcgaaacaccaccctgcacagagacctgaaactcgcaacggtatttgacgaaataaacaagcactcgagcagataccatgacaggctggagcgccacagaaatcggctggccagcgctttaaacagatctcgcccaccaaggaggctcaatagaaggcaaccgagggatctcattacccgatctcctttgacaagggtccgcagaagctgacgcttatcttaaatcctatttgttatatatgattgttatgtaattgtagttaaattactgtaaatttgaaaaagctaactatagttagccggcgagcccaaatgggctgaattaatagataagaaggacacaaaggggattcaaga

SEQ ID NO: 28293 - protein, 821 aa, DROSOPHILA
MPACVEVPEVECFVRRHEIDVLLLSETHCKGAETPKLFGFVAYTANDPSGGNAKGGAAILIKNSLAHFPLTPIATAKVQLAPAVIETALGPISFGAVYCPPRFAWTTDEFKDILEEFQTKFIVAGDWNASHWLWGAGRSNQRGIALANLVLNSEVDSLATGGPTRYPYGCRGSPGYIDFALTKGVLGIHANISAVVELSSDHLPLVITLDASQLESTLPLNTAINSGQDVDDAIELLTNNIKSAARLATRSISRQPAADRIPIPREILLLIAEKRRLRTRWMRSRHPSDKTEWNRALSRLRCALVLHKAAWFDERLANTGVESEATHSLWKATRAIKRRCTRKAPLVDSNGTWCRTDLGQAEVFAAHLAERFQPFKLASLQQVEETQDQLNQALQMDMPITPFEPCEVAEVIVRQSNNKAPGHDVICNATLKALPRQAILYITLVFNAIVRLQYFPYQWKLGIISMIHKPGKPEREPASYRPISLLPSISKVFERLIAVRIVSIMEAQGITPEHQFGFRAGHCTVEQLHRVVEQILTAYDSKEYCNSLFLDIREAFDRVWHIGLQLKIKQTLPAPYFGLLKSYLEGRRFAVRFHSAISTEHNVAAGVPQGSVLGPLLYCLYSHDMPQPDVSLYGKSMLATFADDVCVTYRSRCEHDAADGIQDFAYRFSEWARRWNIGINSSKSNNVCFTLKRRTPPPVYIEEVPVPQPNAAKYLGVLLDRRLTFSKHVTDIRTRLRAKVAKHYWLLSSRSKLSLSNKLTIYKQILAPNWKYGCQIWGLACDSHIKRIQAIQNKVARLITGLRVVCSKHHPAQRPETRNGI

SEQ ID NO: 28294 - DNA, 2384 bp, DROSOPHILA
agccaaggccaccaccgccattgtgggcggtcgcagcgcagcccaaccggcgacccacgacgaccaggaagcggccacgaccgcttccacagccaccaagcggaagcatctcgagcggttggccagcgatctgcggcagctgggcaagaagggcaggaggagtcgatcggttagtccctgtagtagatatcccgccgttgcggaaacggccagaatgcttagcgaacgatcgctgctgctcagcggatatggagccattgagagcagtgccaagaagctgagcgaagcggcgaccggtggtgcgggtggtggtggtggtggtgcggccggtcaggctgccacgcccactaccagccaactaagtgcacccgcctcctcagcatcctcctcatccatgtcgtcctcctctgccggcagcacttgcaccaccaatgcaaatacggcatcggtggcagccgcctatgctgctttctatttggagaaggtcaagcatgagaagatggacaatcataaggatgcaccgatggtcaccatacacaataacaacaacaacaacaccatcaacaacaacaacagcagtagcagcagcagcagcagcatcatcaacaaccatcaatcgagtcaaccaagtctgggccacagcgtcaagagggagcggctgagtccagggagcaatagcagtagccacaacggcgaactcaccgtcagctcatttgccaggtgagtggaagtggaagtggaagttcgggggtacactccggagagacatggctttattgaatcattgattcattgcatcactgattcgtgatatagccgtgacccatgtgatctgttcgaatgattcattagagcagcgctcaaccgatcacataacaaattggtttgtccactcatattgattatagggaaagatttggtaaaagtactttatgctaatttaattgaaaggtagtttcggtagttttaattaaaaattaaaaaaaaatgaaaccaatctctattccggcttgcaattggcttcacactttgggtgattctccgtgtgatcttcatcctccgtatccgccatgttgcattgctcgctatggctgacgtagttgtagtgctcacgccgcaactcgagaaacctcattcttcgccggagtcgctcctccggagtttcctcggtcacgacgagggtctcgctacttggcaacgcaatgacaaccgagggggcacttgaaatatcaggacggggagcgttggggtgtcgcagaatcgagggggatgcactgatggtaggatcggaatactgatctcgaactgctctctggttggcatcgtcgtcactggaatcatcatccaactgttccggtttatctttcttatccttgtcagacatattctagagacttacatggaatcgctattaaaatacgtaaatttctgagccatgttgatttggaaaagtaaagagagatatcatttcccattcgaacttgccactattttggactatttatcaagcgaattcaacgcctgtcgacgcctgacaaattaattaacattttaataaattaatacctcgaagagaaaccaaaccgatgcggcttctgttcgcagccaatggtaaattaatcaaaaccacgaaacaaaaaagcggccaacacgaatgtgtctacacaagagcacgcttttgctgtcaaaaagaggcaataacaaagaacccgccaagaaaagaaaaagaaaaacaacttgaaaaacttgaatttaaaaacaaataagacgaaaaaaaaaaatataataaggcccagacggcgactaaatgtgatttgacaagcgaaatcagcagcaattaatacgcgcaactaaattaatggtgttaaagattatatattaactaatataaataaagccaatttatcttccgagcgcaaaaaaaaaaaaagagaagaaaaaaaccaaaacgaaataccttaacaagccttaggccttagcagaaagatacaaagatacatagatacaaagatactagttgggccatatgatttgggcgaacggctgaccatattaatattaatgagacattctagactatcggcacctggggtgtggaaattgagtggtgcgaccacgacagattcggatttacgtatagtcgattcgcatctggccgtgggttcactcaattcgtcggggtggtcgtctgaagagagattggataagccgcatcattttcataatttataattgtttatactcaaattagagtggcttattaagccagccttaatgcgatatgacaaatgaatgtttaagggtcggacaaataactggtttgaagactgtgtttatatcataaatacattatgcgattttggacttttgaagaattaatgtaa

SEQ ID NO: 28295 - DNA, 384 bp, DROSOPHILA
atgtctgacaaggataagaaagataaaccggaacagttggatgatgattccagtgacgacgatgccaaccagagagcagttcgagatcagtattccgatcctaccatcagtgcatccccctcgattctgcgacaccccaacgctccccgtcctgatatttcaagtgccccctcggttgtcattgcgttgccaagtagcgagaccctcgtcgtgaccgaggaaactccggaggagcgactccggcgaagaatgaggtttctcgagttgcggcgtgagcactacaactacgtcagccatagcgagcaatgcaacatggcggatacggaggatgaagatcacacggagaatcacccaaagtgtgaagccaattgcaagccggaatag

SEQ ID NO: 28296 - protein, 127 aa, DROSOPHILA
MSDKDKKDKPEQLDDDSSDDDANQRAVRDQYSDPTISASPSILRHPNAPRPDISSAPSVVIALPSSETLVVTEETPEERLRRRMRFLELRREHYNYVSHSEQCNMADTEDEDHTENHPKCEANCKPE

SEQ ID NO: 28297 - DNA, 4236 bp, DROSOPHILA
ccttgagagttgtgggtgctatcgattttccaggcacaccactgaccgccgatgacagcgcgctcatttcgatggagattttgtgggggcggatagctccacgcctctcccattttagcacaagcaactccagtcgcacagtgggacgagtatgctgcatatgtacttgaaaaccaattttgtttacattcacgggctgctacttatgatggtgtgtgtgtgagggaatgttcacacaagcatatgtataaatatatacatataccccgaaacgagtggagcatttacgcactggaagggaacgagaaaactctacacagttttcccagagcggagcggacttttcgccttccaaatacagaaacgattcagtttgcgtgcggagtagaaccgtttgaatgtcggaaaggcgaatagaaatcaaaggatgtgaatcgaatgaaatcctgtaaaagttaacccgcgaatcggttgaggatatagccaggtcaaagggttcgaaatcggaagaagtcggttggttttcggaacaaaggaaaattgaaaaacacaccgccacgttcaacggaaatcagttttcgcgacctatgtgtaccaccccctctgcccgagttttccagcacatttcgtgtgcatatactagaaaggaaaaaaaaaggtgatgtgagcagagaaccgcgacccgacgccactgacataaattcctatttttaacttccctggggccaaaaatccccatcgatgcggaatcaatttcgatccgattcgccagtcgtatgcaaattgtgctaaaattaagacgaccaagggctgcggaaatcccttccagttaacaatttaaagttatttcgcctgtggcttccaaaccgtttgacaatcgcatcgcctctctctctctcgcttgttccctttttctctctcttgctcttttgctatctctctcgcacacttggtaacggtgtttttatgtcagtgtcaaaatcgaacaccgtctgacccgatggttaaaatagttaagcaaagtatattgccaatgtcagtgttaatcatacaacaaagtgcaacaataaagctctcaaaatcctgccaaatgaacgaagttaaaagtttaatattcaatagaaattttgtatatgcctgattactcgaatcgtagcgcttttatagtctttttacaagcccaaaaccagttggtttcataaagtgttaagtgtagttgtaaccaactaaaccagccaactccaaactcaccgaaaccgtataggaataaaagtaatcgtggaatacggatacgtaatcattgccagctcaacgccttgccagccaccgtcaccatcacgttcatttccaccaccaccaacttcatcagcatcgcaccatctggtggtgctggtggtgctgttgtcctcgcacaggatcgtcggaaacatcgccaagatatcttcgttcgaggaagactaccgggctgacaggcccatggtgcagcgcgcctcttcctcggatgcaccctccgttcagggtggccaacatcgagagtctcgatttggccttggatacccctcctaccagagtggatacaacaaactattcacacaggtgccacaaacaatcaaacatccaggggtgggggggaccctaatccatgttctttaatgcgattttcagatgaatgtcacggtttttgtaatcttatctattctaaaacattcaatttaaagtctgatttgaaaatacctcttacttagaaaataatacaaaacaaatttgtttttgtttgccatattccatataggttttgtattttttatacatacgaattagcataaaacgaaacaaattgtacattatgtacattagttataatcgcataaaatgaaaaattactcagcattctcggaggccattatatcggccatgtacttgccaccaactgttgcttcatgtgcggcaagaagaaatattgaaaactatatacattttactgcattgtttggatatttgagttgggatgggattttggcagcgggccaattaaatttgttatgattttcagatggccggtccaattcatttgtctttaaatcggcacttttaaggcagattaaagtctattctgatcccatttattttgaaaatttccagggttctgccgactcgaactactcacaaccgtcatccgatctgtcgctagacgaggaaaaggaatcgcttcggcgagaaaaggaacgtcaggccttaagccagttggataaagcgagggtaagtgtgttgtgcattataaaaatggaaatccaaccctgtaataccctgtaatttcagagcaaaccagtggcgttcgctgtgcgaaccaacgtagcatacgatggcgccatcgacgacgattcgccggtgcagggcggagcagtttcgttcgagatccgggaattcctgcacatcaaagagaagtacgacaataactggtggatcggccggctggtcaaggagggctgtgatgtgggcttcatacccagccccgctaagctagacaacattcgcatgcaggttggatatgatagaaccaattcacacatcttccaagtgtgatctataacgacctctctatcgtagaaccaaaccagaccctcaagactgtatggcacaaagggctcgtcgagcgggaatcttggtgcgggcggacaagcaggtgcggagccatctcgaggtagcacaccccccacacctggtatgacacacatttcattctcctgatttcttttgggcgaggttttatttcgtatctgttcaattctgtgaatcgaattaatttcaatctatatatatttttcgctgtcttctatgtaatgtgtttacttttgtaaatcaccaaaagaggtactcccttcgaggagcccaatatgattatgagcatccataggtccgacagacggatgccgagcccgactcgagctcatcgatgtctattgtaattggacgcgtgttttatgattttcatttcaaagcgaaccaaatcagattccagaccatattgaaaaaaaaaagaaaaaaagaaaatgtgggccaagctaaattcccgtaattttgtacttttgtgtttgatctaattatatatcatgtgacattcatataaaccgagtgcaagttaatgcttacttatatcaacgacttcacccggcaatccgatgcaaatccgtccctagttatgcaaacggcccatttatcggcctagagctagccctagatcccagcatgaaagccgaatccaccagcagatcggtctagactgcttgatattcccgttttagacccaaattcaccactgtaaacacacaaaagtacacaccttaccagcttcaatagccacgattttctccgttcctagtttgtctaaatcaaagctcctcgttcatggtctgcttgtaaactaaccaattagccaatgtgaacactattaaatgcactcaaactctcttttatctaacacaaaactgttgacaacactaaccaaatgaacaaccacaacgcgacccaagatccctacagtacaacaccgcgcaagaaaaacaaaggtttgtccacgtctctcatcagaatctcagaaatccatttcaatcgcaaaaatatcgctagctctttcagggagtttcaggaattttcaaaacaaaacaaatctactcaaaacaaaaaagttcttaaaaagttagctactcagctgtagttgataaagcttaatacattcttaaattaactttacaactttatcagaacagatctaatcagttattatatttcaactttttaactgaatcttttcaattttcgtaagtaaaatattctataaactgaatcaatcagacaaactcattccaaaattcgtatcatctgtccgtaaaactctgttttttggctaatttgtaatgtcctgctaaccgaaacccgtacttagttatagaaatctgtgtaaattgaaagcaaacagaacacttcatacaccctcgagttggcattttaaacagcattaaatggtgcgtagaccggttttaaaggaaaaaagcaaaaaaaaaacgagatgaaaattcaaatcaacctgatattgcgaacctgccgtagaccgacacaattgcccagcacaaaacacgagcacaccgaaatccacggatcagatcaattcgaaaacactgtatatactaactaacccacaagcgtcttacgtatttacgataatatcttaaattggcc

SEQ ID NO: 28298 - DNA, 1172 bp, DROSOPHILA
atggttaaaatagttaagcaaagtatattgccaatctcaacgccttgccagccaccgtcaccatcacgttcatttccaccaccaccaacttcatcagcatcgcaccatctggtggtgctggtggtgctgttgtcctcgcacaggatcgtcggaaacatcgccaagatatcttcgttcgaggaagactaccgggctgacaggcccatggtgcagcgcgcctcttcctcggatgcaccctccgttcagggtggccaacatcgagagtctcgatttggccttggatacccctcctaccagagtggatacaacaaactattcacacaggtgccacaaacaatcaaacatccagggggttctgccgactcgaactactcacaaccgtcatccgatctgtcgctagacgaggaaaaggaatcgcttcggcgagaaaaggaacgtcaggccttaagccagttggataaagcgaggagcaaaccagtggcgttcgctgtgcgaaccaacgtagcatacgatggcgccatcgacgacgattcgccggtgcagggcggagcagtttcgttcgagatccgggaattcctgcacatcaaagagaagtacgacaataactggtggatcggccggctggtcaaggagggctgtgatgtgggcttcatacccagccccgctaagctagacaacattcgcatgcagaaccaaaccagaccctcaagactgtatggcacaaagggctcgtcgagcgggaatcttggtgcgggcggacaagcaggtgcggagccatctcgaggtagcacaccccccacacctgaggtactcccttcgaggagcccaatatgattatgagcatccataggtccgacagacggatgccgagcccgactcgagctcatcgatgtctattgtaattggacgcgtgttttatgattttcatttcaaagcgaaccaaatcagattccagaccatattgaaaaaaaaaagaaaaaaagaaaatgtgggccaagctaaattcccgtaattttgtacttttgtgtttgatctaattatatatcatgtgacattcatataaaccgagtgcaagttaatgcttacttatatcaacgacttcacccggcaatccgatgcaaatccgtccctagttatgcaaacggcccatttatcggcctagagctagccct

SEQ ID NO: 28299 - protein, 277 aa, DROSOPHILA
MVKIVKQSILPISTPCQPPSPSRSFPPPPTSSASHHLVVLVVLLSSHRIVGNIAKISSFEEDYRADRPMVQRASSSDAPSVQGGQHRESRFGLGYPSYQSGYNKLFTQVPQTIKHPGGSADSNYSQPSSDLSLDEEKESLRREKERQALSQLDKARSKPVAFAVRTNVAYDGAIDDDSPVQGGAVSFEIREFLHIKEKYDNNWWIGRLVKEGCDVGFIPSPAKLDNIRMQNQTRPSRLYGTKGSSSGNLGAGGQAGAEPSRGSTPPTPEVLPSRSPI

SEQ ID NO: 28300 - DNA, 7791 bp, DROSOPHILA
tgggtgtcatcgatgaagattttgggcgcctggcgtataatctcatcgttgtcaaactcagagtcggtggatatctcagtggcagaattgagctccacttcgtcgggtgaagtgctctcggactcggtttgaacctgcaagtggagttacgaatacacaaacgaattagtgtgcgttaggacaggacagcaggtaactaaacgaacgtaaaacaaaagcaatgggagtcgggatcagtagcgacccgtaggcggcgttttatgtacagcaaacacctttggttcgcacatgctaattagtcggagtagtgagttaaacagcaaaaaaacagcggcgtcatgcctttaggtacgatccagaagggaaacgaaaggaacgctgaaggacaaaacaaacgctggccaggattagctgggggttaggcctgtttatattgtaaggactgcaacagaacgacacaacacaatcggtattcagttttcagtattttctaggtttagagactacaaactttcggcttttttcgggctgcttgagttcggggttagcgcaacatttcgcggacggctgtgcttgaatttaccttcgtagatcgtacccaggtgcatttactttcaatcaagtggccaactcgatctaaggccagcccgatctagtcattggctaattggaggacttggactggacttgaacttgaacttgaaggcgtggcacatcgagagcagacaggcgggcgggcagtctagcatggttgattggttggttggttggttgggtattcttggtctgcttatcggggacctatagtgtcttgaatgggggttcgggtcgggtcggatcggtttggtcagggtacaggggtctgtttgtggggttggtttcgctgacgttgggttggctctcagtagagatagtagttgaggcgtcgtctgcggccacaacggggtaaaatataaatgaaaagagaaggctgctttggtcaatggtttagggctaacaactatgagataacgcacgactctttgttgccgtagccggaaagtgcggatacagttccgctggcggggctgcgtcgtcggaacaggtcactcaaatgggagctacgcgtggtcgatggatagtaactgctggttgcactggcgctcggtatgtagcttctcctgctcaaataatcactgctgggactgaggtaatcgtagttgttgctttttcttattgtggtgttggggaaacgatttagcgtggagctggcataatgtcttggcctgtagctagtcagatcttcatccacgtcgtcgtaatcacggcgatccgtgctcctaagcacatccctcatataggggttgcgctccactactcgctcgtttacgaaatctcttttgcggttgtgtaaccgtttgcttcgatccagcaaagcttgggtactggcatccatggggtcctcgtagttggcatagctagcaggacgagctgtggctactgttgtggtggtggacagtgtgtccgtgtcctggctggattgcgccgacagagattgcaaggagggtcctttcttaaggtcgctaaaagactttgagcttttcctggagctgttggccagcggtttgaaaggctgtggcgattgagagcgcggcttgtccatgaatctttgagaacctcttttccttggggacagtaatccttcgaagatatcttcctcctcaagagattcggctcgtttatcaaaaactgttttcccatccggccacttgcgattcttgaatgcagccgaaggaggagagtccgaacgagcgtattcgggcagctgtttctttagcttttctgtttcatcttcattatccgaatcgcctagatcgacctctccttccaactgtgtcttgggccaagcgcgaccctgaaaaacctcgggcacaggctcatcagtggccactggctcgggtacgaacctaggtggctccggctttggcaacttcagtttcttgggcatgggcacaatcactggtttgttatcctgtaactctataaatgcaaacgaactgcgccgcgtggagcaggaggtggaatccattgatgtaccgctgccatcgacatccagcttcttgaacatgggcggcgttccctcgtgccgcgatgcggtatcctgggtgcgatttgtgtcttgagttgtaccgcgtcgcgatgccatcatgggcggcgtgggcggtggtaaactgcgtttgctgctcgagttactgctgctctgtaaggagtcgcgcctgcgttgctccgccgcaatggcctcgaagttctcatcccgcttgatcagagcctgacgtctctcctgctcgaaatcctcgataaggcgtctctgtgccgcctcgtcatctacatcggagggtaaattgttgagaagttgcacagggttggtactaggtgagattgctcgcatcttgttcctccttggcaacatgggactgttgggtagcttctccatgtcccactctaaggagctctccttactagccacgcttggggctttatatggcgtttgatttggcagaagtcttcgtcgtggcatgggtgatgcgggcagcttctccatgtcccaatccgaagagttttccttgctactcgacttgggtggtgtaattatttttggtatttccactaaactgctgccagaggaattttcgctcttgagggagttgctctgacttattgacggtttgattggacttggaattacccgagcaacatcctccggctcggttaccttacgaacctcttctggagccgtttcaattttcttgattccttctttagagtgatccacttcgtctacatcttcttccgccaacatgctggggaaccttaaagtttgtttgccttcaactggaattacttccactaattcaggttggatgttcttctggtaaacctgttgtaatagatcctgtacagaaggaggcatatcctccggatctaatttcgatagcttttttttcaacctttgaggagccacaggaagtgatggttcactggaagatgaactgcttttgggtctccgttgtgggcgtgatgggaaatgcaatccgtccacttcgtcctggacattttcctgtatgaatttttccccaacaaccggttggaaagtctcctcatcgcgctccaaagactctagtttatccagatagtcccgatcttctgtgtttcgggaaacgagtgttgcccttggtgtaattcctacaagctcatcgttagagtcaaactccacattcaccagcatctcgtcggaaaagtggctgaaaagcttctctatgctctgatcctcggaactgccacgtttgaccaccgtaacgggctgtgcactgggactcttgctaattgttgtgcacaaggaatctgcatcgatgtcttcttctggaggttcgacaatagctgtgggctgcggttcctgctccatttcctccaccatgctctggaaaagttcgtccacttgctccgcctctctttctttttctatttggttcaaggctgcgagtgcgtcctggttgagtttctcgtttagagaaatctccgagtgtcgtcgcgacatgatcaaactagattgggaaccacggcgagagctgtttgaggacttatcacacccggttttgggtagatttttaatgtcttccactggtaaggaaatttctactatagcttctttgggcgtctgactgatagattctacggctggactcttggtcttcgagcgttccagttctttggcctccgtggctttttccagcagatcaagaatctcaaaatcatctggaactggactggctggctttaaaggttttacttctacaggctttagagtcttcggctgtgccttcttggtctggcgaacattactaatcttggccagctcctccagtgaattgtttgctttggtcacctttggcgttttagagggagatttcttcttcttaataggggactttcggttttctggtgacttgctagcggccaagccaaagaacttggccaacttggagtcgcgatattgaacaggaagattgtctaagggatcaggtttagccagaattttagactccttttcttgctcctcctttttggcatagaatttatcacgcttcttttgcagaaaattggtggcctcattgcgccattcattacggaggtaatccatggttttctccaaatcactcattgaatcgctgacggagacaagtgattccctggaacgggtcaagctgctcagattactggtggtggactccatgcgacgtaatttgaacgccgcctgttcatcactgttctgtgaggtgactgaactcattgactcaaatcgcttaaggatgttctgtactccagtaagtctttcttttgaaggcttcatgtcaaagtcaccctcgcccagggatttggtttttaccagtttcttactgctgcgttttggcagacccaattccacatccaacccggattcctcgagtatccgatctatgttatcggacaaatcgctaggcgacttttcgtcctggaacaagcgctgatactcggagctgggtgaacgatactcaccatctcccagaatttcgtccaatatccgctctgcttcatcttttggaggtttcttttctggcggagcctctactactgcggattcttgggccgcttctgctgcctttttagctttggttcctttgggtacgattttctttacaatcttaatggtctttcctttggatgtggccgtggcttttgtcacggatgtggtactccctgatttggctggttttttaacaccagcgctcgctttggtgggacccttctttttggtcaggtctaatgctccatccatttggtgctcccttaagctaaaggtgtctaacgaggcctgccgttttggaggtactgctttggagtctgccacctttttcgtgatttttttagactctccttccttttcgacctctttcttggtcttttcggcctggttattggcctgatcctccagtagcttggttttagctagagcagcctcagtctgtgacttctttagtcgatcggccaccgtttccacggttctccgttgtggagctggactgctggggaagtacttggccagatttacatccttcagggtaacctgattcttgtttgtgctgctggtggagctcttctcttgcttctggttgggaaagtacttggaaagatccatggagggtggtgcctgcgcactaaccgttggcatagtcagctgggatttaatatggtccattgtgccggcaaagctgctggcttggatttccttcaacttgctgttgagctctttatttggctttctttccacatcctcatctacatccatatcttcatcctgatcgctactgttctggctctgaatctttctcaaggtaccaaggattccttcaatttgcattttgctgttatttgaaataggagcttttttcacctttggactcccgttgctggcattactcttcaagctgttggagcggctcacgtttgtgctgctgcccttcggtttttgttgtggaggttttttcaaactttcaggcctgggcagctgctccttgggtcgctcctcaaagttcggtttacgtggttttaactcatccaaattgaaatcgattacgggcttgggtttgggttcgacaaccggctgaggtggactcactaccttttcgaacttttcatcgaacttcgacttgggttgaagcccaggagcagtcgcactaggagtcggagtcactttttggcctgctgctatggccgcattctccgccagccacttctccttcagcgtgagcttgcgcaggatgtcgctcttgaccagattttccttggccagcacctcgaggtccttgttcatctttaccatgttgttcatgtggtaaagtttctcgctgattgcctcgatttcgctgctaaacttgcgtggagcatttcgctccagttgctccatctcgacacgagtgggcgtggacaggggcgtagacggctggctgcgcgcggactcaaaggaattgcccgatttcagagagcttctgtccgccatgttttctttattgtctacgtttaacttgagtttctaataattgaaatatttatggatttgcaaggacaagaatgaaaccaacaccatgagaaggagatttcaagaatatggtaagagagtcaaggaaaataaatgagaataatgagaaggttagtctccccatcgccaagagagaaaatagttaaatatgacccacctcggtctccgtatctgtgggcagattggcgggcaacggctgcaggcgaacttcctggcgcctcaattcgcgggccttcttgaattcctcaccctcggtgtcatctttgccgtcatctaaaaatccaaagaagagtttaatataaattagttaatttttaaacttccccttttgtgcccactcacccgcaataccttcacttgagtcgtagaaatcgtcagaatcatcactgtcctcacagtattgctttccaatccaatccgacgccagctggagggtctgagcaccaaacggcgaatcatccgcctcctcaaacatctccgaatccgattccgtatccgattcatctgaactggatagctctgattgggaatcgttgttggactcgggcaagaagttgcgaccagaccattcgtgctcatcgataacattggcttcatcatcggacatggcatcggcagaggcatttgctcgcgaggtctccagtagatccacctggtccctgggtggagtggtgtccatatgctccgatgtggcagctgcagtgggtacggatcccgcagttggtggtacagcaggcgaggcgggttgagcggcagcggatttctggagaaaggggatgatgggttctagttagtaagaacacttaaatagatccaagatcgatactcaccctggctttgttggtgcgctgcggcagcggtttgggtggcaaccggaagtgttgggtgcagtaaaatcggccctgcggatcgtcccgatcaaaggcgtagcctcccagacgcaagttggtgtggcagtggtggcacttaaggcaattgcgatgcagaaccaatccctccacggtggtcttctccatcaggtagacggtttgcttacagaagcggcacttttcggaggcagcctgctttttaaaggccagcgccaccttggaactctgtattattagaaggataagtattagaagaaatttgaagatgacaatgattaacaattaacgacataacacataaacatttgcttggcattcgatgggtgtcatgtacaaatgagtggatatgtagcttgatgactatgagtgtttgtgggaaaattgcctagacttttgcttaaagcacgctaacaacatcatcgactacagcaaccacaggaagcaaccatgaaggtaagcaaaaatattaaatatagtatacataaatataaaagcaaatataaaatagcacaggggaaaccgataacaatagaaaccaaacaaaacaattgatacaagaaggtggtggatgaacacaaaattactcacagatttgggtatgactgtgttgttggtgttggtggtggcattgctgctgcccgcgttcttctcatccgaattggcctcatcctttttgccaaactgaccggcaatggaggccactttgttgcgtccccgctcgcccacatccagattgtggccctcctttagctgcttgtccaagttgcggatagtctggtcgatgtccttgaacttttccgcctcacgcga

SEQ ID NO: 28301 - DNA, 5559 bp, DROSOPHILA
atggacaccactccacccagggaccaggtggatctactggagacctcgcgagcaaatgcctctgccgatgccatgtccgatgatgaagccaatgttatcgatgagcacgaatggtctggtcgcaacttcttgcccgagtccaacaacgattcccaatcagagctatccagttcagatgaatcggatacggaatcggattcggagatgtttgaggaggcggatgattcgccgtttggtgctcagaccctccagctggcgtcggattggattggaaagcaatactgtgaggacagtgatgattctgacgatttctacgactcaagtgaaggtattgcggatgacggcaaagatgacaccgagggtgaggaattcaagaaggcccgcgaattgaggcgccaggaagttcgcctgcagccgttgcccgccaatctgcccacagatacggagaccgagaaactcaagttaaacgtagacaataaagaaaacatggcggacagaagctctctgaaatcgggcaattcctttgagtccgcgcgcagccagccgtctacgcccctgtccacgcccactcgtgtcgagatggagcaactggagcgaaatgctccacgcaagtttagcagcgaaatcgaggcaatcagcgagaaactttaccacatgaacaacatggtaaagatgaacaaggacctcgaggtgctggccaaggaaaatctggtcaagagcgacatcctgcgcaagctcacgctgaaggagaagtggctggcggagaatgcggccatagcagcaggccaaaaagtgactccgactcctagtgcgactgctcctgggcttcaacccaagtcgaagttcgatgaaaagttcgaaaaggtagtgagtccacctcagccggttgtcgaacccaaacccaagcccgtaatcgatttcaatttggatgagttaaaaccacgtaaaccgaactttgaggagcgacccaaggagcagctgcccaggcctgaaagtttgaaaaaacctccacaacaaaaaccgaagggcagcagcacaaacgtgagccgctccaacagcttgaagagtaatgccagcaacgggagtccaaaggtgaaaaaagctcctatttcaaataacagcaaaatgcaaattgaaggaatccttggtaccttgagaaagattcagagccagaacagtagcgatcaggatgaagatatggatgtagatgaggatgtggaaagaaagccaaataaagagctcaacagcaagttgaaggaaatccaagccagcagctttgccggcacaatggaccatattaaatcccagctgactatgccaacggttagtgcgcaggcaccaccctccatggatctttccaagtactttcccaaccagaagcaagagaagagctccaccagcagcacaaacaagaatcaggttaccctgaaggatgtaaatctggccaagtacttccccagcagtccagctccacaacggagaaccgtggaaacggtggccgatcgactaaagaagtcacagactgaggctgctctagctaaaaccaagctactggaggatcaggccaataaccaggccgaaaagaccaagaaagaggtcgaaaaggaaggagagtctaaaaaaatcacgaaaaaggtggcagactccaaagcagtacctccaaaacggcaggcctcgttagacacctttagcttaagggagcaccaaatggatggagcattagacctgaccaaaaagaagggtcccaccaaagcgagcgctggtgttaaaaaaccagccaaatcagggagtaccacatccgtgacaaaagccacggccacatccaaaggaaagaccattaagattgtaaagaaaatcgtacccaaaggaaccaaagctaaaaaggcagcagaagcggcccaagaatccgcagtagtagaggctccgccagaaaagaaacctccaaaagatgaagcagagcggatattggacgaaattctgggagatggtgagtatcgttcacccagctccgagtatcagcgcttgttccaggacgaaaagtcgcctagcgatttgtccgataacatagatcggatactcgaggaatccgggttggatgtggaattgggtctgccaaaacgcagcagtaagaaactggtaaaaaccaaatccctgggcgagggtgactttgacatgaagccttcaaaagaaagacttactggagtacagaacatccttaagcgatttgagtcaatgagttcagtcacctcacagaacagtgatgaacaggcggcgttcaaattacgtcgcatggagtccaccaccagtaatctgagcagcttgacccgttccagggaatcacttgtctccgtcagcgattcaatgagtgatttggagaaaaccatggattacctccgtaatgaatggcgcaatgaggccaccaattttctgcaaaagaagcgtgataaattctatgccaaaaaggaggagcaagaaaaggagtctaaaattctggctaaacctgatcccttagacaatcttcctgttcaatatcgcgactccaagttggccaagttctttggcttggccgctagcaagtcaccagaaaaccgaaagtcccctattaagaagaagaaatctccctctaaaacgccaaaggtgaccaaagcaaacaattcactggaggagctggccaagattagtaatgttcgccagaccaagaaggcacagccgaagactctaaagcctgtagaagtaaaacctttaaagccagccagtccagttccagatgattttgagattcttgatctgctggaaaaagccacggaggccaaagaactggaacgctcgaagaccaagagtccagccgtagaatctatcagtcagacgcccaaagaagctatagtagaaatttccttaccagtggaagacattaaaaatctacccaaaaccgggtgtgataagtcctcaaacagctctcgccgtggttcccaatctagtttgatcatgtcgcgacgacactcggagatttctctaaacgagaaactcaaccaggacgcactcgcagccttgaaccaaatagaaaaagaaagagaggcggagcaagtggacgaacttttccagagcatggtggaggaaatggagcaggaaccgcagcccacagctattgtcgaacctccagaagaagacatcgatgcagattccttgtgcacaacaattagcaagagtcccagtgcacagcccgttacggtggtcaaacgtggcagttccgaggatcagagcatagagaagcttttcagccacttttccgacgagatgctggtgaatgtggagtttgactctaacgatgagcttgtaggaattacaccaagggcaacactcgtttcccgaaacacagaagatcgggactatctggataaactagagtctttggagcgcgatgaggagactttccaaccggttgttggggaaaaattcatacaggaaaatgtccaggacgaagtggacggattgcatttcccatcacgcccacaacggagacccaaaagcagttcatcttccagtgaaccatcacttcctgtggctcctcaaaggttgaaaaaaaagctatcgaaattagatccggaggatatgcctccttctgtacaggatctattacaacaggtttaccagaagaacatccaacctgaattagtggaagtaattccagttgaaggcaaacaaactttaaggttccccagcatgttggcggaagaagatgtagacgaagtggatcactctaaagaaggaatcaagaaaattgaaacggctccagaagaggttcgtaaggtaaccgagccggaggatgttgctcgggtaattccaagtccaatcaaaccgtcaataagtcagagcaactccctcaagagcgaaaattcctctggcagcagtttagtggaaataccaaaaataattacaccacccaagtcgagtagcaaggaaaactcttcggattgggacatggagaagctgcccgcatcacccatgccacgacgaagacttctgccaaatcaaacgccatataaagccccaagcgtggctagtaaggagagctccttagagtgggacatggagaagctacccaacagtcccatgttgccaaggaggaacaagatgcgagcaatctcacctagtaccaaccctgtgcaacttctcaacaatttaccctccgatgtagatgacgaggcggcacagagacgccttatcgaggatttcgagcaggagagacgtcaggctctgatcaagcgggatgagaacttcgaggccattgcggcggagcaacgcaggcgcgactccttacagagcagcagtaactcgagcagcaaacgcagtttaccaccgcccacgccgcccatgatggcatcgcgacgcggtacaactcaagacacaaatcgcacccaggataccgcatcgcggcacgagggaacgccgcccatgttcaagaagctggatgtcgatggcagcggtacatcaatggattccacctcctgctccacgcggcgcagttcgtttgcatttatagagttacaggataacaaaccagtgattgtgcccatgcccaagaaactgaagttgccaaagccggagccacctaggttcgtacccgagccagtggccactgatgagcctgtgcccgaggtttttcagggtcgcgcttggcccaagacacagttggaaggagaggtcgatctaggcgattcggataatgaagatgaaacagaaaagctaaagaaacagctgcccgaatacgctcgttcggactctcctccttcggctgcattcaagaatcgcaagtggccggatgggaaaacagtttttgataaacgagccgaatctcttgaggaggaagatatcttcgaaggattactgtccccaaggaaaagaggttctcaaagattcatggacaagccgcgctctcaatcgccacagcctttcaaaccgctggccaacagctccaggaaaagctcaaagtcttttagcgaccttaagaaaggaccctccttgcaatctctgtcggcgcaatccagccaggacacggacacactgtccaccaccacaacagtagccacagctcgtcctgctagctatgccaactacgaggaccccatggatgccagtacccaagctttgctggatcgaagcaaacggttacacaaccgcaaaagagatttcgtaaacgagcgagtagtggagcgcaacccctatatgagggatgtgcttaggagcacggatcgccgtgattacgacgacgtggatgaagatctgactagctacaggccaagacattatgccagctccacgctaaatcgtttccccaacaccacaataagaaaaagcaacaactacgattacctcagtcccagcagtgattatttgagcaggagaagctacataccgagcgccagtgcaaccagcagttactatccatcgaccacgcgtagctcccatttgagtgacctgttccgacgacgcagccccgccagcggaactgtatccgcactttccggctacggcaacaaagagtcgtgcgttatctcatag

SEQ ID NO: 28302 - protein, 1852 aa, DROSOPHILA
MDTTPPRDQVDLLETSRANASADAMSDDEANVIDEHEWSGRNFLPESNNDSQSELSSSDESDTESDSEMFEEADDSPFGAQTLQLASDWIGKQYCEDSDDSDDFYDSSEGIADDGKDDTEGEEFKKARELRRQEVRLQPLPANLPTDTETEKLKLNVDNKENMADRSSLKSGNSFESARSQPSTPLSTPTRVEMEQLERNAPRKFSSEIEAISEKLYHMNNMVKMNKDLEVLAKENLVKSDILRKLTLKEKWLAENAAIAAGQKVTPTPSATAPGLQPKSKFDEKFEKVVSPPQPVVEPKPKPVIDFNLDELKPRKPNFEERPKEQLPRPESLKKPPQQKPKGSSTNVSRSNSLKSNASNGSPKVKKAPISNNSKMQIEGILGTLRKIQSQNSSDQDEDMDVDEDVERKPNKELNSKLKEIQASSFAGTMDHIKSQLTMPTVSAQAPPSMDLSKYFPNQKQEKSSTSSTNKNQVTLKDVNLAKYFPSSPAPQRRTVETVADRLKKSQTEAALAKTKLLEDQANNQAEKTKKEVEKEGESKKITKKVADSKAVPPKRQASLDTFSLREHQMDGALDLTKKKGPTKASAGVKKPAKSGSTTSVTKATATSKGKTIKIVKKIVPKGTKAKKAAEAAQESAVVEAPPEKKPPKDEAERILDEILGDGEYRSPSSEYQRLFQDEKSPSDLSDNIDRILEESGLDVELGLPKRSSKKLVKTKSLGEGDFDMKPSKERLTGVQNILKRFESMSSVTSQNSDEQAAFKLRRMESTTSNLSSLTRSRESLVSVSDSMSDLEKTMDYLRNEWRNEATNFLQKKRDKFYAKKEEQEKESKILAKPDPLDNLPVQYRDSKLAKFFGLAASKSPENRKSPIKKKKSPSKTPKVTKANNSLEELAKISNVRQTKKAQPKTLKPVEVKPLKPASPVPDDFEILDLLEKATEAKELERSKTKSPAVESISQTPKEAIVEISLPVEDIKNLPKTGCDKSSNSSRRGSQSSLIMSRRHSEISLNEKLNQDALAALNQIEKEREAEQVDELFQSMVEEMEQEPQPTAIVEPPEEDIDADSLCTTISKSPSAQPVTVVKRGSSEDQSIEKLFSHFSDEMLVNVEFDSNDELVGITPRATLVSRNTEDRDYLDKLESLERDEETFQPVVGEKFIQENVQDEVDGLHFPSRPQRRPKSSSSSSEPSLPVAPQRLKKKLSKLDPEDMPPSVQDLLQQVYQKNIQPELVEVIPVEGKQTLRFPSMLAEEDVDEVDHSKEGIKKIETAPEEVRKVTEPEDVARVIPSPIKPSISQSNSLKSENSSGSSLVEIPKIITPPKSSSKENSSDWDMEKLPASPMPRRRLLPNQTPYKAPSVASKESSLEWDMEKLPNSPMLPRRNKMRAISPSTNPVQLLNNLPSDVDDEAAQRRLIEDFEQERRQALIKRDENFEAIAAEQRRRDSLQSSSNSSSKRSLPPPTPPMMASRRGTTQDTNRTQDTASRHEGTPPMFKKLDVDGSGTSMDSTSCSTRRSSFAFIELQDNKPVIVPMPKKLKLPKPEPPRFVPEPVATDEPVPEVFQGRAWPKTQLEGEVDLGDSDNEDETEKLKKQLPEYARSDSPPSAAFKNRKWPDGKTVFDKRAESLEEEDIFEGLLSPRKRGSQRFMDKPRSQSPQPFKPLANSSRKSSKSFSDLKKGPSLQSLSAQSSQDTDTLSTTTTVATARPASYANYEDPMDASTQALLDRSKRLHNRKRDFVNERVVERNPYMRDVLRSTDRRDYDDVDEDLTSYRPRHYASSTLNRFPNTTIRKSNNYDYLSPSSDYLSRRSYIPSASATSSYYPSTTRSSHLSDLFRRRSPASGTVSALSGYGNKESCVIS

SEQ ID NO: 28303 - DNA, 6448 bp, DROSOPHILA
gctcagcttgtcgtgaagccttcgatatggcacgttgcttcttatgctctcgtgtctcgttagcgtagctctcatctgggaaataggaaaggggatcaaatcaggccgtaacgtttccgcttgtatgaatattcagtgggtcgggacaggaaaaatgggtggacggtatatgcagacatagaatgagaagaacaaaccatcggatctctgataattcagtggaagaggcggtatgggtggtggtgtctggtcgtccagggcactgggatgagctgcggccaggtggtggggcttgtgtatatagagctgcggactggatgaagagaacgattcgggtttcggtttcgcagtgttcgtttgctttcgatagcgactgttgttcgtggtgttcagatactcttgcgagtgatttttctgtgatgcggatgtggctcctgctggagatgctgcattgcagaccagcatatccttgtcctagtatagcatggcgttaggaggtatcagaatatatatcggtttaaatgattgagtgtttttcagaggaggaaaaaaagaggtcgagaaaaacgtatggaaaaataaacaatattcaaaatcttattagaaacagcttgttatttactaaaatatagtacatgtaacgtgcaaaatgtccaaaggcaaaaaacttaacacataacttttattgattaccataaccgggaatccagggaaaccaatcatgcaaaatatccattatgcttaaatcataaataacacttcttaaactaattcccattaaacaaaaagctgccaagtacttaagccataaacacttaaagtttaaaacacacaactgaatatccttatgtccgtaaggtttccctgaaacccatgcgctcctaatagatattaaactaagaaaacatatatgttatttttgaggcaaaagaaataattcagcagtcaatcttaaatgttaagacttagattacttttgctgcaaagggtaaaagaaaacaaaaaataaagtaaatgaaaagaaatcataagaaaattgtggcaactttattgtgttaataggacagcaaacagacaaaaagcccactcagatgaagaaatgtgcgattagataaaaaataaaccaaatgtaacggatgccaaataataagactaagctgttgagagtgtaagaaatttggaaaactcgaaagtgtgtggtaaatagagtttagaatagttaaaagtccttacaccaaaaccgaaattcctcagatcaaagcaagactgcaaaatgattaaaagaatttcatatgttataaatggcacacttattacaccagacatcgagtcctcggcagttaatataacttatatgctagatgaggtcgtgtgaatcgatagcttggactagccaatctccatgaggcagacaacacttggttacaccaacaccgactaaaaccacattacaattatatatttggtacaatcactgacctttgacttctccttggacttgggcgagatgcggaatctgctgaagacgccacctcctcctccgcctccacccgccgcatccgatattgtgggcgtgccgctgctgctggtgcctggtcgctctgactgttcagagtggacggcagccacagcgccgccctgctccttggaactggaggccgcggatccagatcccttttggaagaagctggacaacgactgtatgagactcttacgccgctccggatcctttggcctgcgtccggacttagttttgcctgccttctcctgaccaccggacgccaaattgggatcggatgtaaagtcagccgccttggcttggagcacggcatccttctcaacctgctgctgctgctgctgtcccaccatgtaggccagatcattgacgctcttcgaggcactcattttgcgggcacgtgccgccagatccccggatggcatctcctccagttgcttcggcttcagagatctgttttggtcgtagtgcaatcttgaacgtattagctgcatcttttcctcgggactaaggcccagctctgtgttagacttaagacgagccctggccctggcctcgcttcttaggttctccgtcgacgcggaaatattggctatatccgcggtcgcgacacctcctcctcggttaactctcgccggggcaatgggtttcgcaaagtcgcccaacttgccgccattaaacgaggccgtcttgccgagcttgtaacccgccagagcgttcgaatcgatgtgttcgctgaaggggcgcggcttatagagatcagcactacgtgtgggcgcttggacagtgcgataaggcgacacataggtggacgtggcggacttctgcaacggcctttccgccggcggcttcggggcctcctccgccgtggaggcgtggtagtgcgcttggctagagcagttggaatcctgcggactgcaagcagcagccagcttgggcgtcggactaaggctggagccactggcatagccactggtcagcaaactgcgctgtcgactccggtgcagacgcttctcagcgtttagctgcttcttcgactgcaacttgtccatgactaggtcgtgaatcagatccttttgcttagtgcgttctttggttatctcttccagcttgctgctaagtgtgggtatctccggtacctttccggaaatgctggtggtccgcggtcgcattgagaccagaggctcctctgcgggcttggccggatcctcggctgattctatcacaggtgcgctactgtttagctgcaggttaggtgcctctcccttagagctcttacgccgttgggtgctgatctgcgatatccgctgctgcagtgctcgaacatactcaaactggatttgcaggtcctcctcctgcggctccttcgagacgtttcctgttgtcgaggagttgggcccagtgctgctgctcgtcaccgtagacgtctttggttgttgctctgagctactgggtgtggagtcaccttttcccgccgccaacatggatgcaaattgatcgagaaccctgggcgaggacgtgtcaagtggactggtgaccaccgtcagtgcctcactttcctccgttgtcgttggctgggtttgggatattatcatactgtcatcatccagttcattgagcgtgattgagtcagttagcgactgggtcatggcaggagccacctcattcacaggcgtctttgcatcatcgtgcattatgtacgccccctgctcaatgtaatcaacgcccagtttctcgtcccgcttcgtcattaaaggcggtaaatttcctgggtaactggatggtggagctgccttgcgggtcgtctttttcggctccgcctcgatgtactccatgtaacctctattctgaatgagagctgtatttgttgcggaataagcttcagcacaagaaccctccgaacccgtgtccatgaactctatgtcatcaatgtcgatggcactaagaattccatccatttgcaccactggcgcctgcctggccagctcgtggattacctcgttgccactgggaagtttgcttgctccactgcgtcgtcgatccttgcgccgttttatcgtacccttgttagagttaagcgcgaactccaagtcaacaaagttctccgagatacagtcgtcggccgtccagtcggagagttccgtctccgttagtacctgaccagtgccagtgtgctcggtttctgagtcagatcctcgcgagagaatttccccagtgggtgttttatcgctatcgtgcgccgtgggcgtggttggtgtatctggcgtcctggccagattgcttaagttaagagtaatgggtttcactgcctgactgtgctccacattgctctctacgatcaacggaagattcttcaagctctcgatcttgttctcatttttgctatcgaacttcagtttgggtggacccatctctggcaaaggagggggagcagtaacacggcgctcagcctcgatgaccgtacattccaccggctccggagtagcagttactggttccgcctccgcctcttggtcatcctccatatccagctcattcgttttaagcgccggtgctggcggaacaataacattggccggcatatccaagaacttgacatcctcgggatccccaatatactttccgttcacaatcatcaggctgtccacctgcatcagggcaccacttgtgtcgtgcacctccaaacggggcacattgtgctttccgccaactgtctgagtatctggactagttgtggactccaaaatgtagtgctggatgtcttcaatactagaagagtctgagcttgagcagatggagccactgctgccggtggtagacatgacctccggcttgcttttttcccatgggatattgggcacctggatctgcacactgtccggttcataaagctcatgttcggccacatccttttccggtgagtcgcgcttctcttcgtccgactgctccagcaggctctgttggtcctctccacctggctccttcgatcccgttccctccttaatgtgtcccagtatatctggtatgcattctttcacatccctagagacatccggcttgggttcctccttcacttcctgctgcagttcgctgattttgttgctatcgggtgtgaggcgttcatctacatccatggcgctaccatcgaccaactgctttttcggcgtttccagtgccgttagatcgataatgtcaattggcttctcaggtgtaaccaggtcaataacctcgaccaccgtcttattcgtcggcgtggtgggtgaactttttctggccagctggtccagcagcgtggcattgaccgcatccgtgtattccatccccttgttcagctcgttcttacagttcacgaaaacgttttccttctcgttgtccgtggagtggctggagccagttttctgtatccgaagctccacgcgcagatcgttaatcacattgctggtggcggaacggattagttcgttcgtctgtccgggtgtcgtctggctgccttcgcccaactttgtgcgatcgaggaaggttcgcatgccggcacttatgtcgctgctgggattcaaaagcttctggcactccgatatgttcgactggaagctgcgaatgcgtgaatccagcactgaagtggatccggacttctggatcttattgccattggccggctcacccagcagatagcgcttttttagctccaggctcttttttgaggcgataccctccgtactggccgtcttgtttagcaagtagtctcctggccgtggattctgaagaggagcgcgctggctgccaatgagcagggtgggatccacctggaccaacggtttaaactgtggcagtggcggttgtggttggtacttctggaggtagctgccgcccttctcacgcgccgccaactgcttctgatggagtccggcggaagctgcattgggtccgatcatggtggacttgatctacgaggtaaataatcatcattcatgttgtttaaataaatttggaattcaccacatacctgaaccttggtgggcttccttagatgggtgtcatcgatgaagattttgggcgcctggcgtataatctcatcgttgtcaaactcagagtcggtggatatctcagtggcagaattgagctccacttcgtcgggtgaagtgctctcggactcggtttgaacctgcaagtggagttacgaatacacaaacgaattagtgtgcgttaggacaggacagcaggtaactaaacgaacgtaaaacaaaagcaatgggagtcgggatcagtagcgacccgtaggcggcgttttatgtacagcaaacacctttggttcgcacatgctaattagtcggagtagtgagttaaacagcaaaaaaacagcggcgtcatgcctttaggtacgatccagaagggaaacgaaaggaacgctgaaggacaaaacaaacgctggccaggattagctgggggttaggcctgtttatattgtaaggactgcaacagaacgacacaacacaatcggtattcagttttcagtattttctaggtttagagactacaaactttcggcttttttcgggctgcttgagttcggggttagcgcaacatttcgcggacggctgtgcttgaatttaccttcgtagatcgtacccaggtgcatttactttcaatcaagtggccaactcgatctaaggccagcccgatctagtcattggctaattggaggacttggactggacttgaacttgaacttgaaggcgtggcacatcgagagcagacaggcgggcgggcagtctagcatggttgattggttggttggttggttgggtattcttggtctgcttatcggggacctatagtgtcttgaatgggggttcgggtcgggtcggatcggtttggtcagggtacaggggtctgtttgtggggttggtttcgctgacgttgggttggctctca

SEQ ID NO: 28304 - DNA, 4448 bp, DROSOPHILA
atgatcggacccaatgcagcttccgccggactccatcagaagcagttggcggcgcgtgagaagggcggcagctacctccagaagtaccaaccacaaccgccactgccacagtttaaaccgttggtccaggtggatcccaccctgctcattggcagccagcgcgctcctcttcagaatccacggccaggagactacttgctaaacaagacggccagtacggagggtatcgcctcaaaaaagagcctggagctaaaaaagcgctatctgctgggtgagccggccaatggcaataagatccagaagtccggatccacttcagtgctggattcacgcattcgcagcttccagtcgaacatatcggagtgccagaagcttttgaatcccagcagcgacataagtgccggcatgcgaaccttcctcgatcgcacaaagttgggcgaaggcagccagacgacacccggacagacgaacgaactaatccgttccgccaccagcaatgtgattaacgatctgcgcgtggagcttcggatacagaaaactggctccagccactccacggacaacgagaaggaaaacgttttcgtgaactgtaagaacgagctgaacaaggggatggaatacacggatgcggtcaatgccacgctgctggaccagctggccagaaaaagttcacccaccacgccgacgaataagacggtggtcgaggttattgacctggttacacctgagaagccaattgacattatcgatctaacggcactggaaacgccgaaaaagcagttggtcgatggtagcgccatggatgtagatgaacgcctcacacccgatagcaacaaaatcagcgaactgcagcaggaagtgaaggaggaacccaagccggatgtctctagggatgtgaaagaatgcataccagatatactgggacacattaaggagggaacgggatcgaaggagccaggtggagaggaccaacagagcctgctggagcagtcggacgaagagaagcgcgactcaccggaaaaggatgtggccgaacatgagctttatgaaccggacagtgtgcagatccaggtgcccaatatcccatgggaaaaaagcaagccggaggtcatgtctaccaccggcagcagtggctccatctgctcaagctcagactcttctagtattgaagacatccagcactacattttggagtccacaactagtccagatactcagacagttggcggaaagcacaatgtgccccgtttggaggtgcacgacacaagtggtgccctgatgcaggtggacagcctgatgattgtgaacggaaagtatattggggatcccgaggatgtcaagttcttggatatgccggccaatgttattgttccgccagcaccggcgcttaaaacgaatgagctggatatggaggatgaccaagaggcggaggcggaaccagtaactgctactccggagccggtggaatgtacggtcatcgaggctgagcgccgtgttactgctccccctcctttgccagagatgggtccacccaaactgaagttcgatagcaaaaatgagaacaagatcgagagcttgaagaatcttccgttgatcgtagagagcaatgtggagcacagtcaggcagtgaaacccattactcttaacttaagcaatctggccaggacgccagatacaccaaccacgcccacggcgcacgatagcgataaaacacccactggggaaattctctcgcgaggatctgactcagaaaccgagcacactggcactggtcaggtactaacggagacggaactctccgactggacggccgacgactgtatctcggagaactttgttgacttggagttcgcgcttaactctaacaagggtacgataaaacggcgcaaggatcgacgacgcagtggagcaagcaaacttcccagtggcaacgaggtaatccacgagctggccaggcaggcgccagtggtgcaaatggatggaattcttagtgccatcgacattgatgacatagagttcatggacacgggttcggagggttcttgtgctgaagcttattccgcaacaaatacagctctcattcagaatagaggttacatggagtacatcgaggcggagccgaaaaagacgacccgcaaggcagctccaccatccagttacccaggaaatttaccgcctttaatgacgaagcgggacgagaaactgggcgttgattacattgagcagggggcgtacataatgcacgatgatgcaaagacgcctgtgaatgaggtggctcctgccatgacccagtcgctaactgactcaatcacgctcaatgaactggatgatgacagtatgataatatcccaaacccagccaacgacaacggaggaaagtgaggcactgacggtggtcaccagtccacttgacacgtcctcgcccagggttctcgatcaatttgcatccatgttggcggcgggaaaaggtgactccacacccagtagctcagagcaacaaccaaagacgtctacggtgacgagcagcagcactgggcccaactcctcgacaacaggaaacgtctcgaaggagccgcaggaggaggacctgcaaatccagtttgagtatgttcgagcactgcagcagcggatatcgcagatcagcacccaacggcgtaagagctctaagggagaggcacctaacctgcagctaaacagtagcgcacctgtgatagaatcagccgaggatccggccaagcccgcagaggagcctctggtctcaatgcgaccgcggaccaccagcatttccggaaaggtaccggagatacccacacttagcagcaagctggaagagataaccaaagaacgcactaagcaaaaggatctgattcacgacctagtcatggacaagttgcagtcgaagaagcagctaaacgctgagaagcgtctgcaccggagtcgacagcgcagtttgctgaccagtggctatgccagtggctccagccttagtccgacgcccaagctggctgctgcttgcagtccgcaggattccaactgctctagccaagcgcactaccacgcctccacggcggaggaggccccgaagccgccggcggaaaggccgttgcagaagtccgccacgtccacctatgtgtcgccttatcgcactgtccaagcgcccacacgtagtgctgatctctataagccgcgccccttcagcgaacacatcgattcgaacgctctggcgggttacaagctcggcaagacggcctcgtttaatggcggcaagttgggcgactttgcgaaacccattgccccggcgagagttaaccgaggaggaggtgtcgcgaccgcggatatagccaatatttccgcgtcgacggagaacctaagaagcgaggccagggccagggctcgtcttaagtctaacacagagctgggccttagtcccgaggaaaagatgcagctaatacgttcaagattgcactacgaccaaaacagatctctgaagccgaagcaactggaggagatgccatccggggatctggcggcacgtgcccgcaaaatgagtgcctcgaagagcgtcaatgatctggcctacatggtgggacagcagcagcagcagcaggttgagaaggatgccgtgctccaagccaaggcggctgactttacatccgatcccaatttggcgtccggtggtcaggagaaggcaggcaaaactaagtccggacgcaggccaaaggatccggagcggcgtaagagtctcatacagtcgttgtccagcttcttccaaaagggatctggatccgcggcctccagttccaaggagcagggcggcgctgtggctgccgtccactctgaacagtcagagcgaccaggcaccagcagcagcggcacgcccacaatatcggatgcggcgggtggaggcggaggaggaggtggcgtcttcagcagattccgcatctcgcccaagtccaaggagaagtcaaaggtcagtgattgtaccaaatatataattgtaatgtggttttagtcggtgttggtgtaaccaagtgttgtctgcctcatggagattggctagtccaagctatcgattcacacgacctcatctagcatataagttatattaactgccgaggactcgatgtctggtgtaataagtgtgccatttataacatatgaaattcttttaatcattttgcagtcttgctttgatctgaggaatttcggttttggtgtaaggacttttaactattctaaactctatttaccacacactttcgagttttccaaatttcttacactctcaacagcttagtcttattatttggcatccgttacatttggtttattttttatctaatcgcacatttcttcatctgagtgggctttttgtctgtttgctgtcctattaacacaataaagttgccacaattttcttatgatttcttttcatttactttatttttt

SEQ ID NO: 28305 - protein, 1336 aa, DROSOPHILA
MIGPNAASAGLHQKQLAAREKGGSYLQKYQPQPPLPQFKPLVQVDPTLLIGSQRAPLQNPRPGDYLLNKTASTEGIASKKSLELKKRYLLGEPANGNKIQKSGSTSVLDSRIRSFQSNISECQKLLNPSSDISAGMRTFLDRTKLGEGSQTTPGQTNELIRSATSNVINDLRVELRIQKTGSSHSTDNEKENVFVNCKNELNKGMEYTDAVNATLLDQLARKSSPTTPTNKTVVEVIDLVTPEKPIDIIDLTALETPKKQLVDGSAMDVDERLTPDSNKISELQQEVKEEPKPDVSRDVKECIPDILGHIKEGTGSKEPGGEDQQSLLEQSDEEKRDSPEKDVAEHELYEPDSVQIQVPNIPWEKSKPEVMSTTGSSGSICSSSDSSSIEDIQHYILESTTSPDTQTVGGKHNVPRLEVHDTSGALMQVDSLMIVNGKYIGDPEDVKFLDMPANVIVPPAPALKTNELDMEDDQEAEAEPVTATPEPVECTVIEAERRVTAPPPLPEMGPPKLKFDSKNENKIESLKNLPLIVESNVEHSQAVKPITLNLSNLARTPDTPTTPTAHDSDKTPTGEILSRGSDSETEHTGTGQVLTETELSDWTADDCISENFVDLEFALNSNKGTIKRRKDRRRSGASKLPSGNEVIHELARQAPVVQMDGILSAIDIDDIEFMDTGSEGSCAEAYSATNTALIQNRGYMEYIEAEPKKTTRKAAPPSSYPGNLPPLMTKRDEKLGVDYIEQGAYIMHDDAKTPVNEVAPAMTQSLTDSITLNELDDDSMIISQTQPTTTEESEALTVVTSPLDTSSPRVLDQFASMLAAGKGDSTPSSSEQQPKTSTVTSSSTGPNSSTTGNVSKEPQEEDLQIQFEYVRALQQRISQISTQRRKSSKGEAPNLQLNSSAPVIESAEDPAKPAEEPLVSMRPRTTSISGKVPEIPTLSSKLEEITKERTKQKDLIHDLVMDKLQSKKQLNAEKRLHRSRQRSLLTSGYASGSSLSPTPKLAAACSPQDSNCSSQAHYHASTAEEAPKPPAERPLQKSATSTYVSPYRTVQAPTRSADLYKPRPFSEHIDSNALAGYKLGKTASFNGGKLGDFAKPIAPARVNRGGGVATADIANISASTENLRSEARARARLKSNTELGLSPEEKMQLIRSRLHYDQNRSLKPKQLEEMPSGDLAARARKMSASKSVNDLAYMVGQQQQQQVEKDAVLQAKAADFTSDPNLASGGQEKAGKTKSGRRPKDPERRKSLIQSLSSFFQKGSGSAASSSKEQGGAVAAVHSEQSERPGTSSSGTPTISDAAGGGGGGGGVFSRFRISPKSKEKSKVSDCTKYIIVMWF

SEQ ID NO: 28306 - DNA, 3802 bp, DROSOPHILA
catgattcccaggtggatcacatcgccatgtatcgctcaaagctgcagaacgtcggagatctcggccaggtcagcctgctgctgatcaccctgatacgacccatttatggacttctgctttttcccacctcaacggtgctccagctgacctcatccatatccattcccgccgacctcaacacccgcaccaaagtcttcatggacatgggcttccagatgaattacaacctgccgcccacggtgtccgccttctacaatgccaccatctgggcagatgagctgtcccgaaggcaaaagcgccagttggaccacagcctggatgctaatctgcagcagtatgatctggagggcggcatgcatcccgctgattttacagccggtcaattgtacaagggaatagaaaacatgctcgagacctatggtttccatagatcctgtctgctccgcagtgtctgcgaactggccctgcatcctttcgctgaggaccacttctatggaatggtcacccaagttataaccttcctgctcacgtaagtttcaaacgttgaaagcttgaatttgttaattcattattctttttcttttttgtaaatataaatattctgaagaagattttgttatatccattatatatatttattcggaattttctgtttttaattgcagaccatctcaacacgagggattcgccgatgacgagcagcattatcgtgataaatacgaaaaagccgagcaaattggatttctcggtggtcagtgtcatctatcatatccgagttgtcaagcagatatcataaacctagccacccgactggtcagatgaaataaatatcttagccataaaattgtcgtctatttaattggtctagattatttcttcactggcacacagttgcagtttacaattaagcttcattgaattgaaaatgctttcctaaattattatgcctctaggccaactagttgtccacaatcagtttaatggatcaggtaaacactgctagcttaacaggctgctgatgccactgagaaagtccacggggcagttggaatacagatggccacaatccattccaaggaatccttgttgttcggcatgttcgtaaacttcccggtaaacgttttccccaggtgcgaaagcctcatgcaaagagggtctgcaattgaaagttataagaaaatctatgacaaaatatgatttttacctacgtcagggtaaaagtcagcagggcggtgagcatattgttttccacatccttgaaaggatgtcgcgccaattcacaaacactgcgcagcaggcaggactcatcgaagccatactggatgagcatattctccaggctctcgtacagctctccggctgtaaagtcactcggatgcattgtggacacaccttctggcagatactttgcggtctcattccacaattgacgctttctgcgccgagaaaactcatctggccaaatggtggctgcgtagaaggaggatggttcagccggcagggcgtagttcatctggagaccccaatcccagaagagtttgcgatccggaatgaccacaggtaccgacagcgatgacgtgatctggtaaacagatgatgcgggaaagagcagagggagctcagccaggatgggtctgagaatgctccacagcgacagcagagctcccatgaagtggacgccagtgatatacattctaatctggtgaccatcacagcgggaatgaccatcgatttcttgacaactcaacgcactgctttaattagtgcctgctaatgaaacgcacagacattgcaatttacatgtaggcccatttccagatcttttattagttctagtgaaatataacttgactcatcagctgtaatatatcgtgtttgcagtgagaatataatctcaagcaatcccgacccaggaatccatcttgctcggccagttcgtaggcctttctgtatacgtcttcgtcatcacgaaaaccttcgtgttgggaggggctaaagaaatggattataaattaaattaacttaaacaattgagatcttaaactattcatacctcaaaacgaaggtcactatatcgcttagcaagtgctgatggctgtcatcgaaagggtgttgtgccaactcgcaaacacttcttagcaagcacgtctcatggaatccatatcccgttaaagtatcctcaaggaaggcatagagttctccagccgaaaaatccttgggatgcataccattgccattatcatgtccatatttcgtatagaaattctcatccgtcatttccagttggggaacttctcgcttcgctttgtagttggcaaatcctggccagatgggtatgctataaaactcagtcaggttatagggatagttgtaggagatggcgaagcaccaatcgatcagaatacgacgttctggatagagttcagcaatgggtgtggacactgaaagtgttagctacaagtaatttagttaatttcatagcccagatgtgaccaaactttacatacacccaaattagaagatgctggccatagcagagaactcgattgatgaatcagaaaaataactaggatacacgtagttagccaatttggtttcattttgggaaccattcgtcttgagatttgatggggaactgatcgatctacaaacaagcgattcccaaaattaatggacaaattgggtcggtgggttaatggatacatgatcatcgtaaatatatcaagacgtcaatcagctgtgagtaaatatttgggcaatcggttggcactgccagaataactggcctctttgggcagcatccataatttaggcttttcagttggctaagatgctacgagccaagatctttatcttgttggtgctgtataccgcttttgggccaagtttggtagcatatcagggaaaatcaaataaaaaggaacttaaagatgtagtgcccagagttttttcgcgacgaaaaagagctgtcttgtttccgccgggatcgtttgtaaagttcacttgctcctttgctactggacttctagcggcctatcccaaaggtatatctttcgttttggaagaggctgtctactttccaatacccggagctgtagaggatatttatcccaagaagtttagacccaagaccacgactaaaaaaccggaaaagctgcccgaaaccattgtctatatacccggcactgattggcgttttaaggctcagactttgcccaaacccaaatggagacaaccaccaccgaaaactcatcgcatcgatgatgatagctatgctaatccttataagtggcaaaattggaatcagaaactaaaatgggacacttaccaatggaaggaaggggactcaaacaaggcaaagtggtcgaaatggaccactccttccccaaagtgggaatccaaatggaatcagaacaagtacagtggagcatggcaatcgcaacattaccacggccatcgcgatcgcagatcactgtttgatcggttcaccaagctcagttcattgtgcgtacttatagtttttttttttttaatttatctgatgatcttgcaactctttaaggattggcattgatgtcaagtcttgcattttgcgcagcatctgtgatagcaagagattactgctgccacctggttattccatgttgcaggacatgttgcgagtggttttcacgtaagtttaaatcctctttatttaaaataaaatattttttttaatttttttttaaaagtctgccccgtttggatgggttggaagatgaatatagtcgcctaatggacaaagatgccgatgaatgtgca

SEQ ID NO: 28307 - DNA, 1173 bp, DROSOPHILA
atgctgcccaaagaggccatgtccacacccattgctgaactctatccagaacgtcgtattctgatcgattggtgcttcgccatctcctacaactatccctataacctgactgagttttatagcatacccatctggccaggatttgccaactacaaagcgaagcgagaagttccccaactggaaatgacggatgagaatttctatacgaaatatggacatgataatggcaatggtatgcatcccaaggatttttcggctggagaactctatgccttccttgaggatactttaacgggatatggattccatgagacgtgcttgctaagaagtgtttgcgagttggcacaacaccctttcgatgacagccatcagcacttgctaagcgatatagtgaccttcgttttgagcccctcccaacacgaaggttttcgtgatgacgaagacgtatacagaaaggcctacgaactggccgagcaagatggattcctggaaatcgatggtcattcccgctgtgatggtcaccagattagaatgtatatcactggcgtccacttcatgggagctctgctgtcgctgtggagcattctcagacccatcctggctgagctccctctgctctttcccgcatcatctgtttaccagatcacgtcatcgctgtcggtacctgtggtcattccggatcgcaaactcttctgggattggggtctccagatgaactacgccctgccggctgaaccatcctccttctacgcagccaccatttggccagatgagttttctcggcgcagaaagcgtcaattgtggaatgagaccgcaaagtatctgccagaaggtgtgtccacaatgcatccgagtgactttacagccggagagctgtacgagagcctggagaatatgctcatccagtatggcttcgatgagtcctgcctgctgcgcagtgtttgtgaattggcgcgacatcctttcaaggatgtggaaaacaatatgctcaccgccctgctgacttttaccctgacaccctctttgcatgaggctttcgcacctggggaaaacgtttaccgggaagtttacgaacatgccgaacaacaaggattccttggaatggattgtggccatctgtattccaactgccccgtggactttctcagtggcatcagcagcctgttaagctag

SEQ ID NO: 28308 - protein, 390 aa, DROSOPHILA
MLPKEAMSTPIAELYPERRILIDWCFAISYNYPYNLTEFYSIPIWPGFANYKAKREVPQLEMTDENFYTKYGHDNGNGMHPKDFSAGELYAFLEDTLTGYGFHETCLLRSVCELAQHPFDDSHQHLLSDIVTFVLSPSQHEGFRDDEDVYRKAYELAEQDGFLEIDGHSRCDGHQIRMYITGVHFMGALLSLWSILRPILAELPLLFPASSVYQITSSLSVPVVIPDRKLFWDWGLQMNYALPAEPSSFYAATIWPDEFSRRRKRQLWNETAKYLPEGVSTMHPSDFTAGELYESLENMLIQYGFDESCLLRSVCELARHPFKDVENNMLTALLTFTLTPSLHEAFAPGENVYREVYEHAEQQGFLGMDCGHLYSNCPVDFLSGISSLLS

SEQ ID NO: 28309 - DNA, 5276 bp, DROSOPHILA
caagtacgaaatccgcccaccccgattatgttgcttgaagttggccatcatcgatgaggagggcaacatgacggggacaacgttcaagatcaagtaccatgacatgcccgacgttttggactttttagtgctgcggcagaccttcgatcttgcagtgcagcgcaactggagcattggtgaccggtttcgctgcatgattgtcgatggctggtggatgggtcagattgaatcgcgccacgccctctctgctgacttccccgactcgtccttcatgtgtttccgcgtgcgctgggataatggagagtatgagtttatgagtccctgggacatggaacccatcgatcagcaaagagtaccggacgaggtgggaggtgctgttccagttctaccggaggagattcgcgccactctataccagcccaagtccgaggaatggcacagaggggatcgcgatggcacctgcaggcgaattatcaatggattggagcaggtaagcatttgatttaaatattatcatattattttattaattgattttcttacaggttatgcgtctctctatcgcagagcatttcctggcccccgtggaccttaacatatatccagactacgcttatttgatcgaatatcccattgacctgaccacaattaaatctcgctttgagaatcacttctaccgcagaataacctcagcccagttcgatgtacgctacctagccaccaatgcggagcagtacaatcgccgacacgcaattatcgtcaagcattcgcgaattgtgacagatctttgtttgaggatcatcaggtgaatgaaggaattttaggtttaaaaaggtaattgttttaaaatatacgtcttctagggaaccggatgagatagatgtggctgctgtttaccatcagcttgcggatgtgtaccattcgtccgagtcggagaacgaggtagattcggatgtagtgccatcgaccagcacagggccaactacttcagcagctgcagcagcagctaggcaaagagtatcctcagccaggcggtaagaatatatataatgcctaataataatatggctcaacaacccaatcttctatagatccactcgaattcactcggaaggagactggcgtgccgattgtcgtcagctgcttgatcttatgtgggcgaggacagattcggcgccgttccgcgagcccgttgacaccatcgacttccctgactacctggagatcatagctactccaatggatctgcgcactgtaaaggaggatctgctgggcggcaactacgatgatccgttggactttgccaaggatgtgcggctgatcttccaaaactccaagaactacaacaccaacaagcgctcacgggtgagtggagagcagattggcagatcggttgcagatcgtcatttattgcattctaagactgagatatccaccctctttctcagctattgccttttcgtttatgttgtgaccccatcccattactcactcacgtagcctcaaatgcaagctcatccatctattctttacgtttcttttgccttccgtgaacatgccttcaatatcgatcttcaaattaatcaccccaactcatgaccatcaaaaatgtaaaacaaaaaaaaaatctaaaaaatatataacccatcaaaacattttaatataatgtctaaccaaatgaatgacgatctccgtgactatcatctaatgtaggataatctagcggtaaggtttctcatctcccagcttgtaatactaacattgtttgctacacaatagttttaaccgttttgcaaccaatactaattgattgtttgcttccaattcttttttcagatttatgccatgaccttgcgactcagtgcgctatttgagtcgcatatcaagacagtggtcaccagctggaaggcggcattaaggcgcgctaataaaaacaagtccggcagcagtggaggaggacgcggtggttccagcagcagtcccaacaagcgagtcaaaaaggagcgatccacgcgccgtaatcaaaagccaacagcagcggccagaagattgccagtcgccaactccagtgaagatgaggacgaggaggatgatgatgatgacgacgatgatgatgatgaggaagaggcatcaacgagggggcgctctcgtcggcgaaacggtgtggccgtaagtgctagttcctctggctccaatcgcgtgacttcttcatccgccgcccaacagcgtcgaggcaaaagcagcagtagcgaggaggaagaggaggaggaaaccagtgcgcaggccacgtcggatgccagcagcgatgaagaggaaagagcccaatccaatgacagttcgccccagcagacacgcacgcgcagggcaaggcagcggcaacggctgagcgatgactccaatatcaacgattccgaggatagttacaaccccaacgagggacgcggcagtcggcgacgtccaggtgccgcacgcccgtccagcaataggcagacaaatggccactccagcaagaggcgacgtttgaacaaaagtccagccaatgctgcacctggccctagtttgccacgtcggacacgtcgcatagcaggcagctccgcagaagaggctgcatctcactcacaacacgatgagagcacacaggatagccagataggacgtcgaaagggacgctcggcaagcagcaggtcaattggcaatggaccaagtaccagtgccgcagctgccgccaactccagccttgaaagtccgtcacggaatactcgagccaacggaaccaggacctcttcgcatcttggagccgaaaatgatcacagttaccacctgccagtgcgcaacgggcgcattatcgagtccgatacggactctcctgtcatcagacccacgcgacagagcgccaagagggcgctaatggactggggtcgtggaagcgatattgaagaggaggaggaggaagaggaagaagacagcgaggaagccgaggaggttagtcgccaccttaagtaaatttagtgaatttttctaatacatctttcttaacttttagatactgccaacacctacaaaggacgacttgccctctaccagccgagccgctttggctcaggcggctgctggtccttctcgccagctacgcacgaaccgcaacaccgtcgttcgtccagcccagagtgacgacgatgacgacgacgacagtgacaacgagccgctggccaacaatcaacaaagtaagttcgaatttgtttcaataagcggtagctaactgttttttcctgcagaaaattatcaatcacctgcaaaatctagctcaaccgcaacagtggcccctcatccactgagcctgcgccgtcgattagcctcgccgccagaacggaatacccatatgacccgttcccatgccacctccacaacgtcctcggccgcagcatcacgggcagaacaacaaccagcggtttccacccacgatcacaactacctaggcaacgtgaattcatcgagggcaccgcgccgcattctttcacgccaccaacgaaatgccgacgagttggataccagtctagatgtcctggaaaactcgcgtctgctctcagccatagccaatcaccggcgacccacctctaccacgaacagcaacagtgcgagcaacgtggttacaaggcgtctgcgtggtcgcgctagccaggcgaattcgcacgacgaggatcatgaggaagaggaggctgctgcttccgatgagggcactgatggaggctctagctcgcagagctacgaagatgaggatgaagactccgactcggaagacaatcagccgctgaccagctacgtatcgcccagcaatggtcgtccgaggcgaaaggcaaaaacctcctcctcctccgcaacaactcaggagcgtccgctgcgacgcacacgtcgcccgccatccaataactccatcgcgaacgacaacgatgacgatgatgactatgttgtgccgcggagtcgtcgcgccaaccggggtggaaaccagcgagccgggcgcaaccaaaagagaccgcgctacaatgagcagtccgaggaggaagaggcggcggctggatattcccatcggagtaaacgaatccgtaacggcgacgctcatgccagctctcaggagcgatcacaggcctccaccgagcgggaccaggaggaagaagaggacggtacttcggtggactcggaagaacagcaggtgaacgttagcagcagaggcagggtgcgcaagccgtctgccaaggcgcgcggtatcttcaaggagtgaccgcagactgttttatgtataaattaaatctaattgctaaatcaacaaacctttgtaacatttgctagagtcttatttcttattattgattaatatgtaagagtaaatcacgtcacttctcattgtaatgtcagtgtcaccgctacggtcattgtcccacacccaacccaccccgatccgtcaaatccgtaaccccaaccgtgaagtgttagcccatatccatcatacaccgtggcagaatatgttcaattaatgttcaagtcttaagttgaatattggcatcagtcctacattctatgtgtagggggcatggccaaagcaacgttttatatgtatttctataatatataggtactatcatacatatatatttaaaggtagcactcggaatcacacttcatttaaaatagttttagaataaagtatcatgaaaaacactgtatgtaactcttgatcttactcctaatcctacaaactaaaaaggtggggcatgatgaaactacttgaccgtcttggcgtagttcttcacccactgttcggcctgctgcttgaccttggccaccgttgcatccgtgccgtgattctcctccagctgcagatactttttgtatatgacttgcatcttgttcggcttcagtttttgcaccacggcacgctccaaaacgtttctaaaataaaaaaaatttagttaataagacaacttttctgtttacatagcatagctatcaaactcacctcgcggaatcgattagacccgccttgattagcatgtccacatataccgaccagatgtcgattcgtttgggataggaagtgactacatcatcgagcagcgtctgcgccatgtcattgttatcgtgctttgcatacaacttggcaaaggacacaatgcaggggatgtctgcaatggttatataaaattaaaacaagttacattttaattaaagtaaacttacgctcttgatttggcaaggcccgcaatgcgcgctggagcagattg

SEQ ID NO: 28310 - DNA, 2635 bp, DROSOPHILA
cagcagctaggcaaagagtatcctcagccaggcgatccactcgaattcactcggaaggagactggcgtgccgattgtcgtcagctgcttgatcttatgtgggcgaggacagattcggcgccgttccgcgagcccgttgacaccatcgacttccctgactacctggagatcatagctactccaatggatctgcgcactgtaaaggaggatctgctgggcggcaactacgatgatccgttggactttgccaaggatgtgcggctgatcttccaaaactccaagaactacaacaccaacaagcgctcacggatttatgccatgaccttgcgactcagtgcgctatttgagtcgcatatcaagacagtggtcaccagctggaaggcggcattaaggcgcgctaataaaaacaagtccggcagcagtggaggaggacgcggtggttccagcagcagtcccaacaagcgagtcaaaaaggagcgatccacgcgccgtaatcaaaagccaacagcagcggccagaagattgccagtcgccaactccagtgaagatgaggacgaggaggatgatgatgatgacgacgatgatgatgatgaggaagaggcatcaacgagggggcgctctcgtcggcgaaacggtgtggccgtaagtgctagttcctctggctccaatcgcgtgacttcttcatccgccgcccaacagcgtcgaggcaaaagcagcagtagcgaggaggaagaggaggaggaaaccagtgcgcaggccacgtcggatgccagcagcgatgaagaggaaagagcccaatccaatgacagttcgccccagcagacacgcacgcgcagggcaaggcagcggcaacggctgagcgatgactccaatatcaacgattccgaggatagttacaaccccaacgagggacgcggcagtcggcgacgtccaggtgccgcacgcccgtccagcaataggcagacaaatggccactccagcaagaggcgacgtttgaacaaaagtccagccaatgctgcacctggccctagtttgccacgtcggacacgtcgcatagcaggcagctccgcagaagaggctgcatctcactcacaacacgatgagagcacacaggatagccagataggacgtcgaaagggacgctcggcaagcagcaggtcaattggcaatggaccaagtaccagtgccgcagctgccgccaactccagccttgaaagtccgtcacggaatactcgagccaacggaaccaggacctcttcgcatcttggagccgaaaatgatcacagttaccacctgccagtgcgcaacgggcgcattatcgagtccgatacggactctcctgtcatcagacccacgcgacagagcgccaagagggcgctaatggactggggtcgtggaagcgatattgaagaggaggaggaggaagaggaagaagacagcgaggaagccgaggagatactgccaacacctacaaaggacgacttgccctctaccagccgagccgctttggctcaggcggctgctggtccttctcgccagctacgcacgaaccgcaacaccgtcgttcgtccagcccagagtgacgacgatgacgacgacgacagtgacaacgagccgctggccaacaatcaacaaaaaattatcaatcacctgcaaaatctagctcaaccgcaacagtggcccctcatccactgagcctgcgccgtcgattagcctcgccgccagaacggaatacccatatgacccgttcccatgccacctccacaacgtcctcggccgcagcatcacgggcagaacaacaaccagcggtttccacccacgatcacaactacctaggcaacgtgaattcatcgagggcaccgcgccgcattctttcacgccaccaacgaaatgccgacgagttggataccagtctagatgtcctggaaaactcgcgtctgctctcagccatagccaatcaccggcgacccacctctaccacgaacagcaacagtgcgagcaacgtggttacaaggcgtctgcgtggtcgcgctagccaggcgaattcgcacgacgaggatcatgaggaagaggaggctgctgcttccgatgagggcactgatggaggctctagctcgcagagctacgaagatgaggatgaagactccgactcggaagacaatcagccgctgaccagctacgtatcgcccagcaatggtcgtccgaggcgaaaggcaaaaacctcctcctcctccgcaacaactcaggagcgtccgctgcgacgcacacgtcgcccgccatccaataactccatcgcgaacgacaacgatgacgatgatgactatgttgtgccgcggagtcgtcgcgccaaccggggtggaaaccagcgagccgggcgcaaccaaaagagaccgcgctacaatgagcagtccgaggaggaagaggcggcggctggatattcccatcggagtaaacgaatccgtaacggcgacgctcatgccagctctcaggagcgatcacaggcctccaccgagcgggaccaggaggaagaagaggacggtacttcggtggactcggaagaacagcaggtgaacgttagcagcagaggcagggtgcgcaagccgtctgccaaggcgcgcggtatcttcaaggagtga

SEQ ID NO: 28311 - protein, 532 aa, DROSOPHILA
MWARTDSAPFREPVDTIDFPDYLEIIATPMDLRTVKEDLLGGNYDDPLDFAKDVRLIFQNSKNYNTNKRSRIYAMTLRLSALFESHIKTVVTSWKAALRRANKNKSGSSGGGRGGSSSSPNKRVKKERSTRRNQKPTAAARRLPVANSSEDEDEEDDDDDDDDDDEEEASTRGRSRRRNGVAVSASSSGSNRVTSSSAAQQRRGKSSSSEEEEEEETSAQATSDASSDEEERAQSNDSSPQQTRTRRARQRQRLSDDSNINDSEDSYNPNEGRGSRRRPGAARPSSNRQTNGHSSKRRRLNKSPANAAPGPSLPRRTRRIAGSSAEEAASHSQHDESTQDSQIGRRKGRSASSRSIGNGPSTSAAAAANSSLESPSRNTRANGTRTSSHLGAENDHSYHLPVRNGRIIESDTDSPVIRPTRQSAKRALMDWGRGSDIEEEEEEEEEDSEEAEEILPTPTKDDLPSTSRAALAQAAAGPSRQLRTNRNTVVRPAQSDDDDDDDSDNEPLANNQQKIINHLQNLAQPQQWPLIH

SEQ ID NO: 28312 - DNA, 3311 bp, DROSOPHILA
cgtcacttaattggtgaaaatcgacatcggaatagtggcaaaaaaattttccctcagtcgctcagctattttctggcttcgtctgcgcgtgtgagcgggatggtgacagcggtccgactggccgcgtcagggcatcgcgtgtgcgggagagagacgaggctatcgaccaagcgagaaacgcatacgccaaagtcgaaaagtgattttttcttcgttcgttcgggcgaagtcgaaactgctgcgaaaagttttataaataaagtattgcaattccaagttctcgaatgttagtaaacttgcgaagtgcaacaatcgattggtcgtttcggcggcgtctcccctctgcgattatataaatagtgaagcacgttgccccgagtcctaattgcgcatcgattggtcttgtatccgtgaataaacgaaattggcgatacgaaacgtggggaaattaagtgatctagtgcaatttttttgtttcgtcttgcacctgaatcattttcggtgtaaaaatgtgaatcagtggacaggggaaatggaatggaatgggagaattaaatgcgaacgaacgatgtacgaacgagtgtgcaaaggcacagtgaaagaatgcgcagagttgccacctcgctggctcatgtgcttacgtgtgtgtgtgtgtgtgtgcgtgcgaatgtgtgtgttagtttctttgcccatcgcatatatataaaccaattcttcacaatatccaaaaatcaatataacccaagaacctatttttgttgatgtgtttctgtgccgccgccgtcaccgccgtgaccctacacacctttgaaaaacacatcaacaaagttgttaaattcacttgtagtgaaatttatttgggacgtgacatctgtttacccaaactaaacattttaatttctatacctttacttcttttgatacccgaaaggacgcgcgaattgaaagtaaatcaaaaagaataaccccaacaacacagaacctccagcgagagagtaaaatgaataatgatgcgaaaaaccatgaaagcgatgacttgaatgtgcgctccacagcgtattttaaccaacaaaccacaaccaatcaaccgaaagcaccagcaaccagcaagaataacacaggctctggctctggatccaataataacaataacaacaccaatcaaaaccccaacagacagttgaatcataatttaccccgaatcgctgccgccagacaatcgatagccgccgctctattgaaaaacagcgggcggaagattctgacggccaagaatgagccactgacgacgacggagtcatcaggcgttttaaccaacacacctttacccagcaatagccgattgaaagttaacaacaacaacaacaccaataacactgccaagatgtctggaactagtagcagtcagtcctcggccacgcccacaccgcccacggccagcagcagcacaaccaccacaacaacaacgaacatcagcaccggaggcggtgggagtggcagcagtggcggtggcggtgggagtaccacggtcattgccaatcccgcatcggtaaccaacaccggagctggaagtgccgccaagttccgtgccgccgtggcctcggcgcccagcccagcactgcctgcaaccaacgctcctgcaaatgcaactgctgctgcggcaatagcagcaatcgcaactgctcctgcccccagtagtagctcctccagctcctcgtcctcgaagaagactagagcagcagtggccgccctgaagcgacaggtggccttgcaacagcagcagcctgttaccggtaatgcacccaacatgaccagcaaggattcggcgcatttgaaattcgccacaaccactctgctgatgggcgccgccgcagctgccgccgatagcaacgctggcgctgctctcggtggatcaggcgcaggaggatcaggatcatcatcatcagtaggagcggtaggcggggccagaatggccctgaatcccgccgttgatatggccaatgccgctgtcctgcttaagcaaaagctaaaggatgcggctgccgctgcctcggcctccgcctccaatcgctcagccacctcgtccatgtcgtcaaccgcctcctcgctgtcttcgtcggcgggcatcgtgaatgccatttcctcggcgctgcagaacatcatcacgccggatacggacaccgacaccgaattctatccccagcccgtcaccacagacctatccgaatcggaggaggagtccgtttcagaggtgagtgagcccacctctgcatataagccattacgtagacttgtctctaagacatactaaagagtattgtattcgctttaaagttgtcctgcatgtccatcgatcttttcgaaagctgacattttggtactattttgaaatctcaagcttgttactcgacgcctctagaagtagaactagtttttgtttggccttagtcataaacacatactacactcatctttataaacccatctattactcggaaccatcttatcttgcttagaattacaggacaacgcaatgaactagtgactgtggattaaactagctttgtcacaaaaaccaaaatagtataaaaaaaagatggtaatgctaagcagcatttaaattacagtcatcttatttttggatatttacatatacatacatatagttaaaaaaaaaataaagtaaaacatgtaatttccctcagataattttgattgatagtgcaaacaatttggctaagacagatgattataggcgtattgtgttatcggctaagtgataacaaaacactccttatcagaataaccgagtgatttattatcgtagttgaacgaataagtatttatatttcaaactaaatccacgcttgccgctccacagattcgcattatatacaattttacgtggggaaatacctcgaattgaattgatcgcaaatatttgtgctacacgcaattgttgttgcggcgtcgctctctttctctcatacaaaccggaaggctgtttgtgtgtgctagccctattcgcttgatagtgtgtgtgaatgatttatcagctgttcgactgctcgctggcttgccatagtatgcgtatgcctatgtacttctttgtctagcaaacaagcacgtttgcgaaatgttaaatgcaagttgatagaagaaaaaacgtaaaagcttttatgtatgcagctactcaattaaaatcaaaggtcattgcatcggtgggatcttgcaattgacccccgcctgccccacgcaaattagtagtttaatttcctcgctgcttacacatgtacataatttttttttcg

SEQ ID NO: 28313 - DNA, 1311 bp, DROSOPHILA
atgaataatgatgcgaaaaaccatgaaagcgatgacttgaatgtgcgctccacagcgtattttaaccaacaaaccacaaccaatcaaccgaaagcaccagcaaccagcaagaataacacaggctctggctctggatccaataataacaataacaacaccaatcaaaaccccaacagacagttgaatcataatttaccccgaatcgctgccgccagacaatcgatagccgccgctctattgaaaaacagcgggcggaagattctgacggccaagaatgagccactgacgacgacggagtcatcaggcgttttaaccaacacacctttacccagcaatagccgattgaaagttaacaacaacaacaacaccaataacactgccaagatgtctggaactagtagcagtcagtcctcggccacgcccacaccgcccacggccagcagcagcacaaccaccacaacaacaacgaacatcagcaccggaggcggtgggagtggcagcagtggcggtggcggtgggagtaccacggtcattgccaatcccgcatcggtaaccaacaccggagctggaagtgccgccaagttccgtgccgccgtggcctcggcgcccagcccagcactgcctgcaaccaacgctcctgcaaatgcaactgctgctgcggcaatagcagcaatcgcaactgctcctgcccccagtagtagctcctccagctcctcgtcctcgaagaagactagagcagcagtggccgccctgaagcgacaggtggccttgcaacagcagcagcctgttaccggtaatgcacccaacatgaccagcaaggattcggcgcatttgaaattcgccacaaccactctgctgatgggcgccgccgcagctgccgccgatagcaacgctggcgctgctctcggtggatcaggcgcaggaggatcaggatcatcatcatcagtaggagcggtaggcggggccagaatggccctgaatcccgccgttgatatggccaatgccgctgtcctgcttaagcaaaagctaaaggatgcggctgccgctgcctcggcctccgcctccaatcgctcagccacctcgtccatgtcgtcaaccgcctcctcgctgtcttcgtcggcgggcatcgtgaatgccatttcctcggcgctgcagaacatcatcacgccggatacggacaccgacaccgaattctatccccagcccgtcaccacagacctatccgaatcggaggaggagtccgtttcagaggtgagtgagcccacctctgcatataagccattacgtagacttgtctctaagacatactaa

SEQ ID NO: 28314 - protein, 436 aa, DROSOPHILA
MNNDAKNHESDDLNVRSTAYFNQQTTTNQPKAPATSKNNTGSGSGSNNNNNNTNQNPNRQLNHNLPRIAAARQSIAAALLKNSGRKILTAKNEPLTTTESSGVLTNTPLPSNSRLKVNNNNNTNNTAKMSGTSSSQSSATPTPPTASSSTTTTTTTNISTGGGGSGSSGGGGGSTTVIANPASVTNTGAGSAAKFRAAVASAPSPALPATNAPANATAAAAIAAIATAPAPSSSSSSSSSSKKTRAAVAALKRQVALQQQQPVTGNAPNMTSKDSAHLKFATTTLLMGAAAAAADSNAGAALGGSGAGGSGSSSSVGAVGGARMALNPAVDMANAAVLLKQKLKDAAAAASASASNRSATSSMSSTASSLSSSAGIVNAISSALQNIITPDTDTDTEFYPQPVTTDLSESEEESVSEVSEPTSAYKPLRRLVSKTY

SEQ ID NO: 28315 - DNA, 4339 bp, DROSOPHILA
cctgcaaggagatgggttactagtgactccttagaagctgtcacaggtgcacgtaccttgggtggtgttgccacaggtgtacttttgccgtactcctggccggcattcactgtccatcaggcaaaaggaggccttgtgcccctgggccaccttccggtagttgaggtcgtaaacatcaaaggtggcaaaaacattcatgctgtggtagtgtctgtggcactggtgccatacccattccttgtagttagcgtatgggcttacatcggcggtgcccacattggaagccttaacggaaaagcgaagcagtatcctcgcagcgtgcggattcgtccttcggatctcgtaagcgtcggcggaaacacagtgctcttccatggcgcatgtgagccgcgacatgggcacggcctccaggcgggcggttctctcgatgtccaccagtccgatctccaggtcagccgaatggctaacacaggccgcaatgctgacattatggtttctggcattgcagaggttcgggtagtgggactcccggatgcagtcggctaggcgacgctcggttcccctgcacagagtgcccaccatgccccagggatacttccggctatccccgtgctccgttccctggcttgccttggaagcgtagcccaatcctagctgtcggcacaccacatttgcctcccgcatgctccacgaagtgctgcagatcgtaccccatgaggcgccaaagtcaaagctcacctccacgcgtccctcgcggaggacttgaataccggcgagcgctgccttgttagtggccagtcggaccatcatgtttctatagttgttctgcacgttgaggttggcccaaccttggctgagaaccactaggagctgcaacaattgaaaccggaacgaagccatcgcccattcagccccttctggtggagcacacccaaatcgcaaccagttttaaagtcaatggaacaatgcgccagtagggtaacaactggcaaatggggctacatgtgtaggaggtatattgtgcgttgtgcttcccaacggatcgacccacatctgcttggcaggcgggaaaacgtttgtatacaaaactcagctggcaaaatgcctattccgagcgcgcgtgctctggtttctgcggtttctttttttgggggtatggagtgcatgtgtaaactacttctgtgcgccggttaggactctagcaacttagtgatggcctctttcagttccgccggcttgaagacaccgcgttccgtgatgatgcctgtgatcagagaggcaggggtcacatcgaaggcggggttccagcagttaatgcccggggcagcgatgcggtgctctcccacgtgcgtcatttcccggtcgggacgctcctcaatgatgatgtgatcgcctccgggaatcgctagatcgatggaagtcagaggggcggctacgtaaaatggcacgtcgtggtgcttggcaaccacggcaatctggtaggtaccaatcttgttggccgtgtcgccattggaggccacctaaggaagggaagaaaccattaatcgaaaatagttaatcattaagaggcttacttacacgatctgctcctacaaccacagcagccacatttttggcccgcagcagagccgccaccatgctatccagaaccagagtggcggggaatttctcgtggaccagttcgtaggctgtgaggcgggctccctgattgtaaggacgagtctctgtgcaataaacgtgctctagagcgaaaagtgcaaaagtgcgtaagtaatcaataaatgtaccaaactctattaagtactcacccagttttcccagctcggccagttggcggaccactcccagagctgtaccgtacccggcggtggccagggaacccgtgttgcagtgggtaagcacccggacggatcccgtcgatccagcgggcgctttacctgccttcgccacgccctgtaggatcgcctgggctccattcgctccaatggcacggttatcggcaatgtctttttttagcatagcttcggtcgcgtccagaaatcttaaacagaagggggttaactttgtgtgctcgtctcgtagcccagtaaggaggttacctatgcttcatttgggtcacgtcgattgcctcgtccttgtaaagttcgttggccagggtgatgagctcgtcggctgcgatcttcatgttgaccgccgtaggcctggcggaaaccaaatagttcaactttccctcaatctcctgccgcagtgatttcttgttctcaaaatcctccgggttgatttccacggccagggagaggcagccaacgatagcgatggccggagcaccacgcaccttcaaagagtcaaaaatattagtttaaattgcttgttttatttttaatggtcccttaaacgcacccacttttcatgactatatgaaacgagtacccattaatagtcgtgatcaatcaagatgctaaatgagaatatttaaaatatcaggctgtcatgctgttgtcatgtctcaaatgagaccgttggggcaataatttcgctgctatattgtcgttattcataaacaagagcgaagagcagacagattaggtgggtcagcctatcttggcttatcagatgacgatgcaaaaggcggagtaaatagcttacatggaaaacggcgaggctccacgtgacaaggcgcgtgctcacacataaacgatcggccaccaatgggccatgggccatcatcttcttgttggggcattagcccagtgggaaccgatcgccaagtgacgtgcgcggagtagttttatttttggcaagcgtttttaaatttttaatttcaattacgttatttatagccgggcaagggacatacgacaagcgacaagagacaagcaagcgatcgttgcgcagattaggaaatgtaccaacaggcattttaatggcaatatgccggggaacgtggactattaagggaggcaggaaaaggcgctggcctaggcattctcacctgcatcttgttgatgaccttccagccatcctccactcctcgcaccaccacgtactttgactgaccgggcaggagcagctggtcgaggatctccaggctgccccgcgagtacttgatcgactgcaggctcatctctccaggggattgtgctgaaactggaaagggttaccgattaatgtgtgcactttttggaggaagaagcagggagacgggcaacccacttggaccactagtgggcgaatcgctgccaactaatcagttattaatcgaaggcgatcagtttcagtttcggtttcggtttgaaattcgtagctttaaacgctccctaacaacgactgccaggcaaacggatcggttagcaactgaacgagcctcacggttggggcgtcggaagagtttgtttcgcagacgagcgagagtgccgagaatggcgccggtagagcaggcggtacacaaaaagaacacagtccgacttccacgaatggtacacttatatgtaatttgagtgatcctgacgaataacaattgccaacagaccgagttaaacataacttcaatagatgctatcgatcagggtgtcaccttttcgtgcagtgtacttggccaagggcgtggcagtctggcggagggggggggggggacctcgtccgcgacatcgtcgattaattcgagtcggggacatcggtggctggggcttccctccgccgcttgccccattgataaacgttgggcgctcgcgttgaatttcttgctgacaagtgtagcccggcaagaaattaatcgcgctgcttatctgtcggccggttattgggcaattttgagtgtgccttaattaatgcgactgcaattagttgggccgcagcgtgacagcgacttgtccgctggtcctgtgccaataaaccgccagatggagtgcgtcgggaggaagggattgggcagtcatcactatccccatcaccataaccatcagcagttttggtgaatttgggggcaactggtggttgccgcaagctaacctttcgcagctgtgtagcagctgaatgactcccaacaccaggtggtactggtggcttccggggagcgaaatcaaaaatcaggaatcggtgctcgcggttatcgcatcggcaacgcgcacgttttgttacttgatttatttttaatttttgatttacgaatgctagtgcgggcagtgtggtctcctctttttccgcatagaataccaaaatcttcccgttccacaacaagcctgatttagctgttttgtttgcaacttttgtaaatcttacggctataggaagcattttcaggcaaactcggacctattatcattttgttacttttggttac

SEQ ID NO: 28316 - DNA, 1434 bp, DROSOPHILA
tttgcctggcagtcgttgttagggagcgtttaaagctacgaatttcaaaccgaaaccgaaactgaaactgatcgccttcgattaataactgattagttggcagcgattcgcccactagtggtccaatttcagcacaatcccctggagagatgagcctgcagtcgatcaagtactcgcggggcagcctggagatcctcgaccagctgctcctgcccggtcagtcaaagtacgtggtggtgcgaggagtggaggatggctggaaggtcatcaacaagatgcaggtgcgtggtgctccggccatcgctatcgttggctgcctctccctggccgtggaaatcaacccggaggattttgagaacaagaaatcactgcggcaggagattgagggaaagttgaactatttggtttccgccaggcctacggcggtcaacatgaagatcgcagccgacgagctcatcaccctggccaacgaactttacaaggacgaggcaatcgacgtgacccaaatgaagcatagatttctggacgcgaccgaagctatgctaaaaaaagacattgccgataaccgtgccattggagcgaatggagcccaggcgatcctacagggcgtggcgaaggcaggtaaagcgcccgctggatcgacgggatccgtccgggtgcttacccactgcaacacgggttccctggccaccgccgggtacggtacagctctgggagtggtccgccaactggccgagctgggaaaactggagcacgtttattgcacagagactcgtccttacaatcagggagcccgcctcacagcctacgaactggtccacgagaaattccccgccactctggttctggatagcatggtggcggctctgctgcgggccaaaaatgtggctgctgtggttgtaggagcagatcgtgtggcctccaatggcgacacggccaacaagattggtacctaccagattgccgtggttgccaagcaccacgacgtgccattttacgtagccgcccctctgacttccatcgatctagcgattcccggaggcgatcacatcatcattgaggagcgtcccgaccgggaaatgacgcacgtgggagagcaccgcatcgctgccccgggcattaactgctggaaccccgccttcgatgtgacccctgcctctctgatcacaggcatcatcacggaacgcggtgtcttcaagccggcggaactgaaagaggccatcactaagttgctagagtcctaaccggcgcacagaagtagtttacacatgcactccatacccccaaaaaaagaaaccgcagaaaccagagcacgcgcgctcggaataggcattttgccagctgagttttgtatacaaacgttttcccgcctgccaagcagatgtgggtcgatccgttgggaagcacaacgcacaatatacctcctacacatgt

SEQ ID NO: 28317 - protein, 364 aa, DROSOPHILA; identical to SEQ ID NO: 2574

SEQ ID NO: 28318 - DNA, 2975 bp, DROSOPHILA
tcgcatatttccgggattgagcaaagtgatgagtgcgttgccgcgggtgacgaagtacaacgcgaagacgaccattccgggcggactaagtcttggacagatgcttggaaacgtgaatccccgggacttcttcacctaccgtggatccctgaccacgcccctttgcgagcagtctgtcacctggacggtgttctcccaggttctgcccgtaccctattcgtcggtgtcgaaattctggaaactgcgagactccgagggccacagactgatcaacaatttccgggacatacagccgcgaaatgggcgcccagtgttctacaggatcggaaaggatctgagtggggcctatctgggaaagtgatgctaatgtaactcgactaagttccgtatttattatagtttttaagacaaataaattatttcatctgttgtaagctattctccctcgtacctaccgtttttcactcttggcgttccaaatcagatccgatacggtgggaaatcgttgcaaatctcacctgaaccgagagtaatcgaactatttgtgatacgctccagttggatgtagtctttagtcggagctgcagccaagttagcatatctcccgcgcattgacatcggaagaactaagtaaaatccacaccgacgagcgacataagacacacgagttatcaattaattgcaataataataatagcattgcaatcgtagcaatcacaactgaaattcacaacaatgcaggcgattgcgtttcacaaactgttactactgcttccgctggcgttttatcaatcaacaaatggtaaatcaaatgccagaagttatatgtatatttgcatatgtgggaaacttggcgagttctgacgaattagagacattcaaaagaataaataagcatttcaatttcaaatcaatttagcagtccattatgagtactaaacaaggcagttaaaagtagaataaactaatcatttgcttccttcacttgaaacttgcaggtatggagtggaattacctgaagaatggcaaggattgggaggacctctgctcctccggaaaacaccaatcgccgattttgttggattctagaacggtaagcagtataccaaacttatttttatgtttttttttttaatgttttctcgtacttactggtaggcgcgcaagtgggtcttacctgggatcactttctggcattattataggctgcttaagcgtccgttttacatcagaaacaatgggcactccagtaggctttatatagtggttagtagttcaaaactgagcgcaactaattgcaatattggtagttagcttggacattcccgtgacgagcaatggaaggaagcccttcataaccggcggccgtttgaagggtcgttactatgccgatggacttcacttccattgggggtcctacaaatcccgcggatccgagcacttgattaacaagcgccgattcgacgcagaaatccatattgtccatcggaacgagaagtacagaaatattgcacaagccgtccgtcagaaagatggtttggctgttgtcgcaatcatggtggctattgttagggtaatccatgatagaaatgatgtgtgaagaattcatgttccttgaatttacttttagaaggacaatgcgaaatccacacctttgtccaggctcatggaggcagtcgtacgggtgccgatcgaagactcgaacgccactgtttttggccaatcaagcttggatcagttgatcggaggtgtgagtcacagggacttcttcacctacgagggctcactgaccacgcccctctgcgacgagactgtcacctggattgttttcaccgagactacgactgtcaccatgtcatccgtctcaaagttttggctgttgcgagaccactggggccacaggctgatcaacaattatcggattgtccaagatctaaacaatcgcactgtgttctataagaagagaatgtcataaaagtcataagttataagaactaaatacaacactctcctgtactaaccaccacttcatgttactgagatacataagtgctacaatctcgagtaagtaagctttgtcccaaaactggaacaaagaccgaagacgaaggtttccgtagtgcaagtcgatccagatgctatttgagttttgctcaagttgttacaacagctgttagtctttgagctataaaattgtgatagaagcacacctttgttgaacaatcaaaaatctatagtttagccaaatggtgtatgtagagtgcattaatctgaagtattagaagtagtagtagtagtagtagtgtggaaagttgtatttgttaaccaagatcagtaagggcaatgccttggttgaactatcagaaaagcgcctaatgagtttacctgccatccagacaggtaatttagcaattgccctgatagattagggattccaactaataataggaaacatattagtattatctttatattataaaaagtataaatttatacaaaagtctaagaactcgagcctacctcaagctgtgagtcgttggctcattcggtgggcgttgattaatagtgaagtgattcactggatttggaaaccacccatcgcaatgattcaagcgacgtgatggcgatccgcctccttgcactatttaaatctgattcagagcaatcagggattcttcgatcaatctgccatgcagagggaatgtaagagagtggagaggattcattagttacgggctcagtgtcttggccacagtcaaagtcaattatgaagctggtttggcaaccgcaaagctgttaagccatttgcaatttgaatgtaaattgcgcccataggctggctaagccgattgcgcttatcagccccttatgcacacccatatagaagttatggcagttttccctgcacttgctggtataaatggtcctgtttgtggccgagaaactcacagtctgattggaatctccaaggcgaa

SEQ ID NO: 28319 - DNA, 708 bp, DROSOPHILA
atggagtggaattacctgaagaatggcaaggattgggaggacctctgctcctccggaaaacaccaatcgccgattttgttggattctagaacggtaagcattagcttggacattcccgtgacgagcaatggaaggaagcccttcataaccggcggccgtttgaagggtcgttactatgccgatggacttcacttccattgggggtcctacaaatcccgcggatccgagcacttgattaacaagcgccgattcgacgcagaaatccatattgtccatcggaacgagaagtacagaaatattgcacaagccgtccgtcagaaagatggtttggctgttgtcgcaatcatggtggctattgttaggaaggacaatgcgaaatccacacctttgtccaggctcatggaggcagtcgtacgggtgccgatcgaagactcgaacgccactgtttttggccaatcaagcttggatcagttgatcggaggtgtgagtcacagggacttcttcacctacgagggctcactgaccacgcccctctgcgacgagactgtcacctggattgttttcaccgagactacgactgtcaccatgtcatccgtctcaaagttttggctgttgcgagaccactggggccacaggctgatcaacaattatcggattgtccaagatctaaacaatcgcactgtgttctataagaagagaatgtcataa

SEQ ID NO: 28320 - protein, 235 aa, DROSOPHILA
MEWNYLKNGKDWEDLCSSGKHQSPILLDSRTVSISLDIPVTSNGRKPFITGGRLKGRYYADGLHFHWGSYKSRGSEHLINKRRFDAEIHIVHRNEKYRNIAQAVRQKDGLAVVAIMVAIVRKDNAKSTPLSRLMEAVVRVPIEDSNATVFGQSSLDQLIGGVSHRDFFTYEGSLTTPLCDETVTWIVFTETTTVTMSSVSKFWLLRDHWGHRLINNYRIVQDLNNRTVFYKKRMS

SEQ ID NO: 28321 - DNA, 2653 bp, DROSOPHILA
tacaaaagtctaagaactcgagcctacctcaagctgtgagtcgttggctcattcggtgggcgttgattaatagtgaagtgattcactggatttggaaaccacccatcgcaatgattcaagcgacgtgatggcgatccgcctccttgcactatttaaatctgattcagagcaatcagggattcttcgatcaatctgccatgcagagggaatgtaagagagtggagaggattcattagttacgggctcagtgtcttggccacagtcaaagtcaattatgaagctggtttggcaaccgcaaagctgttaagccatttgcaatttgaatgtaaattgcgcccataggctggctaagccgattgcgcttatcagccccttatgcacacccatatagaagttatggcagttttccctgcacttgctggtataaatggtcctgtttgtggccgagaaactcacagtctgattggaatctccaaggcgaacggatctgaaagtaatcaaccgaaaagttcttttccctacaatgttttctatcggtttttgctggcttctagccatttgcggatgcacttttgcctatataggtgagtttacaggcccttagttatatcgcaatataatcgctggaataaatgtgcagagataccggaggcctatctaactgccatcaggcaggatcgggcggatgagcaggcggcaggcgagtacaactacgatgagcagggcgatgactggacgggaacgtgccaaagcggggagaaccagtcacccatagatttgatttttgaagatgtaagtttccgacgggtaatctattttaaagtgttgctaactttttatctaaatagtcgaaaattgtggccattccccgtctgcgtttcaacaactatgatcagccattgcaaacccccttggtgattaccaataatgggcacacaggtgggaagctatcaaataacataacatgcttgtgaactaatttgagatttggatagccaacatggtgataccgcaaactcgaggtggccagcggccctctattaatggcagtctcttgcccgggaatttcgaggcccagagtgtccacttccattggggatcgcgggaggccaagggatcggaacatgccatcaacttccagcgctatgacgtggaaatgcacatcgttcataagaacaccatatatgagacgatgggcgaggcaaccatgcatcccgatggcctggccgttctgggggttatgttcagggcggtggatcggcagacctcgcagcactacggactcaacaagatctttaaccagctgccgagaatcgtgcagtataactccaatgccacgataaccggcagactgacggtgggccagttgctgggtaatattgtgactggagagttctttacgtacaatggtaagtaagggtaatcacataaagatccttggttctcattgaagatttcttaggatctctgaccacaccagattgtgccgaagcggtcacctggactgtgtttcccgacgttctggactatccgcgtcgccagatcacaaaactgtggaacctcagagactcacgacaaaggcccctcatcaataattatcgcagcattcaggacaccaatagcagagatgtctattaccgaaccattcaataaaaatattcacgtaattaagtacccctttttcttgatttattaaatattatatacatcacccattcatttttggaattacgacatttgattagaaaatttgtatcttactaaggaatcggcttacttaaaaacaagttaagcaatttcactaaagggagttccggtgcttggaactcgagttcatttcgacaataactcatttgttgctaaaagcttgttatcgaaggtcagtattcacataacttttcatttcctataaagaaaaaaggttttgtgagtaatgaagggcgtcaaaagggtttcttagcattcagctcataacagagtgtcttccacctaaaagtatgctatactttgatgtgcttagttgtgatttggccaaaatgcttgactcgcagctaaaatacggataggtttggagagtaaagttactagcttttatgacattctagtattccagttcttaagtgatcttcatttaccaaaaatattgataattcggggcctagttctgacaccatatgcatggagaatcgtatcgttgacttttaaaatgtacctatttaattattcaatcagtaagacacacacgatttttataattgtacgcaaatattcagacaggaaatctaaggcaaatattgagaatcaatttagcagaggtccctttcggaggaagtgcctgctcgaagcgaaacatccggtgaggaagtgggtggcagaggaagaattcgcttggcttgagcttttgtctggatatgacagatttactacgccatatatacgtatttttcctggaagagatatggcaactattggcaccggaatcggtggcgagggggagcggggatggtgaggccgagataaaggacaagtcagcatcgatgttactcatacgcagtgtgcaccagacacgcatacccacatacgcaccatagacaatttgcatttgcaattttcactgcaccctctttctcgcttttgactgtcgtttttcgcg

SEQ ID NO: 28322 - DNA, 600 bp, DROSOPHILA
atggtgataccgcaaactcgaggtggccagcggccctctattaatggcagtctcttgcccgggaatttcgaggcccagagtgtccacttccattggggatcgcgggaggccaagggatcggaacatgccatcaacttccagcgctatgacgtggaaatgcacatcgttcataagaacaccatatatgagacgatgggcgaggcaaccatgcatcccgatggcctggccgttctgggggttatgttcagggcggtggatcggcagacctcgcagcactacggactcaacaagatctttaaccagctgccgagaatcgtgcagtataactccaatgccacgataaccggcagactgacggtgggccagttgctgggtaatattgtgactggagagttctttacgtacaatggatctctgaccacaccagattgtgccgaagcggtcacctggactgtgtttcccgacgttctggactatccgcgtcgccagatcacaaaactgtggaacctcagagactcacgacaaaggcccctcatcaataattatcgcagcattcaggacaccaatagcagagatgtctattaccgaaccattcaataa

SEQ ID NO: 28323 - protein, 199 aa, DROSOPHILA
MVIPQTRGGQRPSINGSLLPGNFEAQSVHFHWGSREAKGSEHAINFQRYDVEMHIVHKNTIYETMGEATMHPDGLAVLGVMFRAVDRQTSQHYGLNKIFNQLPRIVQYNSNATITGRLTVGQLLGNIVTGEFFTYNGSLTTPDCAEAVTWTVFPDVLDYPRRQITKLWNLRDSRQRPLINNYRSIQDTNSRDVYYRTIQ

SEQ ID NO: 28324 - DNA, 4385 bp, DROSOPHILA
aactttttacttttaatatggcttctcaagcctgttagcagtttcactacgacttcgcaaaaggattagctgttgtgtctggaaaagtttccgaggataagttcaggggtgactagaccaaaggggtgtcttcatttcacaggatttgaatccgtccatggttttttttaagtcgcaagacttaggcacttcaagggctactcgcatagattatcaaatgtcctcttttgtagttcaatagcaatttagatttagtttagcaggatatcaggccattttgttggccaatacacaccattttgctgtaaattaaattagacactcgcgacacttggcgatttaaacaaacttaattaagatttcacgggcactgttcactcttcactctttagtcaactgtccaaaaaatttgatttgatttccagctcccagtggctatattccctggccaggacactcgcgtggaaatccttgcttgaaattccgttcgcttttcaggggaaaaacagggctggaaaaaacacgaccgaaccgctgcgcgttccacgcacgtctgacaaactgcaaatcaatcagcgacgggccaagtactctagttggccaactggcgcatccggctaattggattgtaacatatcgggaatgctcgatggcgccgtcaccattgggcacacactcttttcgcctcatttgcagcattacttcactggaggaatggccaaatgctggtcatgctgacctttgtatagaatatggccggcaaaaacactgtgataaaagtgcgagcagggcggaagcggatttcggccaggttttcaagattcccaatgcagctgcaatagcctctgggtcggcttaaaacttgtacgagttcgtttaacatgatttcggtgtgcactgctgacttttttggaggtttgcgaaaacgcgtcgaagagcgtgttcaacaagctcaaacaattaaaattccgaacaaaaaggttcgatagaaaaaaagtttgaaaagttataaccaaaaggcatttaatttaataatacaacaagcagtgtttgaaaaaattcaacattttaaatgtgtctcaaaacattatgcagctaagggacattcttgctagatatccattaaataaattattacaatgtgaaaaaggccattttaaaccattcttagccatgcttaaatttaaagaatgtacaattttgtattactaagcaagccttacttaagtgagcgaatcttgtgatatatccaggaatgatatgtgcgctccttgaccatctccttgtctgcgaagtcaaatatattaccatagctatagaaaataaacaagtcaaaaagcaaacttaccatcacactggaaacactgagccaagttcggcggacaaatgttttccgaattgaaatagaaggtggtctttagttcgcggaacttgttgtgcgaacgcatggtaatgtgccgggagtagggatccttgccatccaagtgatccctcacatagtgggcagacaggcgaatgtccataacatcacttagctgatcatcgatggattctactaatttaggcggtttcttcagcaattcagaacagacatcgttgtaaactgtaggtcaaaaacggagttatagctaaaaatcccaggatctgctttttgtccttcttaccatttgccagatttaagtggatgtgcatcatcaggagatgctctaaggtgcagtgaatctgaaacaactttgagattctctccgtactctcgtgctcgtcgaaatggctgtttttgaacccagcatcatcgtcgctaccggcatattttgtactccgcgaattgacagcgccgtgatgatgcagcagcgtctttcgcattccagctccaggggtcggatcacccctgaccgcattgtgcagggattttcgaagctggggcagattctggggagaaccatcgtccatcgacgctccgctggagtcatccttcaacagattggtgctgcacatcttgctctcggtgtagataaactcgtagtccttgtacaacttctccaggccaatttccaaaagcagttccagaggctcggccccacttaaacaaggcatggccagacgacggttggccaactcggtgataatcttggcaagtcgatttttgttagtaggcgtgttctatggggtgaggaacatgaataatatgtggtggtttgcatgcattagcatacttactactatgttacaccgtgcagcacattggaagagcatactaaaggcaattttgagatccttgtaggagtggcagcacttgagcagctcccaaagcttatcggttagatccgtgagctggcgaaccttggccctctgcaccacatcttcgatgtcaaactccgcattgctgatgctataccgacctataaggccagagacatctgtcattgtctgattaatggactcgcgcagctcgtccatgtcaatgccactgccacaacgataggtgggatcccgagagacgccctgcttgacatccgtgtggtaggagacgatgtcctcgcgtatgtagaccagaatgcgcagctgattcataaagtcctgcgtcaaaggaccgcagtcgcccacgcgaaaagtgtgattcaaagccacatcgcagtcgttcaggttcaccaggagcggaagtgcagcactagaggtccaggagcagcgtagtctcatgtggggattgacctggtagctattttcaatgagagtttcatccggtgtcttgccatgatggcgcaccagggcttgcgaggttactaagtaagcagggcgcacaccctggtagctaagtattcccctggagaagtgcgtagggttgaactcgtactggagcaactgagtctgcccgagatcactgccgtcgcacaaaaaccacacggatccgagtccctcggccagctgcaggaactcggagcacacgatggacctagccttgtccacgggtattccgcgttgatattcctcctccagcttccagggattcgagtgatccagctgcaggtcgatggacaagtcggctatggcgtccaccaggcagtcgtccttcaaaggacttcccgtcagatccaagtccgcagagccctctttttttggggctgccctggtgggcgtggtccggagtctcgccactgctccattgcgatcctccttaaagaccagcacaatcttcttgccagcttccgcagcccccaccatgctcaccaagtaggtgggtggcgctccataggtgatcgtgtatgactcgccacaccgccgcattagctccgcgtaaacgtttgccaagttcgcagaagccgacatttttggagcaaattcgcaaaacagaaacaaaaagcggcagtatttgaaaagcgaagcgagaattggttaaacggtcacacagcacttcgctttttagtgcacctcaataattttagcagtaagccgcgtgaaggtcacactgcaacatcgatagccgatagacttaggccagcaacaatcgataattcttatccccgcacgtgttgaaattgttttcttttatttggatcagatttaatttagttaattcagacatgtcggactttgaaatggaggacagtgcctcgggctacgactcaggggataactcagatgccgaggtaagtgaggaaccgaagaaatgaacaccccgtataccaaaatctccactcttttcctgcagctgcaagcggcatttgagcgaggcgacttgaaaccaggcctaaatgtggaattcaatggccagagagacaaagtgaacgatgtggtaagtagctagctggatgcccgcttttgaatcgactaatccaatcctgcccacatagaccaaactgctggccaagacagaggctatcaagatgcaactgccttggctggaacgcctggacatgatcaacacactagctccactggcgccggaactcgctgtacagctggagaagcacgagcagaagcgggccaatctcttcaagggcaacgccaagctgccctacattcggcccgaggaggatcccgtcctgaatgacttcaagagggagatgctcttccaccgacaggcgcaaagtgctgttctggaggccattccccgccttcacgagctgggcataaagactcgtcgacccgatgactacttcgctgaaatggccaagtccgacgagcacatgcagaaggtgcgcgccaacctgatggccaaacagcaaggacaggcgaaatccgagcgcatcaagcagatccgcgagcagcgcaagatgggcaagatgctggccaaacagaccaaggtccaacgcgaagccgagaagaaggacatgctggacaaactgaagaagttccgcaagggcaagctgaaaaacctggacttcctg

SEQ ID NO: 28325 - DNA, 2206 bp, DROSOPHILA
tctcgcttcgcttttcaaatactgccgctttttgtttctgttttgcgaatttgctccaaaaatgtcggcttctgcgaacttggcaaacgtttacgcggagctaatgcggcggtgtggcgagtcatacacgatcacctatggagcgccacccacctacttggtgagcatggtgggggctgcggaagctggcaagaagattgtgctggtctttaaggaggatcgcaatggagcagtggcgagactccggaccacgcccaccagggcagccccaaaaaaagagggctctgcggacttggatctgacgggaagtcctttgaaggacgactgcctggtggacgccatagccgacttgtccatcgacctgcagctggatcactcgaatccctggaagctggaggaggaatatcaacgcggaatacccgtggacaaggctaggtccatcgtgtgctccgagttcctgcagctggccgagggactcggatccgtgtggtttttgtgcgacggcagtgatctcgggcagactcagttgctccagtacgagttcaaccctacgcacttctccaggggaatacttagctaccagggtgtgcgccctgcttacttagtaacctcgcaagccctggtgcgccatcatggcaagacaccggatgaaactctcattgaaaatagctaccaggtcaatccccacatgagactacgctgctcctggacctctagtgctgcacttccgctcctggtgaacctgaacgactgcgatgtggctttgaatcacacttttcgcgtgggcgactgcggtcctttgacgcaggactttatgaatcagctgcgcattctggtctacatacgcgaggacatcgtctcctaccacacggatgtcaagcagggcgtctctcgggatcccacctatcgttgtggcagtggcattgacatggacgagctgcgcgagtccattaatcagacaatgacagatgtctctggccttataggtcggtatagcatcagcaatgcggagtttgacatcgaagatgtggtgcagagggccaaggttcgccagctcacggatctaaccgataagctttgggagctgctcaagtgctgccactcctacaaggatctcaaaattgcctttagtatgctcttccaatgtgctgcacggtgtaacatagtaaacacgcctactaacaaaaatcgacttgccaagattatcaccgagttggccaaccgtcgtctggccatgccttgtttaagtggggccgagcctctggaactgcttttggaaattggcctggagaagttgtacaaggactacgagtttatctacaccgagagcaagatgtgcagcaccaatctgttgaaggatgactccagcggagcgtcgatggacgatggttctccccagaatctgccccagcttcgaaaatccctgcacaatgcggtcaggggtgatccgacccctggagctggaatgcgaaagacgctgctgcatcatcacggcgctgtcaattcgcggagtacaaaatatgccggtagcgacgatgatgctgggttcaaaaacagccatttcgacgagcacgagagtacggagagaatctcaaagttgtttcagattcactgcaccttagagcatctcctgatgatgcacatccacttaaatctggcaaatgtttacaacgatgtctgttctgaattgctgaagaaaccgcctaaattagtagaatccatcgatgatcagctaagtgatgttatggacattcgcctgtctgcccactatgtgagggatcacttggatggcaaggatccctactcccggcacattaccatgcgttcgcacaacaagttccgcgaactaaagaccaccttctatttcaattcggaaaacatttgtccgccgaacttggctcagtgtttccagtgtgatgacaaggagatggtcaaggagcgcacatatcattcctggatatatcacaagattcgctcacttaagtaaggcttgcttagtaatacaaaattgtacattctttaaatttaagcatggctaagaatggtttaaaatggcctttttcacattgtaataatttatttaatggatatctagcaagaatgtcccttagctgcataatgttttgagacacatttaaaatgttgaattttttcaaacactgcttgttgtattattaaattaaatgccttttggttataacttttc

SEQ ID NO: 28326 - protein, 641 aa, DROSOPHILA
MSASANLANVYAELMRRCGESYTITYGAPPTYLVSMVGAAEAGKKIVLVFKEDRNGAVARLRTTPTRAAPKKEGSADLDLTGSPLKDDCLVDAIADLSIDLQLDHSNPWKLEEEYQRGIPVDKARSIVCSEFLQLAEGLGSVWFLCDGSDLGQTQLLQYEFNPTHFSRGILSYQGVRPAYLVTSQALVRHHGKTPDETLIENSYQVNPHMRLRCSWTSSAALPLLVNLNDCDVALNHTFRVGDCGPLTQDFMNQLRILVYIREDIVSYHTDVKQGVSRDPTYRCGSGIDMDELRESINQTMTDVSGLIGRYSISNAEFDIEDVVQRAKVRQLTDLTDKLWELLKCCHSYKDLKIAFSMLFQCAARCNIVNTPTNKNRLAKIITELANRRLAMPCLSGAEPLELLLEIGLEKLYKDYEFIYTESKMCSTNLLKDDSSGASMDDGSPQNLPQLRKSLHNAVRGDPTPGAGMRKTLLHHHGAVNSRSTKYAGSDDDAGFKNSHFDEHESTERISKLFQIHCTLEHLLMMHIHLNLANVYNDVCSELLKKPPKLVESIDDQLSDVMDIRLSAHYVRDHLDGKDPYSRHITMRSHNKFRELKTTFYFNSENICPPNLAQCFQCDDKEMVKERTYHSWIYHKIRSLK

SEQ ID NO: 28327 - DNA, 7060 bp, DROSOPHILA
tttacgtgttctcataagatatagtttatattaatgtatattcatatttttacccattcattatctcttggcgcatttagaatttaagttttttttttgcattttccttttttattttacggtttggtattacttataaacaaatttcatattatagctatagtttattagctagcgttgtgtaactttcctccgcagggccattacttacattgttaaatcgaaacgttaatgcaattgttttgttgtgtatgtctaacgcaatttatatgctctctatcttagttacatgattttgttgcgtaaacaaagggctgccccaactcccagctcccacatctcgcatcccatttgcccaccgctcgggaaatgcgcgcttaagtgtttaaaaatcggaaagatatatatgaacacaggcagcaaagtgcagaccacgaaagtatatatatatatatatatatatatatatatatatatatatatatatatatatatatatatatatatatataaatatatatatatagataggggagtaggcggtacagaaggttacataatataacataggagggccttataagtcagagcgttgcttaaagctagagaactgcacgtggtaatcgcaatcattttaccatcaacttaggttacaatgtgggtgccttgctgtgtggcatatgcttttgtatggattggattcgctagagctagagcctatagtctagggttagggacactcgctgaacgcggtgtcctttgtttcttttacacaaatattacacttacaatcgagttattatgtgttcatgatcggttctgcatgttctgcctgatttggtctgggacttcaagttaacaaagaaaaagttgagccggccaagagcaaatagtcaaatgcaaaacagaattaaatgcctgcgtgtcctgctaaccctcctcccaaacccttccgcggacccctaatcaaccgccgatctattggccaatcttcaggcagggatctcaaatcaattgaacagtgcggtttgttgcagtttcttgcagccaggttgcaatcgtttatgttctaatagtataaattaaattaatcataggctagttaattaataataagcgcgctcaacgttctaacatctgggagcagaaaccaaaatgtcaaaaaacaaacgaaaatgtacacacaaaaaaagaaaagcgctgcgctttgctatgctctgctcttcttctctcactgctcttgtcctccgtttctggcagggacctggtcatcctgccgcttggatacattcaacgtgttttaccgcatatataaagcaagtattatatatattaggtatatataactatatatactacatgtatagtttgttgagttctgttgttgtttgtctactgtgtcgtgtccagcgtcgcaacctaaacgataaaatattatttggcgttccccacgccaccgccccctccgccgctcggcataccgcctacgcccactccaccgccgccaccaccgcctccctgccgcatccgtatcgaaggccgacgctccggcgtgtcgtacggcggtctcgacgagttggtggccgccatcgagtcgtccatgttgagtccgttgccgccgatcagttggctgccgttaccgcctccattgccgcccagcatcgccagcgtttggccgccctggagttgctgttgcgctgcactgcctcctccgccacccagcgccgcattgaccttgtgctgctgttgttgatgcgaggaggcggctgccgctgctgccaccgccgctgctgcggccaccgcatcatgacccgcctggccgtccgctccgtcctgcgcctgctgaatcgcctggggattgcgaggtccgccaaacttaagcaggttccagtcaaacacatagtcgtaagtgaagcccaaacggtggaacaagttgcggaagagtttgcgcaggtggcagtaatcgggacgctggtcgaaatgcatctggcgacagaagttcagatagttgacgaactcgctggggaagcccttgcacagcaccacaatcgaggtggacagcttcttctccgagatcctctcgtacttttgcctcttgttggctgcctttaagccctgccagggcaaggcgcccagattgaagtacattaggacgtagcccagggactccaggtcgtcacgacgcgattgctcaatgcccaaatgtgtgttgatggaggcatagcgggcagtgcccgtgaggttcttgttttcccgatagggaatgtgcttcagcgaccgggcatcgcggaatttcttggccaggccaaagtcaatgatgtacaccaggttgccctttttgccaagacccatgaggaagttatccggcttgatgtcgcgatggatgaagtcccgcgagtgtatgtaatcgatgcgggagatcatctggtccgccagcagcagaaccgtcttcaacgaaaagcggcgtgaacaaaagttgaagaggtcctccagcgagggtccgagtagctccatcaccatcacattgtagtcgccctcgctgccgcaccagattatgcggggtatgcctatgccaccctgcatcgtcttgtagaactttgactcgatgtgcagctgggggtgtttggtgcggatgcactccagcttgatggccacctcctcgccagtgttgatcgtggtgcccaggtagatgtcgccgaacgatcccgatcctatcttgcggcccaggcgatatttgttacccacgcgcagctccattttgttacgtctgtttctgtgggtttctgtgtggtagagttcggactcctcgggttcctcggatttgcgttgcctttctgcgggaccggagaattgaaatttagttttaattttacaacacattgcctcgaaaagaaggctgtacgcttttcttactcataatactacacgctacacgaattgatcgatcccagttcagattagctgcgcttaaaatattatacagatttaaatatctacgccaaggactaaaacttttactttgtaatcgcgaaaggatattgaaaggttgctacgatgcaggcaaattgttgaattcgatcagaatgtaaatattcgtagtattcttagttgctttgactaatcatagaaatagcagcggcgtcacaggtttttacgagtaaatatgaatcaagtgacttcgaaaattcggctattgaccactagcaacaatgtgtgatattattagaagagattatttgcaagcaacaacacaatatcgaacgccttgttagcgatagtgataaaatattcgtcggattttgtttgctacaacttttgattcttctgacactatattgtgacacgtgatgacaaccctgctgttttgtacagtttgctaaaagtctaattttgagagctaacggagcttcgtgagtattttccaacacttctccacttttctcacctggcactgtcctttcgtctgagctcctttcttcttcttgttccgatttgttcaaggcagtcgcttatggctttgtattcgaagggttctgtaataggaggtactaagttaatttttttttagatcctcaacatggttaatcgaaattcgacccgtctcgcgatcacttatatatagagagtaatcccctgtttttatcgcatctgcagcgtaagcccgaaaaacgtgcagaattcgcttttgtttgtggtgataaggattgtggcacacagacatgaaaacaacgcacggcaacaatcgatatcgaaaatagaaaaccgttagctaagaataaaacaagagagagagagcgggagagaagtaagcttggcttacgttgacaacacaaaaatagcagagaaaagcgtaccaaaagcaattcgaaatgcaaatgcacagtgggcaaaaatgataagaacccgaacctcgcacaaagtaaaagtttatctcgtatatttatatttaagagtgagtgcgtcattgcattcggctgtgtgtattgattacgaatggggaaaacaacagatttaataagtgatgagtaacgataatttatatgcacagagcaaaatagcactactttttgacattcgtcacattattgttttagtcattttaatattatattgtactattataaaataaagcaaatgtgccgtagtgcttttacatccttgaatagatataattctttttttcaagtgtattttttacgtgacgacaccagaaacatggaggtgaatcagcaatcaggaaaagacaacgaagagattaacaacaaatagataaaagagacgtgtgtttgtgtatgcgtggagtaaacaatcggcgacaaaagggagagaagtaaaataaaacgcagcgactgtgaaaatgccacttaaatgacactttcagtggtggaaagcacaaacaaatagcgaagataaagcgcatggaagtcagaaaacgaagcaacaagccgaaagttttcacttgccggtcaaatatcacaaaaatttagtttaattgttttcggcggctctcactcactaaccccttcccactcctctttcccacattctgtgcgctttcttttaccgctcacgcatttcgatcgctctctctctttctctctctctctctctcctccttttcccgactctttatcactcactctgcggttctaacctcaaaacctgcctgtgtttgttgttgttttcgccttggctttgatttatttaaccgaaatgtaccgttttttatttgtatctcccatgttctacacagaaagaaatcactgtataagcactgtaagtcaaattgaaatgtggtattaattttaggagctttaatttgtttactggaaggctagcagggaaaacgcggtctttcctattggtaactaaatatttcccagggtatccagcagttgtttcggaccagcgggtaaacacgaattgattacaattgcaaaacagctgcacgttgcgttggcggctgccgaaaagcttccgcaaaaaaacgcactggagaacaaagaagatacaaaaaacagttgttccagcaggcgccacaaaagtaaaaagcttaagtaaacagggaagagcaaatggaaaaaccaaaaaccagagcaaaaccaacggggaaacctcagaaggggaaggaaacttgcaattaattgtcaaacgctaatggcctccgaaaactaacggcactccacgaatgcactgcgaataacggggctgataaggagcagccgatagcgggtggagaagggaaacttgaacgcacagtggaacaaattccgcacttaccgtggcttgtttttcttatattccttgtttcctattccgctttgcccacttcctctgctggcgacgctgcttttccttcttctaattcgactgaaatcgaaatcgaattttttaattggattgattctgccacaataattttcattttctttgttttagagcccagacgttgtttttgttgtagttgccacagtcgcacacaaacacacgcacacagtcgcactttttggggccacacgcaagcgcattttatgcaataattttaataatactgcattgctgccatatttcagttatttttatcgtttatcttcgagtcggttatgctgttcttctctgattttatggccacattgattagcatcttgttgccaatcaactcgagaaaattaaacgaaaccaaacggaactcggactcttattaaaaaaaccaaacttatgcgagtcgtttgccctggcaatagattcgtgcacactagtcgtcccgcccgcactcgcacggtttctaccgcgagcacgttgctatccctcctgcttcagcattttcacaccaacacaaagacgagggcactcactcacacactcgcactctcaatgagcactgaaatgctgttgggaaattcgagttttcctgcgcgtggtaaccgccgctttttcgctcgcaaacgggtctgtcgatccgaaacgctactgaccacttacgttttgcatcaacgctgcgctttcgtttcaatttttctggctatttcacatagatttcgacgattttttacaaatttacgccatcttgatattcgcagtgtgaccgcgccgataatgaagaaaattaccatctggtatttactcctcagcgaatgtctagaagatatgtaattgtgaaaaactgtgattcatatactaagttaagatagtccaaagttggtttcgaagtaccacattaagaaaatagcgcaagagtattggaaaatcaaaagaaaaacgaaattatatccttgcagctagccataagttcaaagttcgagtaactggaaagctgtgaaatagccaagttgacaacgctgtttttgttatatgggcacactagttcttacatagacccagtgctgccagatggacgaaaaatatttttgagctgcgccacctagcggatgagttggcgaaagtggtatccaggtggcgcccgaaacaaaaggtggcgccttatttcagaaatgcaattgaaaatatctaaagttattgaaagtttttgaattatgcattcaaaggcccatctgcttaattttattttcaaagagaatacaataaacaatacaaaaaaaaaaaaatcattctgaaatgatatttatactaatatacaaatttgataactcaataatatgtaaataaaatttatgtcttaatttgcaatgttcttaagaaaagttgttaactctttttacaggcttgtgctccaaattctcgtgtaaatagaaattgaaaatggatttcattggcatgtcttgcagttataggtagcatgccaattttgatgttacacagatgtatcgaaatacctgaaacgtatacttttattgcagcaatacgaataaagcaaaacacgtgtgaattccattagtccgcccaaccgctttccccatttaccctcacatcgtgcattttccggctgtgtaacccaagaaacgatgacataaaaaaaggaagcagatccagttatgtatgcatatatgagaaaatgtgtttttttttttttgggagtatgtgccaaggtgtgtttcttttt

SEQ ID NO: 28328 - DNA, 2000 bp, DROSOPHILA
taaatttgtaaaaaatcgtcgaaatctatgtgaaatagccagaaaaattgaaacgaaagcgcagcgttgatgcaaaacaacccttcgaatacaaagccataagcgactgccttgaacaaatcggaacaagaagaagaaaggagctcagacgaaaggacagtgccagaaaggcaacgcaaatccgaggaacccgaggagtccgaactctaccacacagaaacccacagaaacagacgtaacaaaatggagctgcgcgtgggtaacaaatatcgcctgggccgcaagataggatcgggatcgttcggcgacatctacctgggcaccacgatcaacactggcgaggaggtggccatcaagctggagtgcatccgcaccaaacacccccagctgcacatcgagtcaaagttctacaagacgatgcagggtggcataggcataccccgcataatctggtgcggcagcgagggcgactacaatgtgatggtgatggagctactcggaccctcgctggaggacctcttcaacttttgttcacgccgcttttcgttgaagacggttctgctgctggcggaccagatgatctcccgcatcgattacatacactcgcgggacttcatccatcgcgacatcaagccggataacttcctcatgggtcttggcaaaaagggcaacctggtgtacatcattgactttggcctggccaagaaattccgcgatgcccggtcgctgaagcacattccctatcgggaaaacaagaacctcacgggcactgcccgctatgcctccatcaacacacatttgggcattgagcaatcgcgtcgtgacgacctggagtccctgggctacgtcctaatgtacttcaatctgggcgccttgccctggcagggcttaaaggcagccaacaagaggcaaaagtacgagaggatctcggagaagaagctgtccacctcgattgtggtgctgtgcaagggcttccccagcgagttcgtcaactatctgaacttctgtcgccagatgcatttcgaccagcgtcccgattactgccacctgcgcaaactcttccgcaacttgttccaccgtttgggcttcacttacgactatgtgtttgactggaacctgcttaagtttggcggacctcgcaatccccaggcgattcagcaggcgcaggacggagcggacggccaggcgggtcatgatgcggtggccgcagcagcggcggtggcagcagcggcagccgcctcctcgcatcaacaacagcagcacaaggtcaatgcggcgctgggtggcggaggaggcagtgcagcgcaacagcaactccagggcggccaaacgctggcgatgctgggcggcaatggaggcggtaacggcagccaactgatcggcggcaacggactcaacatggacgactcgatggcggccaccaactcgtcgagaccgccgtacgacacgccggagcgtcggccttcgatacggatgcggcagggaggcggtggtggcggcggtggagtgggcgtaggcggtatgccgagcggcggagggggcggtggcgtggggaacgccaaataatattttatcgtttaggttgcgacgctggacacgacacagtagacaaacaacaacagaactcaacaaactatacatgtagtatatatagttatatatacctaatatatataatacttgctttatatatgcggtaaaacacgttgaatgtatccaagcggcaggatgaccaggtccctgccagaaacggaggacaagagcagtgagagaagaagagcagagcatagcaaagcgcagcgcttttctttttttgtgtgtacattttcgtttgttttttgacattttggtttctgctcccagatgttagaacgttgagcgcgcttattattaattaactagcctatgattaatttaatttatactattagaacataaacgattgcaacctggctgcaagaaactgcaacaaaccgcactgttcaattgatttgagatcc

SEQ ID NO: 28329 - protein, 440 aa, DROSOPHILA; identical to SEQ ID NO: 2991

SEQ ID NO: 28330 - DNA, 6679 bp, DROSOPHILA
tttacgtgttctcataagatatagtttatattaatgtatattcatatttttacccattcattatctcttggcgcatttagaatttaagttttttttttgcattttccttttttattttacggtttggtattacttataaacaaatttcatattatagctatagtttattagctagcgttgtgtaactttcctccgcagggccattacttacattgttaaatcgaaacgttaatgcaattgttttgttgtgtatgtctaacgcaatttatatgctctctatcttagttacatgattttgttgcgtaaacaaagggctgccccaactcccagctcccacatctcgcatcccatttgcccaccgctcgggaaatgcgcgcttaagtgtttaaaaatcggaaagatatatatgaacacaggcagcaaagtgcagaccacgaaagtatatatatatatatatatatatatatatatatatatatatatatatatatatatatatatatatatatataaatatatatatatagataggggagtaggcggtacagaaggttacataatataacataggagggccttataagtcagagcgttgcttaaagctagagaactgcacgtggtaatcgcaatcattttaccatcaacttaggttacaatgtgggtgccttgctgtgtggcatatgcttttgtatggattggattcgctagagctagagcctatagtctagggttagggacactcgctgaacgcggtgtcctttgtttcttttacacaaatattacacttacaatcgagttattatgtgttcatgatcggttctgcatgttctgcctgatttggtctgggacttcaagttaacaaagaaaaagttgagccggccaagagcaaatagtcaaatgcaaaacagaattaaatgcctgcgtgtcctgctaaccctcctcccaaacccttccgcggacccctaatcaaccgccgatctattggccaatcttcaggcagggatctcaaatcaattgaacagtgcggtttgttgcagtttcttgcagccaggttgcaatcgtttatgttctaatagtataaattaaattaatcataggctagttaattaataataagcgcgctcaacgttctaacatctgggagcagaaaccaaaatgtcaaaaaacaaacgaaaatgtacacacaaaaaaagaaaagcgctgcgctttgctatgctctgctcttcttctctcactgctcttgtcctccgtttctggcagggacctggtcatcctgccgcttggatacattcaacgtgttttaccgcatatataaagcaagtattatatatattaggtatatataactatatatactacatgtatagtttgttgagttctgttgttgtttgtctactgtgtcgtgtccagcgtcgcaacctaaacgataaaatattatttggcgttccccacgccaccgccccctccgccgctcggcataccgcctacgcccactccaccgccgccaccaccgcctccctgccgcatccgtatcgaaggccgacgctccggcgtgtcgtacggcggtctcgacgagttggtggccgccatcgagtcgtccatgttgagtccgttgccgccgatcagttggctgccgttaccgcctccattgccgcccagcatcgccagcgtttggccgccctggagttgctgttgcgctgcactgcctcctccgccacccagcgccgcattgaccttgtgctgctgttgttgatgcgaggaggcggctgccgctgctgccaccgccgctgctgcggccaccgcatcatgacccgcctggccgtccgctccgtcctgcgcctgctgaatcgcctggggattgcgaggtccgccaaacttaagcaggttccagtcaaacacatagtcgtaagtgaagcccaaacggtggaacaagttgcggaagagtttgcgcaggtggcagtaatcgggacgctggtcgaaatgcatctggcgacagaagttcagatagttgacgaactcgctggggaagcccttgcacagcaccacaatcgaggtggacagcttcttctccgagatcctctcgtacttttgcctcttgttggctgcctttaagccctgccagggcaaggcgcccagattgaagtacattaggacgtagcccagggactccaggtcgtcacgacgcgattgctcaatgcccaaatgtgtgttgatggaggcatagcgggcagtgcccgtgaggttcttgttttcccgatagggaatgtgcttcagcgaccgggcatcgcggaatttcttggccaggccaaagtcaatgatgtacaccaggttgccctttttgccaagacccatgaggaagttatccggcttgatgtcgcgatggatgaagtcccgcgagtgtatgtaatcgatgcgggagatcatctggtccgccagcagcagaaccgtcttcaacgaaaagcggcgtgaacaaaagttgaagaggtcctccagcgagggtccgagtagctccatcaccatcacattgtagtcgccctcgctgccgcaccagattatgcggggtatgcctatgccaccctgcatcgtcttgtagaactttgactcgatgtgcagctgggggtgtttggtgcggatgcactccagcttgatggccacctcctcgccagtgttgatcgtggtgcccaggtagatgtcgccgaacgatcccgatcctatcttgcggcccaggcgatatttgttacccacgcgcagctccattttgttacgtctgtttctgtgggtttctgtgtggtagagttcggactcctcgggttcctcggatttgcgttgcctttctgcgggaccggagaattgaaatttagttttaattttacaacacattgcctcgaaaagaaggctgtacgcttttcttactcataatactacacgctacacgaattgatcgatcccagttcagattagctgcgcttaaaatattatacagatttaaatatctacgccaaggactaaaacttttactttgtaatcgcgaaaggatattgaaaggttgctacgatgcaggcaaattgttgaattcgatcagaatgtaaatattcgtagtattcttagttgctttgactaatcatagaaatagcagcggcgtcacaggtttttacgagtaaatatgaatcaagtgacttcgaaaattcggctattgaccactagcaacaatgtgtgatattattagaagagattatttgcaagcaacaacacaatatcgaacgccttgttagcgatagtgataaaatattcgtcggattttgtttgctacaacttttgattcttctgacactatattgtgacacgtgatgacaaccctgctgttttgtacagtttgctaaaagtctaattttgagagctaacggagcttcgtgagtattttccaacacttctccacttttctcacctggcactgtcctttcgtctgagctcctttcttcttcttgttccgatttgttcaaggcagtcgcttatggctttgtattcgaagggttctgtaataggaggtactaagttaatttttttttagatcctcaacatggttaatcgaaattcgacccgtctcgcgatcacttatatatagagagtaatcccctgtttttatcgcatctgcagcgtaagcccgaaaaacgtgcagaattcgcttttgtttgtggtgataaggattgtggcacacagacatgaaaacaacgcacggcaacaatcgatatcgaaaatagaaaaccgttagctaagaataaaacaagagagagagagcgggagagaagtaagcttggcttacgttgacaacacaaaaatagcagagaaaagcgtaccaaaagcaattcgaaatgcaaatgcacagtgggcaaaaatgataagaacccgaacctcgcacaaagtaaaagtttatctcgtatatttatatttaagagtgagtgcgtcattgcattcggctgtgtgtattgattacgaatggggaaaacaacagatttaataagtgatgagtaacgataatttatatgcacagagcaaaatagcactactttttgacattcgtcacattattgttttagtcattttaatattatattgtactattataaaataaagcaaatgtgccgtagtgcttttacatccttgaatagatataattctttttttcaagtgtattttttacgtgacgacaccagaaacatggaggtgaatcagcaatcaggaaaagacaacgaagagattaacaacaaatagataaaagagacgtgtgtttgtgtatgcgtggagtaaacaatcggcgacaaaagggagagaagtaaaataaaacgcagcgactgtgaaaatgccacttaaatgacactttcagtggtggaaagcacaaacaaatagcgaagataaagcgcatggaagtcagaaaacgaagcaacaagccgaaagttttcacttgccggtcaaatatcacaaaaatttagtttaattgttttcggcggctctcactcactaaccccttcccactcctctttcccacattctgtgcgctttcttttaccgctcacgcatttcgatcgctctctctctttctctctctctctctctcctccttttcccgactctttatcactcactctgcggttctaacctcaaaacctgcctgtgtttgttgttgttttcgccttggctttgatttatttaaccgaaatgtaccgttttttatttgtatctcccatgttctacacagaaagaaatcactgtataagcactgtaagtcaaattgaaatgtggtattaattttaggagctttaatttgtttactggaaggctagcagggaaaacgcggtctttcctattggtaactaaatatttcccagggtatccagcagttgtttcggaccagcgggtaaacacgaattgattacaattgcaaaacagctgcacgttgcgttggcggctgccgaaaagcttccgcaaaaaaacgcactggagaacaaagaagatacaaaaaacagttgttccagcaggcgccacaaaagtaaaaagcttaagtaaacagggaagagcaaatggaaaaaccaaaaaccagagcaaaaccaacggggaaacctcagaaggggaaggaaacttgcaattaattgtcaaacgctaatggcctccgaaaactaacggcactccacgaatgcactgcgaataacggggctgataaggagcagccgatagcgggtggagaagggaaacttgaacgcacagtggaacaaattccgcacttaccgtggcttgtttttcttatattccttgtttcctattccgctttgcccacttcctctgctggcgacgctgcttttccttcttctaattcgactgaaatcgaaatcgaattttttaattggattgattctgccacaataattttcattttctttgttttagagcccagacgttgtttttgttgtagttgccacagtcgcacacaaacacacgcacacagtcgcactttttggggccacacgcaagcgcattttatgcaataattttaataatactgcattgctgccatatttcagttatttttatcgtttatcttcgagtcggttatgctgttcttctctgattttatggccacattgattagcatcttgttgccaatcaactcgagaaaattaaacgaaaccaaacggaactcggactcttattaaaaaaaccaaacttatgcgagtcgtttgccctggcaatagattcgtgcacactagtcgtcccgcccgcactcgcacggtttctaccgcgagcacgttgctatccctcctgcttcagcattttcacaccaacacaaagacgagggcactcactcacacactcgcactctcaatgagcactgaaatgctgttgggaaattcgagttttcctgcgcgtggtaaccgccgctttttcgctcgcaaacgggtctgtcgatccgaaacgctactgaccacttacgttttgcatcaacgctgcgctttcgtttcaatttttctggctatttcacatagatttcgacgattttttacaaatttacgccatcttgatattcgcagtgtgaccgcgccgataatgaagaaaattaccatctggtatttactcctcagcgaatgtctagaagatatgtaattgtgaaaaactgtgattcatatactaagttaagatagtccaaagttggtttcgaagtaccacattaagaaaatagcgcaagagtattggaaaatcaaaagaaaaacgaaattatatccttgcagctagccataagttcaaagttcgagtaactggaaagctgtgaaatagccaagttgacaacgctgtttttgttatatgggcacactagttcttacatagacccagtgctgccagatggacgaaaaatatttttgagctgcgccacctagcggatgagttggcgaaagtggtatccaggtggcgcccgaaacaaaaggtggcgccttatttcagaaatgcaattgaaaatatctaaagttattgaaagtttttgaattatgcattcaaaggcccatctgcttaattttattttcaaagagaatacaataaacaatacaaaaaaaaaaaaatcattctgaaatgatatttatactaatatacaaatttgataactcaataatatgtaaataaaatttatgtctta

SEQ ID NO: 28331 - DNA, 2321 bp, DROSOPHILA
tttcgtttaattttctcgagttgattggcaacaagatgctaatcaatgtggccataaaatcagagaagaacagcataaccgactcgaagataaacgataaaaataactgaaatatggcagcaatgcagtattattaaaattattgcataaaatgcgcttgcgtgtggccccaaaaagtgcgactgtgtgcgtgtgtttgtgtgcgactgtggcaactacaacaaaaacaacgtctgggctctaaaacaaagaaaatgaaaattattgtggcagaatcaatccaattaaaaaattcgatttcgatttcagtcgaattagaagaaggaaaagcagcgtcgccagcagaggaagtgggcaaagcggaataggaaacaaggaatataagaaaaacaagccacgaacccttcgaatacaaagccataagcgactgccttgaacaaatcggaacaagaagaagaaaggagctcagacgaaaggacagtgccagaaaggcaacgcaaatccgaggaacccgaggagtccgaactctaccacacagaaacccacagaaacagacgtaacaaaatggagctgcgcgtgggtaacaaatatcgcctgggccgcaagataggatcgggatcgttcggcgacatctacctgggcaccacgatcaacactggcgaggaggtggccatcaagctggagtgcatccgcaccaaacacccccagctgcacatcgagtcaaagttctacaagacgatgcagggtggcataggcataccccgcataatctggtgcggcagcgagggcgactacaatgtgatggtgatggagctactcggaccctcgctggaggacctcttcaacttttgttcacgccgcttttcgttgaagacggttctgctgctggcggaccagatgatctcccgcatcgattacatacactcgcgggacttcatccatcgcgacatcaagccggataacttcctcatgggtcttggcaaaaagggcaacctggtgtacatcattgactttggcctggccaagaaattccgcgatgcccggtcgctgaagcacattccctatcgggaaaacaagaacctcacgggcactgcccgctatgcctccatcaacacacatttgggcattgagcaatcgcgtcgtgacgacctggagtccctgggctacgtcctaatgtacttcaatctgggcgccttgccctggcagggcttaaaggcagccaacaagaggcaaaagtacgagaggatctcggagaagaagctgtccacctcgattgtggtgctgtgcaagggcttccccagcgagttcgtcaactatctgaacttctgtcgccagatgcatttcgaccagcgtcccgattactgccacctgcgcaaactcttccgcaacttgttccaccgtttgggcttcacttacgactatgtgtttgactggaacctgcttaagtttggcggacctcgcaatccccaggcgattcagcaggcgcaggacggagcggacggccaggcgggtcatgatgcggtggccgcagcagcggcggtggcagcagcggcagccgcctcctcgcatcaacaacagcagcacaaggtcaatgcggcgctgggtggcggaggaggcagtgcagcgcaacagcaactccagggcggccaaacgctggcgatgctgggcggcaatggaggcggtaacggcagccaactgatcggcggcaacggactcaacatggacgactcgatggcggccaccaactcgtcgagaccgccgtacgacacgccggagcgtcggccttcgatacggatgcggcagggaggcggtggtggcggcggtggagtgggcgtaggcggtatgccgagcggcggagggggcggtggcgtggggaacgccaaataatattttatcgtttaggttgcgacgctggacacgacacagtagacaaacaacaacagaactcaacaaactatacatgtagtatatatagttatatatacctaatatatataatacttgctttatatatgcggtaaaacacgttgaatgtatccaagcggcaggatgaccaggtccctgccagaaacggaggacaagagcagtgagagaagaagagcagagcatagcaaagcgcagcgcttttctttttttgtgtgtacattttcgtttgttttttgacattttggtttctgctcccagatgttagaacgttgagcgcgcttattattaattaactagcctatgattaatttaatttatactattagaacataaacgattgcaacctggctgcaagaaactgcaacaaaccgcactgttcaattgatttgagatcc

SEQ ID NO: 28332 - protein, 440 aa, DROSOPHILA; identical to SEQ ID NO: 2991

SEQ ID NO: 28333 - DNA, 4946 bp, DROSOPHILA
gcagcagcacaaacaaattagaaggcccgcgctataaatgtattattatttttcccaacacgcctaaaacaataaacaccgtgtcacgttaacgaacaaactaattacaatacatattaatagtgtttttttggagtgatctcatcctgagtgggtaaattggttatgagttgatgctaatgactaatggcgcaatgtgcgttaattgaagctcatgagtaaccgtaaccccaaatcagggacaaagtccaagactatacagtggaacttgactttagaggcgaggaattaaaagaaaatcatttaattatattaacttattcctagaatcgcattaatatatttaatctgattacgatgtggaaaataaagcaagaataacaactaaaaacgctcgaagcgaaggtaaaacggcaataaatggaaagttcaacggctgaacggtaaacaacacacacatgcacaggcgaatacaaacgacagcgggtgggcgggggacaacaacacgtgttgccatctgtccgccaaagtaccgcaaatctttcaacgcagccgctaagtggaaaagtagaagacgccgggaagtcgggaaagcgggaaaagcggcgctgcactttcgttttcctttccactcccatttccaccttttttttttttgatgcgttcaatttgttgccaaacaaatcaaagcacaaacaaaaacgctccccgaaaaaccgaaaatttgattagcatcagctgttgaaacatattgatgtttttgtgcagctccccgctgcacttttgtttattgtgtcgcaattttccaattgaagtggaatttttattggaaggcaccaacagatgagcgcagcttttgctttgtttttgtttggtttggtttcttttcttttggagtgacaacctacctttgctggataatagccccgtctttgtctagcaagccgaggtctttttcgtcgtcttcttcatttcattgttcgccttcgtccgtgctgtgcgcgttcgctttttctacattttcattggcgcgtttaattgaagtttcggcgtattttcattcgaaaacgtttgcacaattcaccaaatatcacaaaatcacaaaacgtccacttttacgactcagaaacacacacgcagcaaaaaatggcccgttttccgcggtcgctttggatttggcccgcttttttgtggtcgcagctctcgccttgaaacaaattagaaagccattaaatttaaaacaaataaatacgcgtgttgttttaaacagtttttattacctgtgcgttggtgtttcgttttacccctgattccctaaacacgaccccaaaataaagcaacaatgtcggcggccgcttgcctactgtcttcttctacttcttcgttcgagaaggtaaccgggaaaaaaacaaaagatcgtagaatgggagaaatggtagaaatatgcgtggggagcgaaagttgccaactagaggtgacacttttgaacagcaaactatcggcattgaaaacttttcaaaaattgatttaaatatgagcctatgtcaaatcaacaagttcattaaaatgaagaatgttagtactgcgtaactagggataacatatctagttttcctactactcttagcattaagagtctccttctcatgttcccactacaatcgcaacctacctcctatttgcagacctgccgcatctgccacaaggccttcgcgaacgtctaccgcctgcagaggcacatgatcagccacgacgagagtgcgctgctgcggaagtttaagtgcaaggagtgcgacaaggccttcaagttcaagcaccacctcaaggagcacgtgaggatccattccggcgagaagcccttcggatgcgacaactgcggcaagcgattctcgcactcgggcagcttctcctcccacatgacctccaagaagtgcatcagcatgggcctcaagctgaacaacaatcgcgctctgctgaagcgactggagaagagcccgggatccgcatcctccgcatcccggcgatcgccctccgatcacggaaagggcaagctgccggagcagccgtcgctaccgggactaccacatccgatgagctacttcgccagcgatgcgcaggtgcaaggtggaagtgcggcacccgcgcccttcccgccattccatccgaactacatgaacgcggccctgctcgcctttccccacaactttatggcggctgcagctggcctggatcctcgggtgcatccctacagcatccagaggctgctgcaactttccgccgccggtcagcagcagagggaggaggagcgtgaggagcagcaaaagcagcagcagcatgatgaggaggagacccccgatgagcccaagctagtgatggatatcgaggagccagagaccaaggagatggcacccacgccagaggccaccgaagcagccactcccattaagcgggaggagagcagggaagcctctcccgatccagagagctaccgttcctcctcgcaagcaatcaaacaagagcaggagcccctgaacgtagcagaggaacgtcaaactcctgtggaagaacacgcccccgtggagcatgccgctgatctgcgctgcagtcgctgctccaagcagttcaatcatcccactgagctggtgcagcacgagaaggtgctttgtggcctgatcaaggaggagctggagcagcacttccaacagcaacaggccacgtcctttgccttggcctccgccagcgaagaggacgaggaagacgaggagatggatgtggaggaggagccccgccaggagagtggcgaacggaaagtccgcgtgcgaacggccatcaacgaggagcagcagcagcagttgaagcagcactactccctgaacgctcgacccagtagggatgagttccgaatgatagcagctcgtctgcagctggatccccgagtggttcaagtgtggttccagaacaaccgctccagggagcgcaaaatgcagagtttccagaacaatcaggcggcaggcgcagcaccgccaatgcccattgactcccaggcatctctaacccgggaggatcaaccgctggacttgtccgtgaagagagatcccctcacgccgaagagtgagagctcgcctccgtatatagctccaccgtcgggagaagccctcaatcccgaagcaatcaatctcagcaggaagttctccacatccgcatcgatgtcgccggcctcgatttcaccgtcatccgcggcagccctctactttggtgctgccccgccgccttcgcccccaaatagccaactggattccactcctcgcagtggccaggcctttccgggactacctccctacatgctgcccatgtcgctgcccatggaggcgctgtttaagatgcgcccgggcggagacttcgcttccaaccatgccttgatgaacagtattaagctgcccgattaccggggcaccagcttgagtcccggtggatcggagaagcgttcgtggcgggacgacgactcgcgcatctcacacgaggacgagttcggcgccggcgttctgatgccaccgaaaccgcgtaggggcaaggcggagacccatggacacgctggcgatcccgatctgccctatgtgtgcgatcagtgcgacaaggccttcgccaagcagagttcgctggcgcgacacaaatacgagcattccggtgagtagatcgaacttcaatgaccatagaatcctcactaactccgtgatttgtatcttctttaacaggtcaacgaccctaccagtgcatagagtgtccgaaggccttcaagcacaagcaccacctcacggagcacaagcgtctgcacagcggcgagaagccctttcagtgctccaagtgcctgaagcgcttctcgcactcgggcagctacagccagcacatgaaccaccggtattcctattgcaagccctacagggaataggtaagcgacacctcagtgccgcccacctgccaaccaggagccaatcccctagcgccgccagcgatggccagcaatcggggccgtcgtcgagttcaggttccggcggggaatcccccgtacacgccgcatcatcagcatccccaccatccgcatctggcggccatggctgccttccagcagcagcaccagcagcagcagcaacagcatcagcatcacaggctctcctggaatggaggtggagtgatgctgccgccgccacccagtcagcaggcgcatcgtccgacggctccacatccgcctccattgctttctggctccgggtttggccagccaccagcggcgcagttctttcaccaccatgcgggactgctgccgccgccgccgccaccgccacagaccacgcccacgtccgcgcccgccttcgacttcttcaatgcgaaaatgtttcagaattgagctgagaaagccgagcaagccgatcaagccaagccagccaagccagcacttacaggctgtacttaaaaaccgacgaacagaaaatctcaaaatgtgcaggaacacactgaaagaaacacccatccccgaaatgcactttagatcgactcagagtcagaaaggcaagagagaaatattttttatagccatatagacaggggaaatgtaagaagccgtagttgaaaacctttcgtttgagcgaatttattatttttacaatgttgcaaccactttgttcttagtattttattagtttagcttaacttagcttaccgcctaagttcgagcgcagggctgaatcattttgtttggccccctaaactcgcttaagatatcgttttatctatttttttacgcattaatgttttagcttttagtttgaggagctgaagagaccagtaccaagtgctgcggaatactcaaaactcgatcgttagtaaaaaaaagcccactccttgatggaatgaatgtatattttcaacgattgtgtattcttttaagctgt

SEQ ID NO: 28334 - DNA, 2586 bp, DROSOPHILA
cgcgttcgctttttctacattttcattggcgcgtttaattgaagtttcggcgtattttcattcgaaaacgtttgcacaattcaccaaatatcacaaaatcacaaaacgtccacttttacgactcagaaacacacacgcagcaaaaaatggcccgttttccgcggtcgctttggatttggcccgcttttttgtggtcgcagctctcgccttgaaacaaattagaaagccattaaatttaaaacaaataaatacgcgtgttgttttaaacagtttttattacctgtgcgttggtgtttcgttttacccctgattccctaaacacgaccccaaaataaagcaacaatgtcggcggccgcttgcctactgtcttcttctacttcttcgttcgagaagacctgccgcatctgccacaaggccttcgcgaacgtctaccgcctgcagaggcacatgatcagccacgacgagagtgcgctgctgcggaagtttaagtgcaaggagtgcgacaaggccttcaagttcaagcaccacctcaaggagcacgtgaggatccattccggcgagaagcccttcggatgcgacaactgcggcaagcgattctcgcactcgggcagcttctcctcccacatgacctccaagaagtgcatcagcatgggcctcaagctgaacaacaatcgcgctctgctgaagcgactggagaagagcccgggatccgcatcctccgcatcccggcgatcgccctccgatcacggaaagggcaagctgccggagcagccgtcgctaccgggactaccacatccgatgagctacttcgccagcgatgcgcaggtgcaaggtggaagtgcggcacccgcgcccttcccgccattccatccgaactacatgaacgcggccctgctcgcctttccccacaactttatggcggctgcagctggcctggatcctcgggtgcatccctacagcatccagaggctgctgcaactttccgccgccggtcagcagcagagggaggaggagcgtgaggagcagcaaaagcagcagcagcatgatgaggaggagacccccgatgagcccaagctagtgatggatatcgaggagccagagaccaaggagatggcacccacgccagaggccaccgaagcagccactcccattaagcgggaggagagcagggaagcctctcccgatccagagagctaccgttcctcctcgcaagcaatcaaacaagagcaggagcccctgaacgtagcagaggaacgtcaaactcctgtggaagaacacgcccccgtggagcatgccgctgatctgcgctgcagtcgctgctccaagcagttcaatcatcccactgagctggtgcagcacgagaaggtgctttgtggcctgatcaaggaggagctggagcagcacttccaacagcaacaggccacgtcctttgccttggcctccgccagcgaagaggacgaggaagacgaggagatggatgtggaggaggagccccgccaggagagtggcgaacggaaagtccgcgtgcgaacggccatcaacgaggagcagcagcagcagttgaagcagcactactccctgaacgctcgacccagtagggatgagttccgaatgatagcagctcgtctgcagctggatccccgagtggttcaagtgtggttccagaacaaccgctccagggagcgcaaaatgcagagtttccagaacaatcaggcggcaggcgcagcaccgccaatgcccattgactcccaggcatctctaacccgggaggatcaaccgctggacttgtccgtgaagagagatcccctcacgccgaagagtgagagctcgcctccgtatatagctccaccgtcgggagaagccctcaatcccgaagcaatcaatctcagcaggaagttctccacatccgcatcgatgtcgccggcctcgatttcaccgtcatccgcggcagccctctactttggtgctgccccgccgccttcgcccccaaatagccaactggattccactcctcgcagtggccaggcctttccgggactacctccctacatgctgcccatgtcgctgcccatggaggcgctgtttaagatgcgcccgggcggagacttcgcttccaaccatgccttgatgaacagtattaagctgcccgattaccggggcaccagcttgagtcccggtggatcggagaagcgttcgtggcgggacgacgactcgcgcatctcacacgaggacgagttcggcgccggcgttctgatgccaccgaaaccgcgtaggggcaaggcggagacccatggacacgctggcgatcccgatctgccctatgtgtgcgatcagtgcgacaaggccttcgccaagcagagttcgctggcgcgacacaaatacgagcattccggtcaacgaccctaccagtgcatagagtgtccgaaggccttcaagcacaagcaccacctcacggagcacaagcgtctgcacagcggcgagaagccctttcagtgctccaagtgcctgaagcgcttctcgcactcgggcagctacagccagcacatgaaccaccggtattcctattgcaagccctacagggaatag

SEQ ID NO: 28335 - protein, 747 aa, DROSOPHILA
MSAAACLLSSSTSSFEKTCRICHKAFANVYRLQRHMISHDESALLRKFKCKECDKAFKFKHHLKEHVRIHSGEKPFGCDNCGKRFSHSGSFSSHMTSKKCISMGLKLNNNRALLKRLEKSPGSASSASRRSPSDHGKGKLPEQPSLPGLPHPMSYFASDAQVQGGSAAPAPFPPFHPNYMNAALLAFPHNFMAAAAGLDPRVHPYSIQRLLQLSAAGQQQREEEREEQQKQQQHDEEETPDEPKLVMDIEEPETKEMAPTPEATEAATPIKREESREASPDPESYRSSSQAIKQEQEPLNVAEERQTPVEEHAPVEHAADLRCSRCSKQFNHPTELVQHEKVLCGLIKEELEQHFQQQQATSFALASASEEDEEDEEMDVEEEPRQESGERKVRVRTAINEEQQQQLKQHYSLNARPSRDEFRMIAARLQLDPRVVQVWFQNNRSRERKMQSFQNNQAAGAAPPMPIDSQASLTREDQPLDLSVKRDPLTPKSESSPPYIAPPSGEALNPEAINLSRKFSTSASMSPASISPSSAAALYFGAAPPPSPPNSQLDSTPRSGQAFPGLPPYMLPMSLPMEALFKMRPGGDFASNHALMNSIKLPDYRGTSLSPGGSEKRSWRDDDSRISHEDEFGAGVLMPPKPRRGKAETHGHAGDPDLPYVCDQCDKAFAKQSSLARHKYEHSGQRPYQCIECPKAFKHKHHLTEHKRLHSGEKPFQCSKCLKRFSHSGSYSQHMNHRYSYCKPYRE

SEQ ID NO: 28336 - DNA, 3027 bp, DROSOPHILA
agcttctttttgtagaaattttcaatcccacttcgacgagaacgccctcttcagtaatggaatcgcttctattaagttcaagcacgactataaggaaaagttccgaaacatatcccgcatcatgagctgcgtaggctgcgacaagtgcaaactgtgggggaagctgcagacgcagggattgggtactgctttaaagattctctactcagagaagctcaatctggccacggaaagcgggttgtgggacaagccgcacatcgaagcggatcccatcttcaggctgtcgcgaacagagattgtagctctatttaatgcgtttggcaggtgcgttttaaatgataaaatggcatttctaaaatacttacatctatacacttgcttgcagactatccaacagtatatacgagatggagaatttccggtgcgtgctgaggtaacccatccagactggactaaccgagcgacgagccggatctcattcgcctcacatgagcagctagttaattcatacgcacatcgctggggctgcgtcttggacttcctactgaatgcggtttccctcccatagttcgtaacatttttgaggccagaggctagtaaccccaggatagctgcttccctgtacatacaaactattaccctaggctacttgtactttagcgcaccgtatcaccctaaaaaaaaccaaatgacaaaaaaataacccatgcaggatgcaggtgtttattgtaagttagcatagtatttattgtatctggaggagtttgtgagcggaacttaatgagcaagtaaacgcattgtgcaataccaagaccttacgacacaaggcgctaaaataaacttctgtctgttttgaaacaccctctctaacgtctccatcgatacgggtcctagcaaccgagttgtttgccattccagctgtcggcttttgtgacattagcaaattgctatccagtcgatcgacacttgattgctcttgtgactatattttctgtgcgaaatggtgcttcttcaggtgaaacgcggagacgagcttatcttcctctatgagacaagcgttaaggagaagactgatactgtgcttcgcgagcttgtggctctgcacaatggtcaactgaagattcagcgtgtctgcatggagattgaggagctggccgaacatggcaccatggtgccgcctgaaatgattggcctcaacgaggaacagagggaagagctcaagcttaaggatgtctgggcggataagtgcatcccgtctggtggtttcactatcaacaaggatccgctccttcgccgtaacggacagcagccaactgaggcgatgcaaaaggtcctggcaggtgccatgaacgacgccaaggctatggtggatcgggtaatgtctcctcgaagtttatccctagaactgtttttgctaaatggttaccaacattccctctagcgcttagctaaatcctcaaagaccttgaccccaaagatcgttgaggaggcgttgaacctcctgcgtggtggtgtcactattgtatatcccatgcaattgccgccccacgactccatacgcatggagttcaccaataccgaggatctgactggcacccaggcctccaaggaggtcatcgaaccgtccaaggctcagttctggtttgcaggacaccagatgctgatggggaagctaatgagcgactatttgggtcacaacgacaaaaccaaggtaactgtccctttgatatcctaaatatatttccttcataacccatcctaatacttaaccaggtggtcgtgaagctaaatcaaattggtgaaggaccaccgggacgcgaagccgtgatctccgatcccttgcgtcgccagatgatggccgaggcctatcgccgccaggaggaactcaaggtaggacctttgctttgtagagagaattccaaatggtgttttatttgctataattcgagtataagtatatcagatataagtaggtactattgctccaccggttaaactagtttaagaaatcgctgaatattgcatagctacaaagtcgagagttaaggcgagtcggatgcctatatccttggtctgtcctggtgttttcttctttggtttcgttcagcagatgtcagttggtttatgctatatactctatataaatgcaactatgtctaaggcccatctgctgcaacggttagagtggggatcgggtatataaagctcggccatcccatcgttgttcatctgggagctatatgtccagtatttatatatgtgtgattatcatttttcaaccaagcaaagtaaagatccgtttcattaatctgttagttgttgtaaacgttgtataaatgcgctgattagaatttaaattcagttccccttgtacaatgcacaggtccttaaagtttggtgctgttttgtatccttctttcgatgcggttaatccgcttatagtatgactagtggtttctcgggaacatcgcacgtagttgctttctcctgatcctggtcaaagatttgatcactagttccggattctccgacgggactgattggtatcaacgacttggtgctaccgattagctcttggttgtccagcggaagtccgtggtccgatagttcttgaccatccaccgcttggtgctccaggtcaactacatcgtcgtctgtatcgtacatctgatcctgctgcttgtttgctagtcctgggccaaaggggccatcattatctgaatcatcgccggcacaaacacagcgcatcttggcatcgtcacccacctgaaaaaaagatagaagtattatatagtaagatcaattcatctgatttcttctcgaagtaagccacccaccttgacggatttggtgatgatacataacgatatagatgagatcacaaagagcacaatgggcacaatcagcgagactagaagctccctgtaaaccttgtccaaatcgtagcgtgcaaccacaaactccacattcgagtcctgtgagaggtaatagaaacgtcaggtaaactgataccagaactggaattca

SEQ ID NO: 28337 - DNA, 762 bp, DROSOPHILA
atggtgcttcttcaggtgaaacgcggagacgagcttatcttcctctatgagacaagcgttaaggagaagactgatactgtgcttcgcgagcttgtggctctgcacaatggtcaactgaagattcagcgtgtctgcatggagattgaggagctggccgaacatggcaccatggtgccgcctgaaatgattggcctcaacgaggaacagagggaagagctcaagcttaaggatgtctgggcggataagtgcatcccgtctggtggtttcactatcaacaaggatccgctccttcgccgtaacggacagcagccaactgaggcgatgcaaaaggtcctggcaggtgccatgaacgacgccaaggctatggtggatcggaccttgaccccaaagatcgttgaggaggcgttgaacctcctgcgtggtggtgtcactattgtatatcccatgcaattgccgccccacgactccatacgcatggagttcaccaataccgaggatctgactggcacccaggcctccaaggaggtcatcgaaccgtccaaggctcagttctggtttgcaggacaccagatgctgatggggaagctaatgagcgactatttgggtcacaacgacaaaaccaaggtggtcgtgaagctaaatcaaattggtgaaggaccaccgggacgcgaagccgtgatctccgatcccttgcgtcgccagatgatggccgaggcctatcgccgccaggaggaactcaagaaatcgctgaatattgcatag

SEQ ID NO: 28338 - protein, 253 aa, DROSOPHILA
MVLLQVKRGDELIFLYETSVKEKTDTVLRELVALHNGQLKIQRVCMEIEELAEHGTMVPPEMIGLNEEQREELKLKDVWADKCIPSGGFTINKDPLLRRNGQQPTEAMQKVLAGAMNDAKAMVDRTLTPKIVEEALNLLRGGVTIVYPMQLPPHDSIRMEFTNTEDLTGTQASKEVIEPSKAQFWFAGHQMLMGKLMSDYLGHNDKTKVVVKLNQIGEGPPGREAVISDPLRRQMMAEAYRRQEELKKSLNIA

SEQ ID NO: 28339 - DNA, 3347 bp, DROSOPHILA
cgtgggtgtatctctgtgtgtgtgcgtgtgtctgtgtgtgccgtgcatgtgggtgtgcgtgtgtgcgtttatcccctagataaaactaagttccataattgcaatcactttaaatataacctcgctcctaaatctcctgctatcctacaagtcctgcagcctctggcccaattccaaaaaaccaaaactcaaattaatcctgaacctaaaacagtcgaaaaatatactaatattgtcttcagatctgccgatcgtcgttatcttgagaatgtcaagcgcctcgcatgggataccggattttggtgtcggtctgtgagattcagtttgtcctggttagctcagtagtgtccttgcaaaagcctctgaggtgtggtccgtgtctctgtgtctttctgtgtgttgaggtgtcggagtgtcaaaagttcgatggaaggattacaaagaatttcaagttgctcgattgtgttcctgacttcagctggtgcccaactccaattattgcaaagcgaagactcccgtctggtgtgtcgggctgtcttcctggagcagaggaatgcctgaaaggtgtagtgtacgacatgttagtaaaatgaattaaagataataagggcaaattagggaactacctaagtttcagaatttcaataatatggattctttgaatataactatactaattgctcttctaaaaaggagttaggatgggtatagtcattatttttgttgcaatttttaagaacatgtcgtgggagtataacacctgactaatatcccttcggttctagtatctaatgatatcttataaggtggaataaatctagacttttctactttctttggaattcgaaacaaggaatattgaaaatagagacctagaacacctggtagacctctcacatgtgggctaccgcgaagactgcaagtcatcagagagaattcattatagagacacgatgtccagatattagagtagcgaaatatagagcttacgtgacggatctcatagggccataacctcatcgccgccgcccccgcccatgtcgccgttggtgggtgcgcccacgttgttcttattcaggaccgtctccgtgtccacacatcctttgaagcgcatcttggcatcgtcgcccacgtagacggtggtctggcacatgatcaggatggaacacgagaccacgaacagaaccgatggcactaccgaggcgaacacaaactggcgataggtgacctccaggtcgaatcgggccaccaccacgtccttctttccgggcgaatagaagcacgggaagcgggcccgggcattgtggtcgctgccatcgcgtccgaagtccttgaggaactccttgcactcgtccatcagagtgttcacacacccctccagattgatcatcagcttggactcgttggaaatggtgaggtccacatcgggtggtgctatttccggcactggagtggccaccgacacgtgcaggtggctcagatatgtgaagttggtcagatcgctgagcatattggtctccagcgtggagccattgatgcagtccaccgcatccacctggtccgaggtgtgcctgatgaagtaacacgatgtcattgctacattttcgcttgactcgttccacacctcctccagagtttcggcattgatggcattctggcactgcgacaggtagaccttgtccccgctgaggaccaccacgttcttgttccgtgttgggatgtccacgcaccttcggtcacagttatagggagtacggatcttccggcacgttcctcgactgcaggagtacagcccgctgatgtccatgcagttgatctttccccgcctgccggaacacttgactggtgcatcactgttgtggaagatgcactcgaaggcatccgtgatgttcagacactggccagcggtgcaattgaaggtgcccgtgagattcttgcactcatcattgatgcacctggccttgtccgcgcgatcctggtcgatcccgtagcacgttttattggccgagttggtgcagttctggaatatgagattgctgccattgctgcgcagattcacatagatctggatgcaggctccggaagtcttgctcagacaccactcgccacaactgccccactcgcagttgtccttgttcaccgcccgcgtggtggtgcacatcaccggcgtgggatcgatgccacttttgaaggccctggttgagggcatatatatggccaccgtgaggtagacgagagccaccgagctgagcaccagggtcatctggcagatgcatatggtgccgcatattcgcgtgtcctgcggtggaaccaccaggtcctcaacgggcacctttttcttgcccattttttaacgcgcgactaccctgtaattccaagtagcaagtgggtggtggtcactggtgcctcctctggttaatccctgtgctggttaatccctcgcgtgcaatccaatccaattagaagctcgtcatgtcggtttttagtctatcgatttagctgcaaagctgcgtgggcggttttgtatgttgtgcggttatataaccctgcgtaggttgagattttccaccgacttttcaatgggtccacaaaaaaagggaaaactggttactctgcaggctgcgcacgtttccagctggaggacacgttccttggataggccacaaacctatcgatttttggctagctgaccccacagaaattcactttaatcactgggcccatccatacgcgttggttgcatcacgtgccagttgattttcctgtcgatttggagatagaattcacacagttccaggaattccgcttctttttacaattatctggctattattgggatttataatttatgtacaattatttcttaattctcgagcagtgctgttctgtggtaattattttttcccttcgagttactggcagctggtggctcgtgacccaaggctttctgctccgcactggcgactgcattcggctcggctctgggtctccggatttcacagctctctagtagtgctccagctctccggcttctcctcactgaccgccgacaacatggcacacatcgtggcgggtctcgtggaattcgctactctccgcttttggcataaatctcggctctgcgcgcgcacttttattgcaaaatcaatagttccgcattcacatattgctgaaaagagcaggacaccccgctcccctgctgctcctcgaataccccgctctctcgtttccctgcccacaaccgccaagttggctccgctcgggccattcccattccctgccagcgtttccattgattaagtcggcctccacatggccaagagtgcaagtgcaccgagtgcgccatg

SEQ ID NO: 28340 - DNA, 1347 bp, DROSOPHILA
atgggcaagaaaaaggtgcccgttgaggacctggtggttccaccgcaggacacgcgaatatgcggcaccatatgcatctgccagatgaccctggtgctcagctcggtggctctcgtctacctcacggtggccatatatatgccctcaaccagggccttcaaaagtggcatcgatcccacgccggtgatgtgcaccaccacgcgggcggtgaacaaggacaactgcgagtggggcagttgtggcgagtggtgtctgagcaagacttccggagcctgcatccagatctatgtgaatctgcgcagcaatggcagcaatctcatattccagaactgcaccaactcggccaataaaacgtgctacgggatcgaccaggatcgcgcggacaaggccaggtgcatcaatgatgagtgcaagaatctcacgggcaccttcaattgcaccgctggccagtgtctgaacatcacggatgccttcgagtgcatcttccacaacagtgatgcaccagtcaagtgttccggcaggcggggaaagatcaactgcatggacatcagcgggctgtactcctgcagtcgaggaacgtgccggaagatccgtactccctataactgtgaccgaaggtgcgtggacatcccaacacggaacaagaacgtggtggtcctcagcggggacaaggtctacctgtcgcagtgccagaatgccatcaatgccgaaactctggaggaggtgtggaacgagtcaagcgaaaatgtagcaatgacatcgtgttacttcatcaggcacacctcggaccaggtggatgcggtggactgcatcaatggctccacgctggagaccaatatgctcagcgatctgaccaacttcacatatctgagccacctgcacgtgtcggtggccactccagtgccggaaatagcaccacccgatgtggacctcaccatttccaacgagtccaagctgatgatcaatctggaggggtgtgtgaacactctgatggacgagtgcaaggagttcctcaaggacttcggacgcgatggcagcgaccacaatgcccgggcccgcttcccgtgcttctattcgcccggaaagaaggacgtggtggtggcccgattcgacctggaggtcacctatcgccagtttgtgttcgcctcggtagtgccatcggttctgttcgtggtctcgtgttccatcctgatcatgtgccagaccaccgtctacgtgggcgacgatgccaagatgcgcttcaaaggatgtgtggacacggagacggtcctgaataagaacaacgtgggcgcacccaccaacggcgacatgggcgggggcggcggcgatgaggttatggccctatga

SEQ ID NO: 28341 - protein, 448 aa, DROSOPHILA
MGKKKVPVEDLVVPPQDTRICGTICICQMTLVLSSVALVYLTVAIYMPSTRAFKSGIDPTPVMCTTTRAVNKDNCEWGSCGEWCLSKTSGACIQIYVNLRSNGSNLIFQNCTNSANKTCYGIDQDRADKARCINDECKNLTGTFNCTAGQCLNITDAFECIFHNSDAPVKCSGRRGKINCMDISGLYSCSRGTCRKIRTPYNCDRRCVDIPTRNKNVVVLSGDKVYLSQCQNAINAETLEEVWNESSENVAMTSCYFIRHTSDQVDAVDCINGSTLETNMLSDLTNFTYLSHLHVSVATPVPEIAPPDVDLTISNESKLMINLEGCVNTLMDECKEFLKDFGRDGSDHNARARFPCFYSPGKKDVVVARFDLEVTYRQFVFASVVPSVLFVVSCSILIMCQTTVYVGDDAKMRFKGCVDTETVLNKNNVGAPTNGDMGGGGGDEVMAL

SEQ ID NO: 28342 - DNA, 4290 bp, DROSOPHILA
ttggaaatgtcctgttgtcctgttctcccgttttccaggtggtgagggccgccagtccggctttgttgcgggtcatcgccttgggagcattcttcatctactgcacggtaagtaatggatggcgttttccattagtcaatcgactgcatacacaataactaagcaattcagtttcaattgagtggcataatcaatagcaaacggctgctttcactgcaatccgaattaattaagagtcatcgaatgcatctgaaacattttccggggggcttacaaacggctctgtcgaacattattacaactcaatggagccataaatagccacgaaatttgcattcggtgaaaaatgagatagaaaagcgatcggcaaacagagcactcgaacccaaaacccaaaacccatcgatttctacacaatttaatttgattgatttatggctggcgaaggaaactaatggcatgccggccaaataaacaactttaagcggcagttcatcgaacatcctgcgagtggctgtcccagcatttatttatgtgtggcagatttatttggccgccatgagtatctcttgacgaccacacaaaggcgtgggaggatgcgtagcgggatgaggatgagaggatgggaataaacacgagtcctgggggtcaggacgagggtggctgtcagcacagtttgctttatgattttttaatatgtgcaaggcgtgaaggcagccgaaaatagaagccaatatagatcccccgaataacctattgtcctgatagcctgcttcatcaaagttggcctattgtttggtttgatggttcggggtcttcgtgaactgcggcttgaatgacaaacgctggcttgcacttgtgttttgaagaaccatccggaaaaataccgcctagtactttaccaaagaaaccaaagtgtcggggaaatagctacctttcttaggcattctggacagaaggcaattattaaagctaatgtatctatctgcagaacattgtgatgtatccgaatccgaatctctacacctgcacggcgcgcatttggctgcgtgagattggcttctccctgacctacggagctctgatgctgaagacctggcggtaaggatatgcagtgcattcttctggatatttgagtaaaattttgcgaccacaggatatcggtgattttccgagttcgatctgcgaaggctgtgaagatcacggatgccgccctgctcaagagactgggcatcatctgcggagccatcggaacctgcctgctggtcaggacactcgtctcaccgccggacgtggtggtgggacgcaccgccgacgacctgaaggcgttcctctgcaagaccgactggtgggactacacgttcacctcgagtaagttggcaatacgtaaaacaatttcgctcgaagtaagttgctttgccatcgcaaaggccacttaaagcgagctccgtctctttggaaatggaaaaaaacccactatgttctcataacgcatatgcatcagtaaaaaaaaggaaaagccagagaagaaatggaaaatgcaaaagttcagcagcatgaaatcgttgtctggccaaccggcacagtgggtcgaacacctgctgctcttgttagctgtgcacacacatcaatattttcctcttttttcagaacttcgaagctcacttgccctgctctcagaagtcaaatggttggctatcatgggttttagagtggacggtcttctaaacgaatttaaactaaactactttcttagtttattgatctgtgtgtgagtcacttagttatcgtgggatggtatatacccacatttgggtatatccttcctaagtttatttcagttgtaataaattgcatttgaaatggggttttccattaacaaaaaagcgaatctgttggagttgtagaaagtggaagttgactcacgactttcggccgcaataaggtccaccctaaagggcacaaaagtgatttttccgcttaaccaactgactgttgagttggagctgcggaggagcggatttgccgggtataactgtgtcccacttaccagggcgcttaattaaaaaagttcagaaaagacccaagtgcttctatctgcatctgtgcatccgtgcaactgtgtatctgtgcaactgtgcaacagtgcaacagtgcaacagtgctcttttttgtgccacacacgcacagcaattatcgctgcttctcgcgttcatcaggcactttggcagcagccagctgctaagtaacttcatttgacttggctacacgccaaagctcgtattacatttataattgcatgttgaacatttcccaaaaaaaaaagaaaaatgaaataaaaactactttggccgcggcaacatccatttccatagttgcggccaatagaaaacgaagcccggccagccttgaaatttcgcatctaatgatattcaactcagtcgcggccagctgtgctgcggttttggtaattaaacttcaaagtgaagctgggcagcctgcgaagtgcacaatggctctaatccctttgctccgattccatccctttccagtggaggtcctgttcctggcctggggcgttcgcctgtgcatcatggtgcggaaggcgccgtcggagttcaacgagagccgcttcatctcgatggccatctacaatgagttcctgctcacctgcttcctcaacgtctccatgtaagtagaccacatctacttgctcaacaacaagttcctcgaatcgtagagcttaactgatttcatcagaaatattcgtttggcttggaaagcatgcttcggatcctttagttgatttccccgtattagtggcaagcagctatgcctcctgacttttaagccaatccttactaattggtacatctatttgatttactccttcgcatacaggctcttcctgcagtcgcctgccaatccggatttgctgtacatcatctttttctgccacacccagcttacggtgaccctgctcctggccctcatcttcggcagcaaggtgagtagcggtgttctgccccaccattccggccattccgtgatactagatacccactttgacgcaggtgtacatcgtgctacgcagcggcaagtcgcaccaggagaacatcggcatgggcaccaaggcgtcgggggccaaattcaattttcgtccccaggtgcgcaccttcgccaatcccagctcggtgaccacctccacggtcccggtggcagcaggtgagtccagagtggagtgccagtgctcgtccggcgatagccggcaattgccccatttgttctaatggtcccagcgtatcgacgcttatgacaaacgacagtgtccacttgacaaacgatctgcggagggaaagcagtgtactcagtgtgcacagaaagaaaccgaagctagttcatgtgactactccttcgtcttccaagtttctcaattatttagaaagattgaagtctgcaaaaatatactttagttgcagttccttcatgggtaatttgctttcgaaactcagactttttcccgcagtgtagcgtcgataaagtcttctaccgagtcgactgttatttatggcgtattatttggcaaattaaaaaatgagcagtacaggcggcgtcaggggcacgcttatcggagctgtctagacatgagccatgccacatccagttgacagcaccaggatgctgatttatggctcgctcctgccgccgaagatccttcagagcaatcttagatgcggttaacccgcgattcatgcatgtatgtgtggcacacgcatgtatgtgtgtgtgtgtgtgtgttcccacggaaggaaagagctccgaagcacaaacttccgccaagttgccgccgacgccatatttgtttaccgcttcgctggctttgatgtataaacaactatgtgaactcccccgaggctcttggcctggcatcgacgaacacacccatgaggcaaccgagcggaccagcacagcacagccatcccaaacggatggcgggtggactcacgtttcgtgctgcctgggaatttccatttgcgtgggaaaactttaaggctgtgaagagtctgtaattgaactacgatattgcacggatgccacagcaacgcagccaataacttttgattagaaattaaattctaaccaggggctaacttcgccataagcagcgagttttcgattaattgatcaacgccaagagcatagcgaacatattggaaacttactgggaagtaggagcagttttaatgggaaaaagtttaaataaatactattattgcgtttgtttatcga

SEQ ID NO: 28343 - DNA, 795 bp, DROSOPHILA
atgtatccgaatccgaatctctacacctgcacggcgcgcatttggctgcgtgagattggcttctccctgacctacggagctctgatgctgaagacctggcggatatcggtgattttccgagttcgatctgcgaaggctgtgaagatcacggatgccgccctgctcaagagactgggcatcatctgcggagccatcggaacctgcctgctggtcaggacactcgtctcaccgccggacgtggtggtgggacgcaccgccgacgacctgaaggcgttcctctgcaagaccgactggtgggactacacgttcacctcgatggaggtcctgttcctggcctggggcgttcgcctgtgcatcatggtgcggaaggcgccgtcggagttcaacgagagccgcttcatctcgatggccatctacaatgagttcctgctcacctgcttcctcaacgtctccatgctcttcctgcagtcgcctgccaatccggatttgctgtacatcatctttttctgccacacccagcttacggtgaccctgctcctggccctcatcttcggcagcaagatacccactttgacgcaggtgtacatcgtgctacgcagcggcaagtcgcaccaggagaacatcggcatgggcaccaaggcgtcgggggccaaattcaattttcgtccccaggtgcgcaccttcgccaatcccagctcggtgaccacctccacggtcccggtggcagcaggtgagtccagagtggagtgccagtgctcgtccggcgatagccggcaattgccccatttgttctaa

SEQ ID NO: 28344 - protein, 264 aa, DROSOPHILA
MYPNPNLYTCTARIWLREIGFSLTYGALMLKTWRISVIFRVRSAKAVKITDAALLKRLGIICGAIGTCLLVRTLVSPPDVVVGRTADDLKAFLCKTDWWDYTFTSMEVLFLAWGVRLCIMVRKAPSEFNESRFISMAIYNEFLLTCFLNVSMLFLQSPANPDLLYIIFFCHTQLTVTLLLALIFGSKIPTLTQVYIVLRSGKSHQENIGMGTKASGAKFNFRPQVRTFANPSSVTTSTVPVAAGESRVECQCSSGDSRQLPHLF

SEQ ID NO: 28345 - DNA, 3241 bp, DROSOPHILA
gggtgggcttcgagaaattcgggttattgaaaagaaaacgaagacgaaagttcatgtgaaacttttctctttgaaccaacgaaatggaaatcacccttgccgaaaaagccccgcttctcaataattggggtccattatatttttcaatttaaagatgaacacaagcgcaggtttctatgatgaaacagtgaaggcattcgagcttatttccttccagttcacaagagatttattgtttttcaaacaaagatagtactagtaagcaaattaagcttcccagaacatctttcatcatctcagtgcgatgcaattcaatggccaaacagtcaagtgcacacatactgcagcattgaatacaaaatttacatttcattgaaaacccataagtaaattcctgcaactttaaaaaccttgaacaaggcaaatgccgcaagaaaactttctccggccgacgggcaaggaaagccggagaaaggacgtggctatggccacaactccggcgtgaaaatgcggacgagtaggcaggccgagattatgcgtaaaattctacatgtgttccggccggcagcctccagctgcctccgtccaggattctgcttaggtatgcgtgtaattgggtggctgcccattgccgagggcgacctttgcggagacatacacgcaggatatgggattccaactagctagctggcgaggggtcgacggcttagtgcacccttttcatggctttatgtctttgtaaaacgacaaggccaacccatgcccattcccacttccattcccattcccatatcccgtcaacgacagcaagaaaataattttctgctattttttccggtcttcgggagccggaaccaaacacgcgtgtcctttatccttttgtacgaaatcgcaccactcaccatctaccgagccttagacatatgcacaatcagagcgggaatttattgtttgttatcgctgagaactggccgttcaactggcaactggacacccgaccatgtccataaatatccatggctgtcggtgcattggtcttattgaatccagttataaatggcgccatttggcttaagtgccgcccagttgattgttaagctgacaaattaataacataaacttttaacgccttctgctgactacccgcttttccttcccgcaggggcacatctggcatcgacatcgacttgcgccgcgtggacatcgaccagtgtccgcagcggcacacgccgggcaccaagcgaccgctgaacatcttcgccggcacggacaagtgcaagcagcgcacgaccatggtgagagtcagtccggctacacagcgagaaaaaaagggggggtgctggaaaaagtgggggaaatgtgatgagcactgcctttagctattgagacaacattgcatactcttaagcacttcataagaaattttcaaacacaatttgaattttggtgcgtgggcttaatggagccaccgtagaagtgaaatctcatattgatgagacaacagaatattttgcgacataacatttaaagtacgccaaaagtatgcagtggctttttgcagaaatggttaataaattttgttacaatttgtgcgcagacaatttccaagaaaaatcggctcagacacttaagtgcctgagacataattttattgcgacaaaaacaaatgctaaccagattgggtcgacaaattcctcgctgtgtaggcacccgaattcaccgcagtcagcacttaattttcatttccattccttccgttttccatttgccgttcacagtgcgaggccatcatgggattgggcttccggcgcggctcctacaaatgtctgtgccgcaagggattctacttcccggacatcgtctcgcagcacaagttcttcaacggcagcctcctggaggaggagtacgagaagctgatgctggtaagtcgaatggcggatgacggatggcgaatgggaggtgccgcgtcaagtggccgccgtaagagctttattctcattaaatatgtattagggcaagaactccacgtacaacagcaacagcgagtacgagtgcctgccgtgcgccgagggctgtgactcctgcgaggactcctcgccctgcatcgccgccctcaactggccaatgcgcaccagcatcctggcgctggcctgcatcgtgattgggctcctgcctccggccgcttggttcacctttcgctaccagcaggttaaggtgagtcctggtgagggagtcctctaagtagaatatctgtggtctgccagcaggactaagcgaggctgtgcctgatttcatctaaacagatctcccagtttcaattagctattaagtttcttttaaagttgacgcaaactagaagactttaggacagccaacttataagagcttttagctgggttttatttattgcaatgaaaggaggagattcaatgtttctactttctactttatttcactttggccatctacaaacagaatctgatgttcagaaactaattggtcagcaaaataacaatttccctacgaggtgaaagcattctaatctgcttgctaaaactggaagctgaaaagctcttttgcgagtcacagttgtggaattgagcgccctggtgaatcttctgaaatctgcaccgaattgtaaagccatcataatggcattatccccggccagtcgcaaccggtccatccatattttattttcacttgcttactgtgttgttgcgtcgtccatcggtgcgcactgtcaaatagcgctgatcccgagcgggccaacctaagctgctgtcatcattcagccgctaagcggcttaccattgttagaatcgagttaattttgaacgtgcagcatggatggtcaggatcctggcagccagcagctagaagcccgatgacaggcggcaacaggccaacaggacagcggatatggtcgcgcataagcggaagtgcaaacattcgctcagccgggaacgcccacatcctgctgcttcctgccgccagaagtgggcgtaagtaggagtagcagtaggtcctagcccaggacctccccactcgagtgtcgttcggtcactcattagaccagagaacaagtccagctgccggcgtccaattgtctctggcactcgcagttttcccgtccacagcggatgtaatatatatgcactgaaaacaatctcgcagataagataagaaataacttttgataaacgatgtttattctacaatttattgagggagcattatg

SEQ ID NO: 28346 - DNA, 531 bp, DROSOPHILA
atgtccataaatatccatggctgtcggggcacatctggcatcgacatcgacttgcgccgcgtggacatcgaccagtgtccgcagcggcacacgccgggcaccaagcgaccgctgaacatcttcgccggcacggacaagtgcaagcagcgcacgaccatgtgcgaggccatcatgggattgggcttccggcgcggctcctacaaatgtctgtgccgcaagggattctacttcccggacatcgtctcgcagcacaagttcttcaacggcagcctcctggaggaggagtacgagaagctgatgctgggcaagaactccacgtacaacagcaacagcgagtacgagtgcctgccgtgcgccgagggctgtgactcctgcgaggactcctcgccctgcatcgccgccctcaactggccaatgcgcaccagcatcctggcgctggcctgcatcgtgattgggctcctgcctccggccgcttggttcacctttcgctaccagcaggttaaggtgagtcctggtgagggagtcctctaa

SEQ ID NO: 28347 - protein, 176 aa, DROSOPHILA
MSINIHGCRGTSGIDIDLRRVDIDQCPQRHTPGTKRPLNIFAGTDKCKQRTTMCEAIMGLGFRRGSYKCLCRKGFYFPDIVSQHKFFNGSLLEEEYEKLMLGKNSTYNSNSEYECLPCAEGCDSCEDSSPCIAALNWPMRTSILALACIVIGLLPPAAWFTFRYQQVKVSPGEGVL

SEQ ID NO: 28348 - DNA, 3229 bp, DROSOPHILA
tcacagccagagctcaaaatgcaggcgactccaggacgagcctgttgcacactcatgtggccaccatcggatgggcattatgagggccctagtacagcgactaacggccaataaattctcggccaggcagtaattaagaaatttaaatggcagcaactaaaccaccggccgaaacctaaacaaactgacccccatgaccgacgccctgccccttaaagtgatgacttttcgagggttaagagcataaaagcccgtcgagtatttaagcacactcacacaatgcaaactactatagaacatatagtgtcgtgcattcgtttaggtgcgagccacacactttgtgccccacacgccatctaaatttggggcagccgagtgcctgcggttgcagagtgtgaaatattttgctgccccacacttagtgtgtgtgtgtgtgtgccatatcttgtctggggtctggatctttcacatactcatacatttcctaaataaacagcaggtccctgtgcctttccagcgaatttccacatttcctggctgcgaaatgcggtggttccccttttcgattcatttgcctgcattatgttgcggcacttgatttaatggcgccagtcatgacccttttaatcgccgaccaaccaagcaggaaagatttgaattccattctcgtcggttaatcaccaagtaaacactagacaaccaggagttgagtgctctgaccaacgttataattgacggataagccggaagtaaattgctcggcctcagcaaagaacgaaattaacattttctaggaaaaacaatccaaaagcgaactcattttgcatttcaaaatcaatgttgagagtataaagagtgacagctttcaacacaatcaattagttatacagtacacatcagctaagtgaaaaaaaaaatcatatttattggcaatcaaacaagttatgtgtagactagcaatgtaagtgaattttttagaggtttgcaccttacttaatttgtcataatgaaatttaacttttattgaattggtacattccttggatatgtgtattcactgttgtcagcaaataatttgctttctcagctcgtagcttgattttgggtaatgactaatggcaaatcatactgttatgtatctctgctcaatcgaatttattctgtccagtgtgcagatgctttattaattcctcctgtatctttgatgcttcagaggtcgtacgaatctcgaaattatatctctagtggttgtgcgcattggcctgagcacctgcaactgcagctgcagctgctggctgctgaccgccaccgcccagggcgcccaaggattgctgcagggagcgcaggatgccaatgggaatctaaggaggggaagtacaatattattaatcggaagtatccttcttaactgaaaactaaactataaagtactcaaccgctttaattgttatgttatgttattagtgagaaaccgatttacacttaaacatgtttttcaactaaagatagcttgtttgtgctgtagaatttacctggaaaccaggataatctgcgtatatccttagcgatttcatacttacatcgagggccaggcccacgggtcattgggcctggggcgccaggaagcgattgttcacggcctggggtcgctggacggacttgtacttgtgggcctggaccaccttggcctcgctccttgcctgcgaatggaggaaggttcgtgagttgggggaattacttgcaaaggacgagaacaggacgtgcagcaggtgaacgacggggggtgataaatgaaaattgtattaaaatatatttcacggaaatcataatgctgggtagcagctgacccctcccccaccatcgcccgcagtgtccgcaaatgttttcaaataaaattactgccacaaagcgaaagtttcggcatccagctccaccaaaaagccaaacaatttgtttgcatttaagagtgccaaagtgtgtgtgcctgtgtgtgcctgtgtgcgcctgtgtgtgtgtgtgggtatctgtgtgccggtgtatctgtatccgtatctgtttctgtatctgtgtatctatgtccgcaccgcatttggttttacctcaacggtcgactgcggctcgtccttttgggcttcctcatccggaatttgctgctcctcctgctgctgctgctgctgctgctgctgcatcacgtatacgacacgttgtcgctgtcgttgtcgctttgcatgtgcacgttgtcgcttgacaattatcagcgaggtgggcgtggccgatgggcggggcagcaggtggttatccaccgcatcggcatctgcggccgctttaacatgactttcaatgatttcgctgcggtccggctaaaacatcaatggcgggtggattttgttggattggattgattgcttgctgttgatgttgttgcctggccaacacgagggcgttgatcaatatttaaccgcaggccctagttaaacactagtcggcgatttatagccaggaatttcgcaattgaaaagcaccgttcagcagcgaattccctctttaactttactaacatcgcttacgagcgaaatgatgcagctttcattttgtgggaaatccttcaagcacttttcgactcgaaaggatgcgcaaaaaaactttcgagcaaaacacttttaatactttcggaagtgctgtaaacatcttgctgaaatttcgataaccatacctctaaacttgttgttaaacttatctcgggaatgaaacgaaagctggtcggttcaccataacttttcctgatatattgatgggtggattggaaaacaagaggaactctaacaaaatgctagcttgcagtcacattataattagtatataatacacctttactaccctaatgacgaacaattattttacaaaaggtatacttatttagctcgactaggcacggtcctaattttatgaaagatacgttttggaatgttatggatatgagtaataaagattggaactctttataatccgtaatatatatataaaagttaaaagaaatattcgctaagccttttgactacttacatcttggttgatcagcgagtacttcttgggcggcttgaccttttggatgtggctggtgacgacggggccggtggtgggtgagacgggcacaggatcagcaggatatgccggctggactgagtgctgcgaggaggagatcacagtgcgaccaggactgtgcgcctcg

SEQ ID NO: 28349 - DNA, 611 bp, DROSOPHILA
tgcaaagcgacaacgacagcgacaacgtgtcgtatacgtgatgcagcagcagcagcagcagcagcagcaggaggagcagcaaattccggatgaggaagcccaaaaggacgagccgcagtcgaccgttgaggcaaggagcgaggccaaggtggtccaggcccacaagtacaagtccgtccagcgaccccaggccgtgaacaatcgcttcctggcgccccaggcccaatgacccgtgggcctggccctcgatattcccattggcatcctgcgctccctgcagcaatccttgggcgccctgggcggtggcggtcagcagccagcagctgcagctgcagttgcaggtgctcaggccaatgcgcacaaccactagagatataatttcgagattcgtacgacctctgaagcatcaaagatacaggaggaattaataaagcatctgcacactggacagaataaattcgattgagcagagatacataacagtatgatttgccattagtcattacccaaaatcaagctacgagctgagaaagcaaattatttgctgacaacagtgaatacacatatccaaggaatgtaccaattcaataaaagttaaatttcattatgac

SEQ ID NO: 28350 - protein, 50 aa, DROSOPHILA
MTRGPGPRYSHWHPALPAAILGRPGRWRSAASSCSCSCRCSGQCAQPLEI

SEQ ID NO: 28351 - DNA, 3030 bp, DROSOPHILA
acttacaatctcaattgtatgcgtgatttcggcaacgaagttaaaggttccttcatcacatactgacggccacccaaaatactgactttcatgtactcataatcgtcgacatcgtcggtgttaatcttaaatctgtcgtaaataaagttacgttataaatccatttaatgcatgaattcatctattgaatgcatatgatatatattgcttacatcctccgatctgtggatcctaattccttgtagatctgctcgaagtgtgtggatttaaagtcccagcttcgcgtggtaaagaactgcaaaacttccaaacccacagcgattttggtttgaacccgaatcatgctagacaaacagaaaagttttgggttagattcttattcggaactgacaaattcttttgaaggttttacaagcgacgttgtccaaagatcaggagtaggaagtcgataaggtaggctggcagccacataaacagaatggtacagatggtgtgatagaatttgctggacgtcatgttgccgtcgggataccagagtcccacttcgaaggggtacttaatgcccaagtcgcgacccacatccattatccatttccatgtgcgctttttggcatcgtccacggtcaagttgtagactgggatctgaagaggtctgtggcagaagttatacatcacattgacatgggaggcgtctgaaaaatttacctcttctccgcaagactgttatgatatggtaataagataagaccgttaatggcgatgtccacaggtatcacttcagattttagctccccgttgcagatcatggatcggataactcctttgccggcgccaatgagaactcccgtaggtccgttcatattgtccacccaacctggcagaggctcagcgacagctggagttactggagaacaaagtacaggtcagtatggttagacacaaagtctgctttagtgactggattgggaaagagaaacacggcgcagttggcgaaatgtgtatattcaacaacctacaatcatatttatttggattcaaaacctcgaatatgcgtaactacaactaagctaattgactaaataaatgcctgtgaccaccaaaccaatgcaagtccacggagaactagaatcagaatatagccagcacccccgtccacttaaggaggtagtagaagaacagtcccacaatcaccgtcttgcacacaacgtctacgactcgttggctggaagtgaagatgagtgagtcatagtgggtagcacaggctcttgcctaacttacatcttcatgtgcacgcgcgcagtgggcagatcctcctccttttccttgaggataaactttcgagcgcccttagcacactcaatcatgtactcctcctcggtgttctccgtgttcatgttcatgttaaaactgaatgggaaattgatattgatatgttaatatgttaatattcaatagcagcacttacatcgccttgtcttcctcgttgagtttgttccagagggaggcgtagttatcagatcggaagcaccaggcattgagggtaaagaactggaggacgcccagacctgtggatatcttctcctgaactctcaacatgctagggagggaaatggcacataagctccatttggggtaattcagtgcggggcaacttacaatcgcttctgacctaatatcagcatcaggaagtccaggaagtaagcgggcaaccaatgaaacagagccacgttgaagttgtggtataattggttggtggtaacgcaagggtccgggtaccatagacccgcgttaaatgggaactgcttgttgatgcgtttgctcatctccacaacggtgcccatggtcatcttcctgtggtccgcattggttatattataaacgggcacattggtaggccgcttggcctgcttgttgaactcgtagggaatgacgatcagcccgttgatagcgtagtcgacgggaatcacctcggccttgttctgctgattcaccagaacggaccggatcacgcccttgccgcatccgatcatcaggccagtcggtccattcaggttgtccacccatccgggcaacggctcgtaggcagccggcgacactacagggcggaaggaatagatgtttactaaggggcgtctaatctgctcagcgcatgaaaccagtctacataccacgagcccaagatgatggtcaccgaagccgtattatgtgtgaatgtgtgaatgtgtgtatggtgtgggtgtgagtagtgtagttgtatgttttggactatgtttccgccaaggataagtgtgggaatttagaaggtgggaaatagtgcgcaatcggggaaaatatcattgtgctctttgtcctgtgtgatctgtgtgttcagtgggttttgtgggttttgtttgtgttgttcgtgttgtcgcgcgagtcctctggatcaacacttgtacacttgaagcacagacacataaactcagtacacagattttttattttgacacgaaacatagataatcacttaaagtagaaatgaaaaccagattcgaggccactcgtcgagtggctcgaagttatgcccccaagcgaacctaagcagagattgattgagaaaagcgcgcgaatggattgaaaatgtcccgggtggccgtcgtattagacgccgagcaggcgtgccaccaaaccgtaggtccagtagcacagggtgcccacgatgagcgtcttgcaagcgcggtccaggatgtacattctataaatgaaaggaagaccgtgcttagagatcgggctcagggcttatgtccctgtgggcgagtctcgcttacagcttcagctggagccgggcgcggggcaaactatcgggcgactccttcatcaggtactgtcgccctccctggacacacgactcaatgtacatggggacagtctcctcgggatccatgtccatattgaagcttttgggtgggatcaggtgtttcggattaagtgaactcagtacccttctacgctcgcgctacgtactttttcctgtccgactcgtttagcatg

SEQ ID NO: 28352 - DNA, 857 bp, DROSOPHILA
atgatcggatgcggcaagggcgtgatccggtccgttctggtgaatcagcagaacaaggccgaggtgattcccgtcgactacgctatcaacgggctgatcgtcattccctacgagttcaacaagcaggccaagcggcctaccaatgtgcccgtttataatataaccaatgcggaccacaggaagatgaccatgggcaccgttgtggagatgagcaaacgcatcaacaagcagttcccatttaacgcgggtctatggtacccggacccttgcgttaccaccaaccaattataccacaacttcaacgtggctctgtttcattggttgcccgcttacttcctggacttcctgatgctgatattaggtcagaagcgattcatgttgagagttcaggagaagatatccacaggtctgggcgtcctccagttctttaccctcaatgcctggtgcttccgatctgataactacgcctccctctggaacaaactcaacgaggaagacaaggcgatttttaacatgaacatgaacacggagaacaccgaggaggagtacatgattgagtgtgctaagggcgctcgaaagtttatcctcaaggaaaaggaggaggatctgcccactgcgcgcgtgcacatgaagatccaacgagtcgtagacgttgtgtgcaagacggtgattgtgggactgttcttctactacctccttaagtggacgggggtgctggctatattctgattctagttctccgtggacttgcattggtttggtggtcacaggcatttatttagtcaattagcttagttgtagttacgcatattcgaggttttgaatccaaataaatatgattgtaggttgttgaatat

SEQ ID NO: 28353 - protein, 242 aa, DROSOPHILA
MIGCGKGVIRSVLVNQQNKAEVIPVDYAINGLIVIPYEFNKQAKRPTNVPVYNITNADHRKMTMGTVVEMSKRINKQFPFNAGLWYPDPCVTTNQLYHNFNVALFHWLPAYFLDFLMLILGQKRFMLRVQEKISTGLGVLQFFTLNAWCFRSDNYASLWNKLNEEDKAIFNMNMNTENTEEEYMIECAKGARKFILKEKEEDLPTARVHMKIQRVVDVVCKTVIVGLFFYYLLKWTGVLAIF

SEQ ID NO: 28354 - DNA, 2811 bp, DROSOPHILA
ggtagttagcggcagcacatccgtatccccaggagacaacaccgacgaggactccgccggagaccagtgggccaccggagtcaccctggcacgagtccttgccgctggcaaaagcgcagatcatggagctcttgatctggtttccgtagccataggaggaagaagagcaccggctctggctgacgatgttcacgttgacataacgcagctgggagggaatggagctggagccagaggactcggtaccccatccggagacggaggcagcagcaccgttggcggggttggagctagccagaccgatggccttgatggtggagctgaagctcagagaggagctcagatggagcacagcgatgtcgttgaccatggtgttggcgttgtaaccctcgtggttcttgaaagaggaaaccttggcgacgacgccaccagagctccagtagctggatccggcgcggatctgcagggaggaggcggacacggactgcaggcagtgagcggcggtcacgatcaccctggcggagtagatggatccaccgcaggagtggctgccactgcgctgcagggagatctgccaggggaagctgctgatggtggtagcagtaccgccgacaatgcggccatccaactggggcaggagaccctcggggatggtgcctcccagggcgcaggctacagccgacaacaggatcaggaacttcagcatggtgcgattgaatggatactcttcgaaccgaaaagtgtgcttatatcgggggtcactatctcgggaggcgtttaatcaatggacaagtgagattcctcgtggttaaagtggataacgatgtggagtggtcgtcgtgtgataagctgattatttctaaatatcaccgcctatatcgatggtgaaaatgacgcaacaattatgctgaagttgcagctgtcaatcaagtggagatatttgccgcggggactgtataaaaggggttttgatccgcgaatcagcatacaaacgattaaaatgttgaaattcgcggtacttctttccgttttggcctgcgccttggctggcaccattcccgatggcctgctgccccagttggatggtcgtatcgtcggtggttatgagaccagcatcgacgcccatccctaccaggtgtccttgcagcgctatggatcacacttctgcggtggatccatctactcccacgacattgtgatcaccgccgctcactgcctgcagtcgattgaggccaaggacctgaagattcgtgtgggcagcacctactggcgctccggcggcagtgtccactccgttcgctccttccgcaaccacgagggctacaactcccgcaccatggtcaacgacattgctattattcgcatcgagtccgatctgagcttccgctccagcattcgcgagatccgtattgccgactccaaccctcgtgagggcgccaccgccgtggtttccggctggggcaccaccgagtccggtggcagcaccattcccgatcatctgctggccgttgatctggagatcatcgatgtgtcgcgttgccgctcggatgagttcggatacggaaagaagatcaaggacaccatgctctgcgcctacgccccacacaaggatgcctgccagggtgactccggtggcccacttgtctccggagaccgccttgtcggtgttgtgtcctggggctatggatgcggtgatgtgaggtatcccggtgtctacgccgacgttgcccacttccacgagtggatcgagaggaccgccgaggaggtgtaaagccagacaaacacttgaaataaatcgcaattgaatcagcattgatatctgtttctctatttgggcccaattgcgtcgcaggtgtaaagccctcgaaattgcggctagataagaattgtagccgtgggctgtatataaggttggacgggcggcatgtaagccagcacttgttagcaacgcccatcatgttgaagatcgtgatcctcttgtccgccgtggtctgcgccctgggaggcaccgtccctgagggactcctgcctcagttggatggccgcattgtcggcggctctgctaccaccatcagcagcttcccctggcagatctccctgcagcgcagtggcagccactcctgcggtggatccatctactctgccaacatcattgtgaccgccgctcactgtctgcagtccgtgtccgcttcagtcctgcaggtccgtgctggatccacctactggagctctggtggcgtcgtcgccaaggtttcctctttcaagaaccacgagggatacaacgctaacaccatggtcaacgacatcgctgtcatccgtctgagctcttccctgagcttcagctcaagcatcaaggctattagcctggccacttacaacccagctaacggagcctctgccgccgtttccggttggggtacccagtcgtccggatccagctccatcccctcccagctgcagtacgtgaacgtgaacatcgttagccagagccagtgtgcttcctccacctacggatacggtagccagatccgcaacaccatgatctgcgctgctgccagcggcaaggatgcctgccagggtgactccggtggcccactggtctccggcggagtcctcgtcggtgttgtctcctggggatacggatgcgcttactccaactaccccggtgtctatgccgatgttgctgtcctccgctcttgggtggtgagcactgctaacagcatctaagctggtacccagtaggttggatgtgtcaaaagccttcaataaatatttgccattcagaacatagatgatttgtatttggtctgg

SEQ ID NO: 28355 - DNA, 811 bp, DROSOPHILA
atgttgaaattcgcggtacttctttccgttttggcctgcgccttggctggcaccattcccgatggcctgctgccccagttggatggtcgtatcgtcggtggttatgagaccagcatcgacgcccatccctaccaggtgtccttgcagcgctatggatcacacttctgcggtggatccatctactcccacgacattgtgatcaccgccgctcactgcctgcagtcgattgaggccaaggacctgaagattcgtgtgggcagcacctactggcgctccggcggcagtgtccactccgttcgctccttccgcaaccacgagggctacaactcccgcaccatggtcaacgacattgctattattcgcatcgagtccgatctgagcttccgctccagcattcgcgagatccgtattgccgactccaaccctcgtgagggcgccaccgccgtggtttccggctggggcaccaccgagtccggtggcagcaccattcccgatcatctgctggccgttgatctggagatcatcgatgtgtcgcgttgccgctcggatgagttcggatacggaaagaagatcaaggacaccatgctctgcgcctacgccccacacaaggatgcctgccagggtgactccggtggcccacttgtctccggagaccgccttgtcggtgttgtgtcctggggctatggatgcggtgatgtgaggtatcccggtgtctacgccgacgttgcccacttccacgagtggatcgagaggaccgccgaggaggtgtaaagccagacaaacacttgaaataaatcgcaattgaatcagc

SEQ ID NO: 28356 - protein, 256 aa, DROSOPHILA
MLKFAVLLSVLACALAGTIPDGLLPQLDGRIVGGYETSIDAHPYQVSLQRYGSHFCGGSIYSHDIVITAAHCLQSIEAKDLKIRVGSTYWRSGGSVHSVRSFRNHEGYNSRTMVNDIAIIRIESDLSFRSSIREIRIADSNPREGATAVVSGWGTTESGGSTIPDHLLAVDLEIIDVSRCRSDEFGYGKKIKDTMLCAYAPHKDACQGDSGGPLVSGDRLVGVVSWGYGCGDVRYPGVYADVAHFHEWIERTAEEV

SEQ ID NO: 28357 - DNA, 3498 bp, DROSOPHILA
taaaaaggaacagggtgcgatgtaagcaaacagcgaatggagactgccgtcttaggaatttcataaaaatcgttgccggcttatcgcagctttaagatgtctgcatgtcctgtgggtgctcgcatgtcctttgccctgcgacactttcaaagtgacattatgcaactttgagcggcagcaacaagaactgcagctatctaaattacccagagacatccggcatggcaggacgctcttatgcgctcaaggatcaacaggaagcgccccaaggagtctgactagctccatgtgttgcattttgccattcttgtttttttttttttgttacgtttctttgctctgcaaatttcatttggcactgcgacaggaaggaaatgtgagcatgcaaagccgaaaaaggtcctgcatagacacagataagttgcgcagcagtcgccaattaatccgtcgtcctggacgtgttaacattccgccacttcagaacccagagatcaagtggccgccagtcaaggccagaagtcacgtattccagagaacggcgcagccaaagcttcaaaccaaaatcgcttgctacctttattttcaacatttttaggcgatattgcatgatttcaatgctttcaaatacgctaaaaaatccaaataacaattcacagtaaacccgctcctaggagcgtgaacgtaataaatagtcaataaattcccaactgaaaccgatttcaaaggaatgcattttcccgatgagttattgatacaaatataacgaaaataagccgactcactaatcatcagcgaaaaattgcgatctccagtctgctcgaaattctgattagacaaactaatcgccagtcagaccccatgcgtgaaaaaaccccttagggagcgataagatcccatgcagtcacaaatcactccccgcgaagccctcagataaagtagcagtggggtccactatataaggagcggctctgagtagttccgaccagagtgaaactgaacttccatctggaattaccatgtttctggccaagagcatagtgtgcctcgccctcctggcggtggctaacgcccaattcgacaccaactacgcctccggtcgtagtggaatggtccacctcttcgagtggaagtgggacgacatcgctgccgagtgtgagaacttcctgggacccaatggctacgccggtgttcaggtctcccctgtgaacgagaacgccgtcaaggacagccgcccctggtgggaacgttaccaacccatctcctacaagctggagacccgctccggaaacgaggagcagttcgccagcatggtcaagcgctgcaacgccgtcggagtgcgcacctacgtggacgtggtcttcaaccacatggccgccgacggaggcacctacggcactggcggcagcaccgccagccccagcagcaagagctatcccggagtgccctactcctcgctggacttcaacccgacctgcgccatcagcaactacaacgacgccaacgaggtgcgcaactgcgagctggtcggtctgcgcgaccttaaccagggcaactcctacgtgcaggacaaggtggtcgagttcctggaccatctgattgatctcggcgtggccggattccgcgtggacgccgccaagcacatgtggcccgccgacctggccgtcatctatggccgcctcaagaacctgaacaccgaccacggcttcgcctcgggatccaaggcgtacatcgtccaggaggtcatcgacatgggcggcgaggccatcagcaagtccgagtacaccggactgggcgccatcaccgagttccgccactccgactccatcggcaaggtcttccgcggcaaggaccagctgcagtacctgaccaactggggcaccgcctggggcttcgctgcctccgaccgctccctggtattcgtcgacaaccacgacaatcagcgcggacatggagcaggaggcgccgacgttctgacctacaaggtgcccaagcagtacaagatggcctccgccttcatgctggcgcaccccttcggcactccccgcgtgatgtcctccttctccttcacggacaccgatcagggcccgcccaccaccgacggccacaacatcgcctcgcccatcttcaatagcgacaactcctgcagcggcggctgggtgtgtgagcaccgctggcgccagatctacaacatggtggccttccgaaacaccgtgggcttggacgagatccagaactggtgggacaacggcagcaaccagatctccttcagccgaggcagccgcggcttcgtggccttcaacaacgacaactacgacctgaacagctccctgcagacgggcctgcccgccggcacctactgcgacgtcatttccggctccaagagcggctcctcctgcacgggcaagaccgtcaccgtcggatccgacggacgggcttccatctacattggcagctccgaggacgatggagtgctggccattcacgtcaacgccaagttgtaaacaactggggaacatggcgaacagccaggcaataaattgagattattaattgtacgaaatatatatgatgagattataaacacacaacacttttattcgcaagggatgataagaatctaatatatatattatctgggcttcaaagcattgattttatttattgagtcaagagggaaatttattttcttgttattctctgtccaggtctaaagtccccagcggtgaggctatctattgatttggacattccaatcgaatacaaaacagagatacagaaatttgcgaaaaaatttgataacaatcgtggattttacgaattagacaaattgatatgtgcttgctaattgatgtggcatgaaataagaaatttataaggacgttttcaagtgcttctattttaaacattcatggatttttttttaaagcagacagctttcaacaggtttgatgagaatttgaatattgattgttgactttagctatacataaatcacacctcatccacccattggtggtatccttcgaaggacttgggaactggtaggctgatggtgcaaattcaagctgtcctggatgttcctcgtgtgcccggagaagcggccaaggcacgcaccaagttaagtccgcatccccaaacccggcggcagattctattaaaattgcctgtcattgccgaagccggcatcgttattgtccgctccctggatcctgaatggctggggctcccccatcctggctgcctcctttggtgcccttcctcttttcgaaatggcagacatgcttagtcccttggacgacgatggcgacgttgtcttctggcaggaccattattcttcaacaacgtgcattatattatcctttggctgaaggcatttgtatgctggtcccgggcgcgaattgcatttgggatcgggtggtttcggctgcttcctggctgatttctgggcggattcggttggctcagcgcactggcctttcagctgtcgtcagtgcaatt

SEQ ID NO: 28358 - DNA, 1498 bp, DROSOPHILA
tccatctggaattaccatgtttctggccaagagcatagtgtgcctcgccctcctggcggtggctaacgcccaattcgacaccaactacgcctccggtcgtagtggaatggtccacctcttcgagtggaagtgggacgacatcgctgccgagtgtgagaacttcctgggacccaatggctacgccggtgttcaggtctcccctgtgaacgagaacgccgtcaaggacagccgcccctggtgggaacgttaccaacccatctcctacaagctggagacccgctccggaaacgaggagcagttcgccagcatggtcaagcgctgcaacgccgtcggagtgcgcacctacgtggacgtggtcttcaaccacatggccgccgacggaggcacctacggcactggcggcagcaccgccagccccagcagcaagagctatcccggagtgccctactcctcgctggacttcaacccgacctgcgccatcagcaactacaacgacgccaacgaggtgcgcaactgcgagctggtcggtctgcgcgaccttaaccagggcaactcctacgtgcaggacaaggtggtcgagttcctggaccatctgattgatctcggcgtggccggattccgcgtggacgccgccaagcacatgtggcccgccgacctggccgtcatctatggccgcctcaagaacctgaacaccgaccacggcttcgcctcgggatccaaggcgtacatcgtccaggaggtcatcgacatgggcggcgaggccatcagcaagtccgagtacaccggactgggcgccatcaccgagttccgccactccgactccatcggcaaggtcttccgcggcaaggaccagctgcagtacctgaccaactggggcaccgcctggggcttcgctgcctccgaccgctccctggtattcgtcgacaaccacgacaatcagcgcggacatggagcaggaggcgccgacgttctgacctacaaggtgcccaagcagtacaagatggcctccgccttcatgctggcgcaccccttcggcactccccgcgtgatgtcctccttctccttcacggacaccgatcagggcccgcccaccaccgacggccacaacatcgcctcgcccatcttcaatagcgacaactcctgcagcggcggctgggtgtgtgagcaccgctggcgccagatctacaacatggtggccttccgaaacaccgtgggcttggacgagatccagaactggtgggacaacggcagcaaccagatctccttcagccgaggcagccgcggcttcgtggccttcaacaacgacaactacgacctgaacagctccctgcagacgggcctgcccgccggcacctactgcgacgtcatttccggctccaagagcggctcctcctgcacgggcaagaccgtcaccgtcggatccgacggacgggcttccatctacattggcagctccgaggacgatggagtgctggccattcacgtcaacgccaagttg

SEQ ID NO: 28359 - protein, 494 aa, DROSOPHILA
MFLAKSIVCLALLAVANAQFDTNYASGRSGMVHLFEWKWDDIAAECENFLGPNGYAGVQVSPVNENAVKDSRPWWERYQPISYKLETRSGNEEQFASMVKRCNAVGVRTYVDVVFNHMAADGGTYGTGGSTASPSSKSYPGVPYSSLDFNPTCAISNYNDANEVRNCELVGLRDLNQGNSYVQDKVVEFLDHLIDLGVAGFRVDAAKHMWPADLAVIYGRLKNLNTDHGFASGSKAYIVQEVIDMGGEAISKSEYTGLGAITEFRHSDSIGKVFRGKDQLQYLTNWGTAWGFAASDRSLVFVDNHDNQRGHGAGGADVLTYKVPKQYKMASAFMLAHPFGTPRVMSSFSFTDTDQGPPTTDGHNIASPIFNSDNSCSGGWVCEHRWRQIYNMVAFRNTVGLDEIQNWWDNGSNQISFSRGSRGFVAFNNDNYDLNSSLQTGLPAGTYCDVISGSKSGSSCTGKTVTVGSDGRASIYIGSSEDDGVLAIHVNAKL

SEQ ID NO: 28360 - DNA, 3864 bp, DROSOPHILA
gcttaaagcaagccacgcttggccagttttggttttttggctattacacacacacaaacccgtcgacttcgaaattcaaaatttgaccccggatttgttgactcggtgatccttgaatcgatgatcatgttggaggccaccttgcagccaggatatgtgcctgttggcatcacgccaatcttgaattggacagagccaccaagtctaaagcattgtgatgaggattatctgatcgttgtcctggcattgtccatttgcacccagttcttgctgatgacctatgtggcgttcgcagtcatgcaaccgtgttccatgcgaaggaagcagttgattgagggccagcaaaagaccttcgctagcttcatattccgaaggttactcttccagttggacgaggcattacacccttcggtcgaggcggtgcggttagactcctgcttgaggtctggtgaaaagctaatccaggccattcaactgttccggcgagatgctctcaaggtccttcagccagtgcagaatatctcatccgcaatggccagcgatttgtactatgtgctggacgaggaggagaatgaactgaatttcaacggctatgggagctctcattcaaaggtcgaggtcaccgaggaactattggtgtatttgctatatccggaacgaaaagtgtccgagaagaagtaatacgtcggactggggaacctaaatttttggctctacttgatttgtatttttgtataaactttccgcaaagtccactaaattcacgaattaagtaactgccttattgaatttttttttttagataattttcaatattttaataaagaaaaatcgcctttgtccatgctggttttagtttaaaagtactccaaataaaaatactttttattcaaaatcttcaagctggtgagccccacaaatttgacacactaaaatttagtttcagttcactaggccttcgcatgttcttccagggcattgatccataggtgaagtggacctattccccatcctctttttcgtcgcagttgcagcatttcttcttcttgttgttggtcggatcagatccacgtttcggaggacacgcgtcgaagttgctcgcaggatccgccagtgggaactgcttgttgaatagaggctttggtccgtggccagccggaaaatctgcggtcacatgagccttgcaaggagcacactcggcaccggcaccgccggcaaccaccttgctgtgaccactctgtatacccttgctggcaagtccacgaagtggctgacccgctgctccacagtcgtcctgcggccccatggttcgattggtgcctattgtgtgtgtggaaaggaacgcttcggatgttacgcctccacaatgtgggcatataaaggtgggcggtggtacgactgaagcggctttgctctgactcttacccaccgcgcaactgcagtcatcggcaggtgcaggctgcggcgctttcggctgaggagcacattcagcaatgggtgtctgctgtggcttagctacgggactgcaaccgcagtcctcctgcggaggatccgggcaatcatccctgccacaaccgtcgcatcccgactccctttgtgtcgacttgctctcctgttgatagacgtcatcggggtccttgtcggccactggaaaatagtgtccagttagcgcgtcgtgccgatcctcatcctcgtcatcctggcaaccacagcctccattggacttcttcagatgctgggagcagtcctgcgtctgtggcttggtggtgcaatcctgttgctgttcagattggagctgttgctgctgcttctggtgctcctgttgctgctgctgctgctgccgcatgcagtcctgttgcttttgctgctgttccatctgctgcttctgtcgttcgtccatggagcactcgcagtcgggatcggtatccggcacttgcccttgaacgacaattagtcctgctcctttttgctgtggtccggcacatggacaatctggatcgtgctgtatccccagggttctctgctgttgcgattgagattgctgtagtgcttctttcctagagcatgtacactggtcgtcgtctactttttgctgagatctctgcatttgagcttgtgatggctgctgtttctgggagccacatattccacaactcggcgcatcctttggctgcaattgctgctgggacttttccttcgctcctgcgccacatgagcatttgccatcctctcctggttgcgtctgtgaccgttgtttctgggcaatgccacaggagcaaggaggctgtgtctgctgagcaaagtcactggttgcagttgtggcagtcgacttgtgcgacatggttcccaccattgaaggagcgccacacacgcaccgtttcttggatggctgatcgtccatattggcctcactggtaatgatgtactggtattttccggatggctttgatcctctggatttgctcttgctaccctcgtcgctggtgtcggccaagcttatctccttgccgtacttgcagaggaactcgatgatcacgccgtttgtccagccgtaacccagcggagtgttttccggcgaagatcctccagatgtgccgaagtcctcgcagtagtactgcaataaggtggtaaaaatcggattaggaaactgccatgttagtgcgaaatattttttaaggccgattgctcactgtcaggtattagaacctgtatgacaatctagtaaaagttaaacttgatgcttgaggtcctaaaatacattatataaaacacaacgataccacggatatatagtaacttaccttctcgaacatgaagctctcgtacttgtatgccgcatagttggacttcacccatcgatgagcccatcgcttggacatggcttttgccggcggagtgcccagattctcaagtccctcgatgatcaggaacatcatgggcggaaagacattggggtgatcccaattctggcccgactccttattcatcgtgtacggcacaccaccatactgcgcatccaaatcattggtcttgatgtactgcatcacccccttggacaccttctcagtgtccaccaagggaaaggccctggcccacagcggagcaaagttggtgcagcagaagtagttgcgtggcttgttgttcaccagatcgtagtccagccaaatgccggcttgggcattccataaattatcccgaatggcttttactaggacacatgctctatcctgatactcatcggcttttttcgtattgcccgctttgcgattaaactcggccaggatcttgccactccggaaaacaatgcagttcagctccacgggcacaatggcagatgttttgatgtctcgaaaggatcctttattggaaccatcgacggtcacataccagcgtgaactgaagttcgtacccgattcagcagccgacttgagttcggtgtacataacctctcggaccacaggactcttgatgcttgccacacactccagatcttctcgataggcctcgggcctgggtcctgccgaggaatcccgatactgatacatggtcctgcccttcacctgcaccgagtgcttgctgatgaaggtatcgtattcggtttccagcagcggcaaagcttcaatggcgtactgctcgtccttggtcacctccacatatgcctttaccatcatgatcaagagtggagggttcgatcgacccgagcagtatatccggccacaaccaggcacaaagccgtactgctgaaccaattccaaatagttatcgatcatgccccgggctgtttgatgcatgccacattgcagcaagccgcgaatgatccaaaacgattcccagtagcggtactcgcggcaatttgaggaggga

SEQ ID NO: 28361 - DNA, 1677 bp, DROSOPHILA
gctcatcgatgggtgaagtccaactatgcggcatacaagtacgagagcttcatgttcgagaagtactactgcgaggacttcggcacatctggaggatcttcgccggaaaacactccgctgggttacggctggacaaacggcgtgatcatcgagttcctctgcaagtacggcaaggagataagcttggccgacaccagcgacgagggtagcaagagcaaatccagaggatcaaagccatccggaaaataccagtacatcattaccagtgaggccaatatggacgatcagccatccaagaaacggtgcgtgtgtggcgctccttcaatggtgggaaccatgtcgcacaagtcgactgccacaactgcaaccagtgactttgctcagcagacacagcctccttgctcctgtggcattgcccagaaacaacggtcacagacgcaaccaggagaggatggcaaatgctcatgtggcgcaggagcgaaggaaaagtcccagcagcaattgcagccaaaggatgcgccgagttgtggaatatgtggctcccagaaacagcagccatcacaagctcaaatgcagagatctcagcaaaaagtagacgacgaccagtgtacatgctctaggaaagaagcactacagcaatctcaatcgcaacagcagagaaccctggggatacagcacgatccagattgtccatgtgccggaccacagcaaaaaggagcaggactaattgtcgttcaagggcaagtgccggataccgatcccgactgcgagtgctccatggacgaacgacagaagcagcagatggaacagcagcaaaagcaacaggactgcatgcggcagcagcagcagcagcaacaggagcaccagaagcagcagcaacagctccaatctgaacagcaacaggattgcaccaccaagccacagacgcaggactgctcccagcatctgaagaagtccaatggaggctgtggttgccaggatgacgaggatgaggatcggcacgacgcgctaactggacactattttccagtggccgacaaggaccccgatgacgtctatcaacaggagagcaagtcgacacaaagggagtcgggatgcgacggttgtggcagggatgattgcccggatcctccgcaggaggactgcggttgcagtcccgtagctaagccacagcagacacccattgctgaatgtgctcctcagccgaaagcgccgcagcctgcacctgccgatgactgcagttgcgcggtgggtaagagtcagagcaaagccgcttcagtcgtaccaccgcccacctttatatgcccacattgtggaggcgtaacatccgaagcgttcctttccacacacacaataggcaccaatcgaaccatggggccgcaggacgactgtggagcagcgggtcagccacttcgtggacttgccagcaagggtatacagagtggtcacagcaaggtggttgccggcggtgccggtgccgagtgtgctccttgcaaggctcatgtgaccgcagattttccggctggccacggaccaaagcctctattcaacaagcagttcccactggcggatcctgcgagcaacttcgacgcgtgtcctccgaaacgtggatctgatccgaccaacaacaagaagaagaaatgctgcaactgcgacgaaaaagaggatggggaatag

SEQ ID NO: 28362 - protein, 541 aa, DROSOPHILA
MFEKYYCEDFGTSGGSSPENTPLGYGWTNGVIIEFLCKYGKEISLADTSDEGSKSKSRGSKPSGKYQYIITSEANMDDQPSKKRCVCGAPSMVGTMSHKSTATTATSDFAQQTQPPCSCGIAQKQRSQTQPGEDGKCSCGAGAKEKSQQQLQPKDAPSCGICGSQKQQPSQAQMQRSQQKVDDDQCTCSRKEALQQSQSQQQRTLGIQHDPDCPCAGPQQKGAGLIVVQGQVPDTDPDCECSMDERQKQQMEQQQKQQDCMRQQQQQQQEHQKQQQQLQSEQQQDCTTKPQTQDCSQHLKKSNGGCGCQDDEDEDRHDALTGHYFPVADKDPDDVYQQESKSTQRESGCDGCGRDDCPDPPQEDCGCSPVAKPQQTPIAECAPQPKAPQPAPADDCSCAVGKSQSKAASVVPPPTFICPHCGGVTSEAFLSTHTIGTNRTMGPQDDCGAAGQPLRGLASKGIQSGHSKVVAGGAGAECAPCKAHVTADFPAGHGPKPLFNKQFPLADPASNFDACPPKRGSDPTNNKKKKCCNCDEKEDGE

SEQ ID NO: 28363 - DNA, 4682 bp, DROSOPHILA
tgaatagttttgtagccatgttaactgcctagaacagaagaatatacacgtatgtaatttagtcttaatgtttttctatatgcaaaccgttttcacaacagatggatgaggagcaaaatagcagaggagagtggaaaaccagtcgaaacataatgataaacctatagattacaatgagaaaataccgatgaaaaatgttcatagttttttgctggaaggctcaaacaagttttttggtgatggttgtattctggtttataactttcaagcaaaaatgctgtgacgagaaaaaaagtttttgaacatgttttaaaataaatattaacaaaaaaaaacaagaaaacaacaaaaaaatatatagtaatgtaaaattaggtttaaggttttaatttcaatgttttcaagagctacaatgaataattgtagttattataatatttttaacattaattaattgaactaagtgaaaattggacccgattcagttgatctaaacttcaaatactttgagcatttctataaaattactttctgtcaatcattttttaaaaacacttgtcgatttcttattcctgattaacagttctttatgtaaattagttataattctgtttaaggcgcatcatacaaaacaaactgtttgcttgcttaaatccaaattcaatcaatgttcagtgtttcttaacttgttttaacattaattggcaaaataaatatagaattcatttcgatgaaagttgcatgcataaatctctaatccttttatgaacttgggaggaacttggattgctttttccagaattttaggggttgaacacgaatttacaatcaaattcgccgtggatgtttaattcgccccgccgcttatcggagacacaaaccatggacagtgtgtataagctgtagaatgtatgtataatgtagaaatatttgtagatatacaaacataataaagaataaatatattgtagttaattggtgcaattaataaaataacacgctatttgaactgtacattgttatgcaacaactccatgatctgctcttctggagctacccatttgcattccggatatttgatggcgcagtgatggggcacatttgactttcctgcttcgatggcgtctcgaaaagcggactgatccaaccaggccagtagccaggaccacttggtggctccatccagcaggtgctcgaagtccgaagcctgacccttgcttactttttcacctgcattgtgggtcaaagtacatatagatttcagcagacagacggtcagatccacgtcgtttttgagaaaggtgcgctcaatcataccgagaatgttaggaagattggtagctaataaaaaataataaaattaggattgcttcccgaatgagattcgttagctaaacatacccacccgatctccagtttcattgcggtaaatcagcttaaagttgtcaaggattccaggaaaacttaagttatcatcaaaaagtccccttgccgtggcatttgtagaatttttaggtgctggcgtagaggacgaaccctcttcctccgaagacttcggtttatgcgtagaagaattaccgaaaattggatgttgatcatctccagtgatggcctccagtcccaaactccgaatgaggtgacccaccaggactccaccggccaccacgagtccgcagctaacaacagcagcggaattcactacaactaatggctgagcggaggagaaatgttaataaatgaaacatttctctcttcacaatgattttttaccttcggtggagcattccgctttcgcttgacaggcacctcgagaaacggcaccagataatccagacccaaggctatgtgttttcccacagcatcgaaggatatcaacttgaatccttgtccaggatgaggtcttgatccgtgctgcttggccagcttctctggtccttcctcctgctccgattcctcttcaccactggcggcccaaatgacggcaaagctagccaggagggcacatgtcaggtacaatatcttcatttttccgctgggagatccgtccgggtgcgtagtcgatgtacatttgaatcaatttcccaggtggtgtcaccaacagacttctcatctaccacaaccgatttgcttggctggattaaatgtgcactgaggaaaaatatcccatttgaaatggattcatcaatttatcaaggtgtttcactacatgtaaaaaatattaaggtaggaaatgctgattctacattgattaggtaggtaaaggtgagtagttgctgagtacttcgtataatcataatctttaaagctggtggcataaaatgttgttcagtgtaattaccgcttggctggctcttagttgctataattttcgactgtgactccagttgcctcccatgtcttggaatcaaaatgcaacaaagtgggctgtgtgacataacaggtacggaggtgcgaaaacgattagctcgaggaagtgtcggccagatgaaagcggaagatagcatagctaccttctctaattgccggagaagtggcagaaattaatccaattttccggaatttcccttacataagaaagcaatggcgtgaagaaaagctggtgttatagtttttatggttatttttattgtattaaaaaaggtctaccttacaataacttaagaatactaatgtttgaatctctttttttagggtcaataaataaataaataaacaaggtttttggaacattcaatattactatccgactatccattactgaatttgggaacctttggtattccccaagacttccaatttagccgattgggccatttgcaacttcgatatgtatggctacaagtgcgactacttttagctgattggatggcatggaaaactgcggttccatcgacgatggaatgcaaccaggcggagctggaaagggtaaatggattaacatattgctaaattcggaaatcaaattcttacttacctggtcaagatgttcagagccctggcatatccggatgataggttttgctgcagatactgacagatcattcgctgtacacatacggacatgtcgatgttgtgctcctccaggtgggactctaccacatcagtcagccggcgcactattccagaaaagctatgtatagttggacccactaagagatttatactgcatggacttactgcttctgtctggatacgttttgtagccatatccattacccaacgaggtgatcaccagtggtgctataagcaatcgaactacaccagctataatcgctccagcggccacaacaactgctgtgttcactagagcaccagttcgcagattcagtatgctctggatagcatctcgagctaggttcatgctcctcttcacaggaactttgagaaagggaacaataaactccatttccacactcacatcctcaccgctggcatggaaatgaaagccgcgaccctcgcgatcctgtccagcgttttcctccgcatccagatcaagttccacgtccattcgtccgctttgctggcgaggttcgaagtcacgaaatcgaagcattctggcactggcattgccgtaaaaatccccatagctcagatcgctcccaccaacactttctccgaagaaacccagttgtgaaaagagggccattatacccagcacatgaaagatccgcaccaagcacatgctgtcgctccagcggctggaattcgtctgattgtcaccccgaaattcggaactggctttgtaagctccatggagtcggagaattacatgccccacgctccgggaatcaagatatgatattcatttagtcggaaaaccatagcgtaagacggaggcgcgtcttcaacgcttcgtgggttcaaatagtaggcgaattcgcgatgtcaaatggccaacgatcgattggataacgataactgatgcgtcgaggataagaaaagaaagtatcaacaagtttgaattcgagcagatggtgcttctggatagagcaggtgcaacagcccacaacgacagcgacgcacagaaaaatgaatgttcattataaaatctttcagcatatatgtacctatatgaaaagcagaaaattagttatgtacatttttctcagtgcaatcgtaggtaaactctccttattagaaagacatttgtgcaagactatggcccggaaaatttgcatattccgcgaagtgaactggctgaacgggctgcagttatgtcacttgtagagcgacgaaggttgggtaaacagatcaaaattgagcaatagcccccttcgaatggtaaatgcgttaaagtgttaaggttagatgaacaaactagcgttggagtaatgacctcgagtaatcatagagaagatatgatctctggaataatcataggttgctcatggctttaattcaggtgggttaaggtttaaagtaattgtagcacatatgattagtggtttgagactacatagataaactagcctatttttcacgcgtgaaacgtattattcagatgaattaattgctatttgattaaatatttaaagtattcaccttaggttagaactatcattaggaaaacacattaattgtaattttgagtttattaaaacttataattttaagcggttgtttacttcaatcagaacatggctaggctaaaatgtaagtatgaggatatggggctgggatgt

SEQ ID NO: 28364 - DNA, 1515 bp, DROSOPHILA
atgtgcttggtgcggatctttcatgtgctgggtataatggccctcttttcacaactgggtttcttcggagaaagtgttggtgggagcgatctgagctatggggatttttacggcaatgccagtgccagaatgcttcgatttcgtgacttcgaacctcgccagcaaagcggacgaatggacgtggaacttgatctggatgcggaggaaaacgctggacaggatcgcgagggtcgcggctttcatttccatgccagcggtgaggatgtgagtgtggaaatggagtttattgttccctttctcaaagttcctgtgaagaggagcatgaacctagctcgagatgctatccagagcatactgaatctgcgaactggtgctctagtgaacacagcagttgttgtggccgctggagcgattatagctggtgtagttcgattgcttatagcaccactggtgatcacctcgttgggtaatggatatggctacaaaacgtatccagacagaagcatgcgccggctgactgatgtggtagagtcccacctggaggagcacaacatcgacatgtccgtatgtgtacagcgaatgatctgtcagtatctgcagcaaaacctatcatccggatatgccagggctctgaacatcttgaccagctttgccgtcatttgggccgccagtggtgaagaggaatcggagcaggaggaaggaccagagaagctggccaagcagcacggatcaagacctcatcctggacaaggattcaagttgatatccttcgatgctgtgggaaaacacatagccttgggtctggattatctggtgccgtttctcgaggtgcctgtcaagcgaaagcggaatgctccaccgaagccattagttgtagtgaattccgctgctgttgttagctgcggactcgtggtggccggtggagtcctggtgggtcacctcattcggagtttgggactggaggccatcactggagatgatcaacatccaattttcggtaattcttctacgcataaaccgaagtcttcggaggaagagggttcgtcctctacgccagcacctaaaaattctacaaatgccacggcaaggggactttttgatgataacttaagttttcctggaatccttgacaactttaagctgatttaccgcaatgaaactggagatcgggtggctaccaatcttcctaacattctcggtatgattgagcgcacctttctcaaaaacgacgtggatctgaccgtctgtctgctgaaatctatatgtactttgacccacaatgcaggtgaaaaagtaagcaagggtcaggcttcggacttcgagcacctgctggatggagccaccaagtggtcctggctactggcctggttggatcagtccgcttttcgagacgccatcgaagcaggaaagtcaaatgtgccccatcactgcgccatcaaatatccggaatgcaaatgggtagctccagaagagcagatcatggagttgttgcataacaatgtacagttcaaatag

SEQ ID NO: 28365 - protein, 504 aa, DROSOPHILA
MCLVRIFHVLGIMALFSQLGFFGESVGGSDLSYGDFYGNASARMLRFRDFEPRQQSGRMDVELDLDAEENAGQDREGRGFHFHASGEDVSVEMEFIVPFLKVPVKRSMNLARDAIQSILNLRTGALVNTAVVVAAGAIIAGVVRLLIAPLVITSLGNGYGYKTYPDRSMRRLTDVVESHLEEHNIDMSVCVQRMICQYLQQNLSSGYARALNILTSFAVIWAASGEEESEQEEGPEKLAKQHGSRPHPGQGFKLISFDAVGKHIALGLDYLVPFLEVPVKRKRNAPPKPLVVVNSAAVVSCGLVVAGGVLVGHLIRSLGLEAITGDDQHPIFGNSSTHKPKSSEEEGSSSTPAPKNSTNATARGLFDDNLSFPGILDNFKLIYRNETGDRVATNLPNILGMIERTFLKNDVDLTVCLLKSICTLTHNAGEKVSKGQASDFEHLLDGATKWSWLLAWLDQSAFRDAIEAGKSNVPHHCAIKYPECKWVAPEEQIMELLHNNVQFK

SEQ ID NO: 28366 - DNA, 3167 bp, DROSOPHILA
tgtctggtgaaacatcaaagcaaaaagctatttgatcaacagaaactccatttatttggtgtgtatttgtcaatggtttacatggaatttttatcactcttttataagcattagataagccgcgcgattaaccattttatgtgtatctgcgtacctagtacctatctagttacgaaaatgcatttatatacatgtacattaatgatcgaagagataagtaatataagttatgtttttcatgataatagggtcacaatggtatcatactgaatggaacgtacctaattatgctctcgttttcctcgttcaacttgtcggcatcctttgacttgtattgcataagtcgctccagtagacgccgattttcatcctgtgaattgtaagagaacgaaaagctttttaatagacgctttttcatattggggatatatgcaaatctctggcgccgtcgtgtttttcgtgttttccgcgttgaacgctaatatgctactggatcgaaatcggaaagatagcaagcttttcgcgtctgtagacggcgaggcatagcgattcgagccatctgcaatgtatttatcgaaccgaccccataccatagaaatagacctgctcaatgggactcggaagcctcgataagtaccaataaaatgatattctatacgctattttgaataaacagttttgaggatttaattagcgatcaatgagtaacacacagttgatcagcaaaaaatcccgttcgggatttgtctatcgttgtggtttaagtgcttttattaaatggcctataaacaataattaatggtcttatattctgacaacttttaaatagagaaatatagagaatagcgaatccccggtcatttcgttgggtcactgaatacttcaacttacaagaatttaatttactttcccaatttatacgctacgaagaatttactttatgtactgctcatagacaaatgaaacaaagccgttctggttcagtagtagtaataaggtgttaataatctggacaacttacttgcactccccttaacttctcctcgagggagctaaatgccaattgaagcgccgtatgttcgtccagcattgtgttgttcagcttcttgagttcctccaaactcgagtgaagtagctgcacctccgcgcgcaatcggttgttgttcgtttgctgttcgacgaggctaaaataaatatatgtattagtaggcattttcatttgtaatctcgccgagattaaggtttatgcttcaaataattagtcattctctacgcagcagaatcttaattgaatttaaaaatcaagggtgcgataaacaaatggttgtatgggctattaaaatcacaaaagggtttttccgagttctcttccgtaaatcgtcattctaggtaccatttgcttgaaacttttttggcggattcgaaatgcggaacaccctggacagctacctgtgctccttctcggaaattatgatcctctgctgctcgaccttctggttgaggtccacgatcatctgggagttctcgcccttgcgcttgtgtagctctgtgagctcctcctgctggctgagcagcttcttttcgagggtggcgatagccacgttggagccggtgccacctgttgacaccgcgttgcggagctgctcgttttcgacggagatcttcaggttgtccgccttcagttgcgccacatggtcaatcagtcggttgtctgcaagagacgcgggcaattaatgcgtgtgaccatgaagttctgagtctattcggatcggaggttaactggtgcgatgcggggccagccaactggaacttcgctggagacccagatgcttactttgctcgatgatctccttgaagttgtcgcactccttgcgatttcgctcgcgtaagcgccgcacgacgtgcgctcgccacacatgctcctccgtagacatgtttttattgggtttctgcccggaatttctgggtgctccgtactggggactccggactcttggcttgggttctccttgcttgcaggattcgtggcgacaccttggcgtggtcgcctgttcgcatcgcagggggtgtggcacgggcgctataaggcggctgcgtttattcgcataattgtttttaaccaaatatgattattgttgttcagctgttcatattagtgatgtcacggcacatcgatgcatcgatgttattggcgatacttatcgatgtgacatcggcttcgaataaaaatgattttatgtataaaactctagctgaattatgcgttatcttatgttaagttgatatataatgataaaaagctttttattagcctcaggtccacaagccctaatattaaaatcacatatattaaatattttgttggtatgtatactaaggaaagtaaagtaaagtatagtaaagtaagtataggatatattgcctccaatgaatgaagaatgatccttataggtagtgtggcttcggtcctggtaaggcgctcgaatatatttgtacagcttgtattattatcatcgaattccaattaaactatttaaaattggaagctttttcttatctggattcatcgattacttgggcgccaacaaaactggtgtgctgtggttatcgaaaacaatagtattaggcaacgtttttttaagtgctgcctaatatccaaccggttaaaatgcagaacccgctaaaaagaagaaacgactttttgaatttgaacagatgtgatcaaaacgtataattgaaatattcattttaattacacgaacaatttacgctctaaaatactgattcgcgatttaatgaacagttatatattctttctctggttttgccagcacttgctgaccatgtcgctggagacatccttgttcagatgcatcataaccatctgctttccatagatctagtagggtataatggcctttatcataatgtatagaaaagtgctggccacagccgtggtaggaatcaaaaggatccaatactccagcgccaggtaagtgtcaccgttcattccccagtataaaagtagcaacctagtcagctggtgggtcacactttccaaggcgcaccacaccacggatgtggagaactcgatgataatcagggatccgaccgtctccccaagaacctgaatgatgtacggcacgtgcgtgtaacctttcggacac

SEQ ID NO: 28367 - DNA, 779 bp, DROSOPHILA
ccgtgacatcactaatatgaacagctgaacaacaataatcatatttggttaaaaacaattatgcgaataaacgcagccgccttatagcgcccgtgccacaccccctgcgatgcgaacaggcgaccacgccaaggtgtcgccacgaatcctgcaagcaaggagaacccaagccaagagtccggagtccccagtacggagcacccagaaattccgggcagaaacccaataaaaacatgtctacggaggagcatgtgtggcgagcgcacgtcgtgcggcgcttacgcgagcgaaatcgcaaggagtgcgacaacttcaaggagatcatcgagcaaaacaaccgactgattgaccatgtggcgcaactgaaggcggacaacctgaagatctccgtcgaaaacgagcagctccgcaacgcggtgtcaacaggtggcaccggctccaacgtggctatcgccaccctcgaaaagaagctgctcagccagcaggaggagctcacagagctacacaagcgcaagggcgagaactcccagatgatcgtggacctcaaccagaaggtcgagcagcagaggatcataatttccgagaaggagcacagcctcgtcgaacagcaaacgaacaacaaccgattgcgcgcggaggtgcagctacttcactcgagtttggaggaactcaagaagctgaacaacacaatgctggacgaacatacggcgcttcaattggcatttagctccctcgaggagaagttaaggggagtgcaagtaagttgtccagattattaa

SEQ ID NO: 28368 - protein, 181 aa, DROSOPHILA
MSTEEHVWRAHVVRRLRERNRKECDNFKEIIEQNNRLIDHVAQLKADNLKISVENEQLRNAVSTGGTGSNVAIATLEKKLLSQQEELTELHKRKGENSQMIVDLNQKVEQQRIIISEKEHSLVEQQTNNNRLRAEVQLLHSSLEELKKLNNTMLDEHTALQLAFSSLEEKLRGVQVSCPDY

SEQ ID NO: 28369 - DNA, 2360 bp, DROSOPHILA
ctggcgagatctcgtccttgacgtagcccagttgcttgaagaaggaaatggaggcttcgttgttgttgagaacggtcagcatgaccttttccagatgccacaggcgagcgcagtcctccaaagtgctcatgatgaactttcccaggccttttctacgatactctgcagccacttgcatttcgtaactgaaaggaagttctacgtaattaatgcataagggctttacttatggaatacccaccaatacaggacacagtccccgtgatccatgtcgaagcggaacattgcgtaggccacgttctccttcttttcgttctgggccaccaagtagcgagcccagttcttgttcagctcggcggctttgatcttgggctgccagcccatcttgagttgcttgtaatagggtcccacgttcgtctcggccagcttaaaggcccatttcagcagtttggagtccgcatccgacttcgctcggcagatgagtttgaattcctctccgctgggggctttgtagctttggtagctcagagattcgaggggattcttggccctggcagccgtctccacaaatctctgtttggcgccctgacttagatcgtcctgattccgcattgtttgcttaaaattttgtaaaaatggcaattcgactaaaaatatgccgcgcaaattagggatggcacacagtggtaaacaaactattattgcttatatagagactgctatcgattacacagattaactttaattggtatttttgaaataataattactggccacttcattatttaccactgttttgtaaacaattgcagaaaatttattgaattccattttacggcttatatacgggttttagactaaattgttagtacgataattaaccttaatatcactaagactacgagactcgatacatcaggtaaccccacatattgaatccccaattcaacaagtgctgacgtttccagttctctaaattgtagtttcaaggaaacagacgatgtttaggaagtccaggcccaaagtagagcctccacccacggctcccagtgtagaggaaatgctggcggacatggaaacgttcgaggtcaatcagcctacgataagcggatctacagacaacttggacttggagcacgctttcatgactgaaccagagaatcttcccctttcaacatggtggcagatgttcgacgagtacgatcagaaggtgaagaaactgtcggccaccgtgggagatctggagacccaacgaaatcagttaaaagaatgctatgcgaagctggaaaataacgcggataaactgagaacggacatccaaaagcagcaggcactggtcaaagaagcccttaaatgttaatctatcattaagctaccttatcttaaactattgttgaatgcacgagcgggtaacaagtaaaacctaaaaactccacaatcttgagaatattcactttaggcccactgcactgtggttcgagtcccggctagaacttcagctcaaagtacgtttgcggtatatttttcaaccgcgaggtgtatttttctgagcctgacattttaacggtcaatgcgcggtgtggtcacactgcttggtggatggtaaggtggtcgaaaaaagttgttaaaagcgcagaaaaagcaattgtaatgcaattgctccagtgactgtgaaaagtaagcagccaagcaaataagttaatcaaaacatagatcaacagatcagaaagtcctaaaacggcacgattagtcgtgaaattcgctcggtttaggcctggatgattgggcagaagaacaggttttaggccgtggcaacaacgaaaaaaaaaaaaaaatagaaaaaaaaacctgcgactggcttataccatttacgccattaacggaggtcgatggttatccctgtgtgtgtgtggtgtgtgtttggtccaatatatttggctaaattccgcaaatccaattaacgcaaacggaaaaaaagagtgcaacaatttgtggctaattgaattttacgtgtattttattttggttttcgaccagcgcaacaacaacagcgagcaacgagtagaaagagtggggagagcagtgggggtttttttggcccaaagctcaggtagaatacacacacacacgcatgattgttgggcaaaaacaataattatccaattaaacggttgtcaaagaatgcatttaatttcattggccaataggtttgcgcgtaagagagggaagcagtggcgaagagagcgcctaactaacagtatttttcacgggcacaccaatgcgagcgacactgcttcgtgtgtgtatgtgtgtgaggtgctaatgagatgctgtgacgctcttcttcttcttgccgtttg

SEQ ID NO: 28370 - DNA, 360 bp, DROSOPHILA
atgtttaggaagtccaggcccaaagtagagcctccacccacggctcccagtgtagaggaaatgctggcggacatggaaacgttcgaggtcaatcagcctacgataagcggatctacagacaacttggacttggagcacgctttcatgactgaaccagagaatcttcccctttcaacatggtggcagatgttcgacgagtacgatcagaaggtgaagaaactgtcggccaccgtgggagatctggagacccaacgaaatcagttaaaagaatgctatgcgaagctggaaaataacgcggataaactgagaacggacatccaaaagcagcaggcactggtcaaagaagcccttaaatgttaa

SEQ ID NO: 28371 - protein, 119 aa, DROSOPHILA
MFRKSRPKVEPPPTAPSVEEMLADMETFEVNQPTISGSTDNLDLEHAFMTEPENLPLSTWWQMFDEYDQKVKKLSATVGDLETQRNQLKECYAKLENNADKLRTDIQKQQALVKEALKC

SEQ ID NO: 28372 - DNA, 3952 bp, DROSOPHILA
tgataccctttgatctgaaggcgaccgatgtggaaggactggactcactgtgtcagcatctcgagagtctaaatgtggacgtggcgcagtggcagcagcttatctcgctggccatggacatggctatggagtcacgtgctcccactactccgcccaaggaagcagacaattgcaagtctataatcgagattgatctcacatcgccgatgagccacacctgacttccgattaactgatttacttggattagggggaagacccttttccaatggagcactttattttagcattataaatagttggcttccaataaaagctcaattgggaattcatcttaacgaattaagcatcttattatagcagttttttagccatttaagtactgcttgtaattgtttaagtgcagtgtaaattatacatatatctcccaaaatttttttttttttcttttttctgatatatcatcttcactggaagcttaaaaatttttagagatatcgccaaagaagagatatcgcgaaaggctccagtttaagtagttccaattcaaacttattcaaattaaaaaccagttattgaatttattttaaatcaaaagtcttcttatcatatttaaccaaatttacaactttagtgataattatatcataaatttggtttaatgagttctctattactataaggttttatatatatttcaaatgtttgggtaatttccttataactatatcagaacaagacctgttttattaaacacctttctttaagatttgtatgattatctgagagcttttgacatggcggccggtgttaatcgagaaatctcgaaagtcacaagcgactcagagtgccaccgactaaccgatctatgaataaacagcgatccatatagattggcgctgctcaattgctattgtccggcgaaagttagagcgacctatcgtggctacaaaaacgcagccgcaccgcagccgcggattcagttgttgtccggaatccacgatgatcacggaaactctcctgacgatctgcgcggcggtgttcctctgcctttcgtatcgatatgcagtgggtcgaccctccggctttccacccggttcgttttatctggctttgctgctctctgggtggactcaagcttatcggattattcacaggtcctccaaagattccgcttttcggcagctacctcttcatgttgatcatcaactttaagtatctgcacaaggcggctctgaccctcagtcggtggtacaagtcggatatcattggactgcatgtgggtccttttccggtggccgttgtccacagtgcggatggagtgcgcgagatcctcaataatcaggtgttcgatggacggccgcagcttttcgtggccgccatgcgcgatcccggccaagatgtgcgaggtgagtccaatcgtatcgtgcaacgattgtggacacttgtaatggcgttgttgaaataataatggggtcaatcgtgaattaattgtcgcggctgacgaacaaaacacgcttatcgctcgcaagcgattgatacttggcgcacttcacagtcaaagaaagtgaagtcttgtcaatcagtcgtgttcacacttatatttatatataactagcttgccctgccaccttgactgataagaccaatgattgattgatatttaatataactatttaatttttgctgctcttcgcagggatctttttccaggatggccccctgtggaaggagcaacgtcgcttcatcctgcgctacttaagagactttggtttcggacgacgattcgaccaactggagctggtcatccaggagcagttgaacgacatgctggatctgatccgcaacggtccaaagtatccgcatgagcacgagatggtgaaatccggaggatatcgcgtgcttctgccgctgctctttaatcccttctcggccaacgctcacttttacattgtctacaatgagtgcctgagtcgcgaggaaatgggcaaattggtgaagctctgccagatgggcatacagttccagcggaatgcggacgactacggcaaaatgttgagcattataccgtggattcggcacatttggcccgaatggagtggctacaacaagctaaacgagtccaacctattcgtgcggcagttctttgccgactttgtggataagtatttggacagctacgaagagggtgtggagcgcaacttcatggatgtctacatagctgaaatgcgccgaggtccgggctacggtttcaatcgggatcaattgatcatgggcctggtggacttctcctttccggccttcactgccatcggagtgcagctatcgctactcgtccagtatctcatgctatatccggcagttctgcggcgggttcagaacgagatcgacgaggtggtgggatgcggacgattgcccaacctggaggatcgcaagaacttgcccttcacggaggccaccattcgcgaaggtctgcgcatcgagacgctggttccctcggatgtcccgcacaaggcgctggaggacaccgaattgctgggctaccggatacccaaggttagaaaagtttcctatctatttaattttaaaaaccaaactattttcccctatatacccgtacaggacaccattgtcgtgcccagcctgtatgccttccactcggacgcccgtatttggtcggatccggagcagttccggccggagagattcctggacgcggatggcaagctctgcctgaaactggatgtctcgctgccctttggagcgggaaaacggctctgtgccggcgagacatttgcgcgcaacatgctcttcctggtgacagcgaccatgtgccagcactttgacttcgtcctgggccccaatgatcggttgcccgatctctcccagaacctcaatggactgattatttcgccaccagatttctggctgcaactacaggatcggcattgaaagtagccaagatattagagttatctatttttaagacaaagtaattttactgattacgttagctagtttgcttggatattttttgaggaattttattccgtcacatttcaaaaatattctagaattgcccaatactattatgtgatgcaccacaacgaactatttattttaacattgtcgtttactcatatcgtgtggtatcaaagttcgcgaacggaacttgttgagaagatgcgattggaatgagatgggtttcttagaaatcctcattatcgctgtatacaatgcaatcagaatctgagctggtggatgaaaaactcaatgagcgaaccagcgagaccatcgaagaatgtattgagggattgggggactggatagcattgtactcggattctgaatccggatcgtatccttcctcatcgtccatttcctcttgcgggttcacgaatgagttgtccaaaggatccacctcgttggcggcttccatcgttgcaccctgagtctcattgcgcaactcgatcacttcttggcgaatctggttctgctcctccgcaatggtggccaccagttgttcgagactgcagatcttggcctcatattcggtcagtttcttcttcagctgacagttttcggcccgacagttggccaattccaagcaggcgcacatggcgatcttgacgtcatccgaggttgcggacctggtactgtatgcaaaccacattgttaccacaaggaacacatacgccggatatcgaaagcgatctcttggccgaaacttacatgtttaagccactggagttcttattatgaaccgggcaattgagggacattttgagacttgaaatttataggcagttcagtttagcaattgtcttacgacaaaatcaactttgacctatttgtactcggaaagttcacccagaaatatttgacactgttttactgttctcttcgattcgaatgcaaatatgagcttctgaaatacagaaattcaaggtcc

SEQ ID NO: 28373 - DNA, 1535 bp, DROSOPHILA
cgatgatcacggaaactctcctgacgatctgcgcggcggtgttcctctgcctttcgtatcgatatgcagtgggtcgaccctccggctttccacccggtcctccaaagattccgcttttcggcagctacctcttcatgttgatcatcaactttaagtatctgcacaaggcggctctgaccctcagtcggtggtacaagtcggatatcattggactgcatgtgggtccttttccggtggccgttgtccacagtgcggatggagtgcgcgagatcctcaataatcaggtgttcgatggacggccgcagcttttcgtggccgccatgcgcgatcccggccaagatgtgcgagggatctttttccaggatggccccctgtggaaggagcaacgtcgcttcatcctgcgctacttaagagactttggtttcggacgacgattcgaccaactggagctggtcatccaggagcagttgaacgacatgctggatctgatccgcaacggtccaaagtatccgcatgagcacgagatggtgaaatccggaggatatcgcgtgcttctgccgctgctctttaatcccttctcggccaacgctcacttttacattgtctacaatgagtgcctgagtcgcgaggaaatgggcaaattggtgaagctctgccagatgggcatacagttccagcggaatgcggacgactacggcaaaatgttgagcattataccgtggattcggcacatttggcccgaatggagtggctacaacaagctaaacgagtccaacctattcgtgcggcagttctttgccgactttgtggataagtatttggacagctacgaagagggtgtggagcgcaacttcatggatgtctacatagctgaaatgcgccgaggtccgggctacggtttcaatcgggatcaattgatcatgggcctggtggacttctcctttccggccttcactgccatcggagtgcagctatcgctactcgtccagtatctcatgctatatccggcagttctgcggcgggttcagaacgagatcgacgaggtggtgggatgcggacgattgcccaacctggaggatcgcaagaacttgcccttcacggaggccaccattcgcgaaggtctgcgcatcgagacgctggttccctcggatgtcccgcacaaggcgctggaggacaccgaattgctgggctaccggatacccaaggacaccattgtcgtgcccagcctgtatgccttccactcggacgcccgtatttggtcggatccggagcagttccggccggagagattcctggacgcggatggcaagctctgcctgaaactggatgtctcgctgccctttggagcgggaaaacggctctgtgccggcgagacatttgcgcgcaacatgctcttcctggtgacagcgaccatgtgccagcactttgacttcgtcctgggccccaatgatcggttgcccgatctctcccagaacctcaatggactgattatttcgccaccagatttctggctgcaactacaggatcggcattga

SEQ ID NO: 28374 - protein, 510 aa, DROSOPHILA
MITETLLTICAAVFLCLSYRYAVGRPSGFPPGPPKIPLFGSYLFMLIINFKYLHKAALTLSRWYKSDIIGLHVGPFPVAVVHSADGVREILNNQVFDGRPQLFVAAMRDPGQDVRGIFFQDGPLWKEQRRFILRYLRDFGFGRRFDQLELVIQEQLNDMLDLIRNGPKYPHEHEMVKSGGYRVLLPLLFNPFSANAHFYIVYNECLSREEMGKLVKLCQMGIQFQRNADDYGKMLSIIPWIRHIWPEWSGYNKLNESNLFVRQFFADFVDKYLDSYEEGVERNFMDVYIAEMRRGPGYGFNRDQLIMGLVDFSFPAFTAIGVQLSLLVQYLMLYPAVLRRVQNEIDEVVGCGRLPNLEDRKNLPFTEATIREGLRIETLVPSDVPHKALEDTELLGYRIPKDTIVVPSLYAFHSDARIWSDPEQFRPERFLDADGKLCLKLDVSLPFGAGKRLCAGETFARNMLFLVTATMCQHFDFVLGPNDRLPDLSQNLNGLIISPPDFWLQLQDRH

SEQ ID NO: 28375 - DNA, 5352 bp, DROSOPHILA
taacaattatactcacaattaaactcattctataaaaagtggaaaccgttagtttcatttggcaaaggagtaatgagtaagtaaaatccattgaaatcgattgaatttttatttgttatatatatattctcccgtgatactataatcgctattcttatgtcaagcccgttgtcgaaccgtttaaattgccattgatgggttacataattatgttggtaattcaatatttaagtacacattcagcggaatgactacgaaaatgaatcagatggaaattgtcgctggaaccgcgcattggttaaatcattaatcgcatatccattaattgacttatgtggactttagccatgcacagtgggacaaaaagtcaaaatgggaataaatcaagcagtatattgatataaactattttgaattaacaggaatgccaaatgacctttcctaaatggtgtttgaatttttcaaaatactatcccgcttgactaggctcaccacagtgcaaagagcagaattgaattgcaatcaagggttcgaaaaaatgaaaccaagttaagctgggcaaatggtcatttttgcaaatatgataagttaatcggtaggagtgccacgcccaccttgcgggaggcttcaattaaaatgtctattacggaatccgcctctgggtcagctggtcagcgttcgtgtggtgcagctgtcagaggagtttgtgttacttcaatttccgttcaattcatttaataataaccgaatgcattatgcagcaataattaagagccacagacaggtgaaaattcctcacctgaaatgcaataatcgcgcaggagcgatagataaaaagcttcgctgattttgagctgttctgatataaaaggaaacattttaaaattcgaattgattttcaattaagttggctatgctttcatttctaataagattttgttctgccggaatattgtgttcactttctttcactacttgactgagaaaccaattccagtgctcaacggaatttagaaatggcagagaagtcgaacgcggaagcaaagccaactggaaaaaacgagttcttgatgacagaggatcctgagcacccgagtggatcgaaggagggttcgccgtcctcaggatcttcttcttcgacaactgaagcttctttgaatacgataaatgtgtctacccagcgcctccatgagaaactagaggacctagagaggcagatggaccaggatgagataatgaatgagcatttcattcgcctcatggctgtaatccgaatgtttttttataaaataaatatcatctggcgcggtagatgggtagatgatggtagatgacttggcaggactcttttattttcataccgggttttgatactgatttttgatttcaccacccagtcggagagttcacaatccttatagacatctttctcaacaaccgaggtcgtctttgataaccatcctgatcctgaatacatcgatgacatcgacaggatttgcacggaactaatttcccttgtaacggaaaaagtggaagtcggcgggaccaaaataccaattgatcaaaaataataaagatttaaagtctaagaacttgtgaattgaaggacatattttgtcaaatttacaaagcatgagcatacgtgagcacacatacacttgtcgccgttcgctgtatgcgtagaagagagctgctggctgtaaagctctccgctctctggctcttgaacaaaaggattcttgattcaaaggaagcctggaaccagctcgaaaatatcgggtgcaaaaatatcgtatcgcatcttgacattctactgtctttgatcgaatggtcgaaataagtagaccaatatcatgggcattcgtgaaatggttctaattaacgaataataatctaataacgaatattctcagctttgccttttttttttggcgcttccttttacggatcttctccggttctataggttcagaacgatatatatataaagaaagatatataaaagaataatcaaaaatcacaaaccgaaaaacaagtttcgagatttgtcaaaatgcttaaatgatttaaatatggcaatatttttcacactttgtatatttgagctttcctactttaaaaggaaccattcaaaatccatatttattttctatcaagttggcaagttgctgacacgtggcatgacgtttcgttgtgattgacaataaagttcactctcatcgcaccatttttctgacaaaccggctacagaattcaactgaatttagaaatggcagacaagtcgaacgagaatgcatattcaactagaaacaacgagtatttgacgaggaaggatcctgagcagccgagtgtatcgaatatgataagttcgcctacttacacggagggtaagcagtccttacaggcttcttcttcgacaattgaagctttttctttttgaagagatccagcgcatcgatgaggaaatacaggacatggagaggctgattgcccaaaaggagaaggaatgtgaaatactgtacctatttcagctcatgcatgtaatccgaggagtactaagccaaaatcaacatttgcaggacatctagtatatgcgattactgttaacttattcccaaataataataaaaaaaaataattaaaatgcttatttgcttttttcgagcaatgaaaaggcgattgatttttatgtagtgatttcaaacgattaatgtttatttactttagcgaacgattatttattcttcatcgatgcgtctatgctgaactgcgtcttcaaagttgtcatgtttgaaaataacaaatttaggaaattctggcgactgcgggtagaccaaagagaatgccattgccgagttctgcgactatcggatacctcttactcagataaagtcagtgcgaagcgaataggaaagcgactgtttcccaagtgtgtgtttgaacatatgaattatatatactatattgcctacgatttcagttctattcaagggacgttttacgaatttcattcagcagagtaagcatggtgtacgctcccttaatcatctgcaaaaaatcgctgataaggtgggtaaatgttagctttgtacagcactcaccaccgtgaaggtcttcatgctgatgggcacaattacgccggagaccaggatcattggaatctggcagcgtgcgagcatcaggagcaggagtctccgaaagtttaccgactgggacagccagttgcagctgtagacagcggtcaggaggctctccccttccttgcaaggtagctccgccgtgtagcagagaagaagggtctccgtggtgaggatcaccagcaggaacaacatattcatgaacctcatgatcccgacgttcccgaagagtagaaagtagcagattgtgcactgcgcacacgccgtgctgaagaactgcagaaagcaggtcatcgaaagggatctctccagtgacttgaagaggctgtagttgagaaaaaggatataataatcttcaatgacaatgaagatgtttggcacgccaaagtgtgtgtacatacgcctttcgatgaaggtcaaaactcccgaaatgctttaaaagttcttgcattgggagatgagatttcctgacactcaccgcaaaatgatctggtggtcgtggatgtaaccaaccagaatggcctgcatccgaaccgccggtagtggcgcgccatatcccaatttggagacccgcagggcgagcgccttggtgtggacactgaccaggatgaggtaggtgcccggataggagctcagattgaggacaagtgtcgcattcgccatgagggcggtcgtgtgcagcatggcggtggccaggtaggcggaggtgctgtccctccagttccagggaatccaggtggggtacatcagcgtgggctcgctggacgcggatatgtagatgatgccaaggacgacggtgcacgcaaggccgcgaaaaatggtgcggaatatgaactcggcccgctcgatgccggccataatgatctggcgttcgtcgtcgcagccaagccgcttgtccaagagacggagcaaccagtggctgctgatcatctggccgcgcatccgacggacattgatcagcttaagcatgtagagcgtgtgcggcatggtcacgcagaggctctcgcagaaagtctccagcgaattggactgcaggagattgaccgaaaaggacacccagatgcagatgtggaaggttacgttccacaccatggagtacgccgtgtagtggcgaccccagaaggtcctcttgcccggcggatggattcccataatcctgaagatgcgccagtggttaaccagagccctcgttgaatccaccttcgatatgtccatggttgttcgcctctttgaagcagctctccgcgttccgacctttttatattcatccaataagccacctatgccgcaaattatgcaaattgctgcaaattacaccgaaaaagttcgattttgaaccaccaccagcaattacaatgacaatcatttttcgcaaatcaatcgcctccttatcatcattagcgccacttagctttctggtaaatgaaaaggtttttataattattcccacacttttgtttaaattttttttttaaagcgttattttatctaaagcgttgtgttcaacggcgtgaaaggtttggccgatttgtgggcgtggcaaatagttgtttggcaaatcgctgcgatgggagatagcttagttaacgaagataaggctgcatagctgcggtggcgcatagttgaactgtgtcttcaaaattttggcggctgcgagacgcgacaaaggaagtgaaacatttttatatatccgttcctcgtagagtacaagggtatactcgatataaagtatatacattcttgatccggatcaatagccgtgtcgagctggcgatttcaatccatccgtcggtcatttcgtatgaacgtctcgatctcaggaactatagaagatgttcttttacatttttgttagttctatagattttatcgatatgccaaacaacttttcggcacgcccaccatccgcccactactgccacgctcacacttttgaaagatgtgtagatttttcttcgttttattgtttattttgtaaatttctaccgccataccaaaagcacattggttacgccattccttacacctacttttgaataatttgaaacaatttttctcattctattcttcaatatctattgatatcccagaaaaagtatgaaaatttcgcattcccactagctgaaaaacgtgtatctgatagtcgactgtaggattctcgcttgttctttttttctacgggttgtcgggaataagtcgatggtaataggaaagt

SEQ ID NO: 28376 - DNA, 1563 bp, DROSOPHILA
atggacatatcgaaggtggattcaacgagggctctggttaaccactggcgcatcttcaggattatgggaatccatccgccgggcaagaggaccttctggggtcgccactacacggcgtactccatggtgtggaacgtaaccttccacatctgcatctgggtgtccttttcggtcaatctcctgcagtccaattcgctggagactttctgcgagagcctctgcgtgaccatgccgcacacgctctacatgcttaagctgatcaatgtccgtcggatgcgcggccagatgatcagcagccactggttgctccgtctcttggacaagcggcttggctgcgacgacgaacgccagatcattatggccggcatcgagcgggccgagttcatattccgcaccatttttcgcggccttgcgtgcaccgtcgtccttggcatcatctacatatccgcgtccagcgagcccacgctgatgtaccccacctggattccctggaactggagggacagcacctccgcctacctggccaccgccatgctgcacacgaccgccctcatggcgaatgcgacacttgtcctcaatctgagctcctatccgggcacctacctcatcctggtcagtgtccacaccaaggcgctcgccctgcgggtctccaaattgggatatggcgcgccactaccggcggttcggatgcaggccattctggttggttacatccacgaccaccagatcattttgcgcctcttcaagtcactggagagatccctttcgatgacctgctttctgcagttcttcagcacggcgtgtgcgcagtgcacaatctgctactttctactcttcgggaacgtcgggatcatgaggttcatgaatatgttgttcctgctggtgatcctcaccacggagacccttcttctctgctacacggcggagctaccttgcaaggaaggggagagcctcctgaccgctgtctacagctgcaactggctgtcccagtcggtaaactttcggagactcctgctcctgatgctcgcacgctgccagattccaatgatcctggtctccggcgtaattgtgcccatcagcatgaagaccttcacggtgcctctccatgtcctgtatttcctcatcgatgcgctggatctcttcaaaaagaaaaagcttcaattgtcgaagaagaagcctgtaaggactgcttaccctccgtgtaaggaaattagttccgtgcaaatcctgtcgatgtcatcgatgtattcaggatcaggatggttatcaaagacgacctcggttgttgagaaagatgtctataaggattgtgaactctccgactgggtggtgaaatcaaaaatcagtatcaaaacccggtcctctagtttctcatggaggcgctgggtagacacatttatcgtattcaaagaagcttcagttgtcgaagaagaagatcctgaggacggcgaaccctccttcgatccactcgggtgctcaggatcctctgtcatcaagaactcgttttttccagttggctttgcttccgcgttcgacttctctgccatttctaaattccgttga

SEQ ID NO: 28377 - protein, 520 aa, DROSOPHILA
MDISKVDSTRALVNHWRIFRIMGIHPPGKRTFWGRHYTAYSMVWNVTFHICIWVSFSVNLLQSNSLETFCESLCVTMPHTLYMLKLINVRRMRGQMISSHWLLRLLDKRLGCDDERQIIMAGIERAEFIFRTIFRGLACTVVLGIIYISASSEPTLMYPTWIPWNWRDSTSAYLATAMLHTTALMANATLVLNLSSYPGTYLILVSVHTKALALRVSKLGYGAPLPAVRMQAILVGYIHDHQIILRLFKSLERSLSMTCFLQFFSTACAQCTICYFLLFGNVGIMRFMNMLFLLVILTTETLLLCYTAELPCKEGESLLTAVYSCNWLSQSVNFRRLLLLMLARCQIPMILVSGVIVPISMKTFTVPLHVLYFLIDALDLFKKKKLQLSKKKPVRTAYPPCKEISSVQILSMSSMYSGSGWLSKTTSVVEKDVYKDCELSDWVVKSKISIKTRSSSFSWRRWVDTFIVFKEASVVEEEDPEDGEPSFDPLGCSGSSVIKNSFFPVGFASAFDFSAISKFR

SEQ ID NO: 28378 - DNA, 3930 bp, DROSOPHILA
atggcaccaccattgcgagattcttgtagaaatctaatgaactccttggtcactccatccacttggcgaacaaagttccgcacactctttggtgcactcagctccttttgcacctgggcacgtatacgccaccattccggaccattggtgggcagcaagccggtggttttatagacatccggtcggctcttgcgatattgagccagtgccaggtgacttcttcgctgcggacaatcccgctcgttgagcagcaaagctatgtccttgggatcgtacaaccagacaatgtcctgcccaggaactatagtttcccgcacaattgcgccatatttctcatacttatcctggccggcttggtgcaatcttagccaggaataggatccgattccgggcaggtaattgtatagattacccattccaaagggtcctcgtggtcctggtatcgcctgatacggcttggcaaaggtgcactgcctcgaggtgcagctaatctttaacagtttggtcaacatttttcgtcgttactctggtcttttcgcggcaaattctcgaaatgcactggagactacatgggtctgagggttttattgccggctcagcattcgggaaaaaggcattaaacgcacactgggatcgaagttgtgcctacctgtggtgaatctacctacctgagagggtttacttccgatgttttcgctctttaaattaagagagccaaaatgggaatagtatattcttaaaaagaaaggtatacttttcggctttacgtttttattgatctagctaaaaggggtataaaccccaagtatagctttgatttgcattttgattgagttttctccaaatatgatattttgccaaaacgcatcatattattttaaaatgtagctcaaaatacctgaaatggactttgccaaattaatgaattgatgttgccgagatctttacaattatttattcgcagtcttatttggtacatgaaacagtattattcaaacatttagtcttctttcttctcctcgaggggcttttcttcccctttgagcagttcctcctccccctcgagaatttcattatttagatcttcaagtaattcgctggtttctagtttgagtgttacattcactggtgtgaaagtctggggggaactcttttttgacttcttgcgttttttgagtactgctttttccaaagtttgttgacgtttggatcctccagtgtataagacgtagaccaagttggccaaggataccacggcagccaggagaacaatgagaggcacggtcaggacatctagggaattggccacgaagaaattttgggctaacgtctcagtttgtgcgaaatgtttaaatagtcgtggttcggcgataagttgttccgcatgccatacagccaattccagggcggattgcggacgggtccggaacttcaactgggcctggtggagagcacttatgaaacgctcctcatccaggattcgcgtaagggcatccgacagggagctttggttaaattccttgacctgaagcatcacacccaagttgcgttccattacacgttgggcattctgcaggataaatatgatttaatataattaatagaaatatcaaatatacactcacattaaattcctctagtttaaggggaagcacgacgacgggcactccatagtgaattgcctcctgaagactgaaactatctccatgattcaggaaccccttgacgtactgcatagctgattgtcataaatagaagtatgtttcttattaattttaaaacgtaaaaattatataaaacctacccaagatgtcttgctgtagtgattgattcacatgaagcgtcaacagatttggtttcttggccggcaactgctctagttgctccacattccaaatgaaggcaacattgggatttccgtgaatcatcgtatacatagccttcaatccctggtcattcatatactcaatatagggcatattgatgtacacaatgccgtcgaagaacttctccgtgaattcttgtatatacgtgggcaaagggctggtctggttcttgatgtggagaccacccacttcgatgactccgggcggaaggttctgaacataatccaaggttggatgggtatttaggagcactaattgtagtttggggaaagcattttccgtcttcattagttcactaagaaccggacgagtgatcactaagtgaatcctagagattaggataatatgatcattggaaaaagtagaagatgatctctgaactcacagtggctctgcatagtacatgatgtggttgtgaagtcggttccagaagcccatagtcttgggaacttggctaatatagtgcggaatccgggccgcatttatcgtgttttccgctcggagtagggacataaggtccggggtgagcttaccagcactcaagccaagaactggcttggaacgccagccggaaaccgaatccattaggcactcaatgccttgggtgacatccgtaatgatcagatcatattccatgctcagttgggcggtcaattccggcctcttgctgctcatggtatccgagttaagtagagcacggcagctgcccaagaggacctcgtaccacaccagcagctgattgagggtaaccatacttatgtactcgcgcggttcctcgaggaggaagtgcctcttcatcacatcgtattcgttgggcagatggtagtacactagaccgtccacttgcttctttggttccggattgggcgctgtactgatgaccagtaggctatgaccattggccaagagggcgtcgaaaaggggctttgaccagccaggattgttgtgcttggccgtgctcaccaagcacaggatatttgccgcctccaaggagcaaaacctgcccaaaagcacgaaaaccgggagtaaacacaaggccctcattgctccaattactatccactactgagtcacctttgtgggttgtttgggtggcatcacccgataagattgaccggttaatgtgtttgtcgtgccgataaggtttcaatcggatttgtttttcctcgatatcagtgggattatggggaatcggtaaaaaaaaaaacgttagcaacggagtgaagttttgggcatagacttactcatgtgagaaattgtttttttttttttatcgcagccataaataaaatacaataactatttataatttaaatacatacgtttttattatcttcaaactgcttaacaataacatttttcgcaatacatggctaaggtttttaggcaacgggtattcattcctcggaaatgaacagctattggccaaaaaaccggctatagttatttttattgatataaattacgctaaggggcagaatggggagttccaagtgatgaacagagtgttttattaatttactttttgttaatatggcaagattaatacgtgaatcgatttctccccaatcacttacacaatctacatttcgtgtgcgacagtgagtacccctaatgaacttattctaagcgctaattgcacagtgtttcgaattataaattatgttacatttggatgtgattaagcattaaattaattaacacagatgtcgttttctttgtgtgtgtgtgtgcgtgcagtaaagaaaaaacaaaaaaacagtgggaccttgagaaaggaaagctttgagcgtggttatatgtacaggttaatcgtaagtcgggggattccccttggttgaggttctacggttagttttggtgcctcgttgagtgagtcgggattcgggatacgtgcagcaccttcattagagtgggtcgatttacccggttggttgggtggactaacttggacaaatctttagaaacttttcctacaaaacctatgggtttagcttcgaaatatcaatttgattaaatactgaatatccatttaaaatttatc

SEQ ID NO: 28379 - DNA, 1752 bp, DROSOPHILA
atgagggccttgtgtttactcccggttttcgtgcttttgggcaggttttgctccttggaggcggcaaatatcctgtgcttggtgagcacggccaagcacaacaatcctggctggtcaaagccccttttcgacgccctcttggccaatggtcatagcctactggtcatcagtacagcgcccaatccggaaccaaagaagcaagtggacggtctagtgtactaccatctgcccaacgaatacgatgtgatgaagaggcacttcctcctcgaggaaccgcgcgagtacataagtatggttaccctcaatcagctgctggtgtggtacgaggtcctcttgggcagctgccgtgctctacttaactcggataccatgagcagcaagaggccggaattgaccgcccaactgagcatggaatatgatctgatcattacggatgtcacccaaggcattgagtgcctaatggattcggtttccggctggcgttccaagccagttcttggcttgagtgctggtaagctcaccccggaccttatgtccctactccgagcggaaaacacgataaatgcggcccggattccgcactatattagccaagttcccaagactatgggcttctggaaccgacttcacaaccacatcatgtactatgcagagccactgattcacttagtgatcactcgtccggttcttagtgaactaatgaagacggaaaatgctttccccaaactacaattagtgctcctaaatacccatccaaccttggattatgttcagaaccttccgcccggagtcatcgaagtgggtggtctccacatcaagaaccagaccagccctttgcccacgtatatacaagaattcacggagaagttcttcgacggcattgtgtacatcaatatgccctatattgagtatatgaatgaccagggattgaaggctatgtatacgatgattcacggaaatcccaatgttgccttcatttggaatgtggagcaactagagcagttgccggccaagaaaccaaatctgttgacgcttcatgtgaatcaatcactacagcaagacatcttggctatgcagtacgtcaaggggttcctgaatcatggagatagtttcagtcttcaggaggcaattcactatggagtgcccgtcgtcgtgcttccccttaaactagaggaatttaataatgcccaacgtgtaatggaacgcaacttgggtgtgatgcttcaggtcaaggaatttaaccaaagctccctgtcggatgcccttacgcgaatcctggatgaggagcgtttcataagtgctctccaccaggcccagttgaagttccggacccgtccgcaatccgccctggaattggctgtatggcatgcggaacaacttatcgccgaaccacgactatttaaacatttcgcacaaactgagacgttagcccaaaatttcttcgtggccaattccctagatgtcctgaccgtgcctctcattgttctcctggctgccgtggtatccttggccaacttggtctacgtcttatacactggaggatccaaacgtcaacaaactttggaaaaagcagtactcaaaaaacgcaagaagtcaaaaaagagttccccccagactttcacaccagtgaatgtaacactcaaactagaaaccagcgaattacttgaagatctaaataatgaaattctcgagggggaggaggaactgctcaaaggggaagaaaagcccctcgaggagaagaaagaagactaa

SEQ ID NO: 28380 - protein, 583 aa, DROSOPHILA
MRALCLLPVFVLLGRFCSLEAANILCLVSTAKHNNPGWSKPLFDALLANGHSLLVISTAPNPEPKKQVDGLVYYHLPNEYDVMKRHFLLEEPREYISMVTLNQLLVWYEVLLGSCRALLNSDTMSSKRPELTAQLSMEYDLIITDVTQGIECLMDSVSGWRSKPVLGLSAGKLTPDLMSLLRAENTINAARIPHYISQVPKTMGFWNRLHNHIMYYAEPLIHLVITRPVLSELMKTENAFPKLQLVLLNTHPTLDYVQNLPPGVIEVGGLHIKNQTSPLPTYIQEFTEKFFDGIVYINMPYIEYMNDQGLKAMYTMIHGNPNVAFIWNVEQLEQLPAKKPNLLTLHVNQSLQQDILAMQYVKGFLNHGDSFSLQEAIHYGVPVVVLPLKLEEFNNAQRVMERNLGVMLQVKEFNQSSLSDALTRILDEERFISALHQAQLKFRTRPQSALELAVWHAEQLIAEPRLFKHFAQTETLAQNFFVANSLDVLTVPLIVLLAAVVSLANLVYVLYTGGSKRQQTLEKAVLKKRKKSKKSSPQTFTPVNVTLKLETSELLEDLNNEILEGEEELLKGEEKPLEEKKED

SEQ ID NO: 28381 - DNA, 2190 bp, DROSOPHILA
caaaatttacgaagaaaaccagatatacattagtatagccatgaatcccttatgttataaacgtgataaacatattaatataaaatatcgtttaaccaaggaggtttgtaagagattgataatacataggaacacaagagttaaaaatgttttaattgccgtataaaaaatatttatggaatccgccattatgttgcaggagtaaagatcggaccatttaaagccatctataaggttatttagcctcagaaactggccttgcgaaaacaatgaattcgcttggctgacttctctgatttctcttttattacggtacctacataagtcgattgttaccttaaaattattatgatatggataattaacttgccacaacgacaagtcgagcaagaatttttaaaacaaccactggatttggcaaaagcaaaattaaattcgataaatttgaagtcacaagacaaatggatataccgtccatttcccactctgcagctttaccatgtttcagagcttgaacaagtaagccctggcaaccacatattcagtataaatttcaaagaaaatagaattgacaaaatataagttacttgaacaacaacaacaacaaaggaaattattgtaaattttataaaactgtcttctttgttggttatatgtagtacctcatctccaggatcataatattgctctaaatagggatgtgcaagagcttcctcgacaggaatccgtttatgcgggttaaatgttaacatttttccaaggagatctaaagccaacgcatcagcatttggaaatagtttcgcccagggtacatttggcttaaatggtaaagattccaaatagttccgtgcctaaagtccgaaaaattgttagcaattttaaactaaaaatatagttttacttgccttttcattaataatacactctaaatcgtcccgggacggtgaacccaatactccaagaatatgattaagttgatccaggtaatggtttccaggaaatattggccgattacttaacatttcagccaaaatgcagccaacggaccatatgtctatagatttggtgtatccttttgagttaagcattatttcaggtgctctataccatcgggtagcaacgtattctgtgagaaagccagtatgatcgtgctcgggatctgcaatacgagccaatccaaagtcgcaaatctataaaataaattaaaccaatataattacgttttcattttgcattccaacccattcattagtctttcattataggaccaatgaaaataaaatttttaatgtaaagtatgtcagaaaaatatgtaaaaggtaagcgttttcacttcatcaggatcactagactagtcgatcttatagtccatatgaacgtcaagaattttagaatcattcttataagattattttaaaagattttactcccgctcttgtcctattgcttgacattaacctgtttcgcctatattgaatattattatttgatttgccaattccaatggataatccaaaaaaaatttgtcagggaacaaaaaaaattgtacaacaacacgttcaatttgtagagcctagtgcgataacgaaggctggtttagtcagcattcaaacacggtgtctgaactataaaatgttgtattatgtatatgttaaatagtaagcaataatcttcaaaaccttcgaaacattccgttctctactagaatattttccactgcccgatacttggataattaaaattctcacctatttatatgcatttatatgtatttaaaaaaaagggtatactataatcgttgaaaagtatgtaatgtaggtatgtatgttgaccgatgttgccacgcccaatctaacgcccacaaaccgcacaatactgccgcgcccacacttccaaaatgttttgattttttttaatttttgtaagtcttttaaatttctatctatctgccaacaaactttttggctattttttcatatttctcctagttttgtaaatttctatcgattcgcaaaaaaactttttgccacccccactcctacgcctacaaacacatttttttcatttaatttcccaatataccagaaaaatgatgaaattttgcgttcgaattcccaatagcagatatcatgtttgcctggaagtagggggggaagaaggcttcaccccttcgaaaaaggctttggtttc

SEQ ID NO: 28382 - DNA, 474 bp, DROSOPHILA
atttgcgactttggattggctcgtattgcagatcccgagcacgatcatactggctttctcacagaatacgttgctacccgatggtatagagcacctgaaataatgcttaactcaaaaggatacaccaaatctatagacatatggtccgttggctgcattttggctgaaatgttaagtaatcggccaatatttcctggaaaccattacctggatcaacttaatcatattcttggagtattgggttcaccgtcccgggacgatttagagtgtattattaatgaaaaggcacggaactatttggaatctttaccatttaagccaaatgtaccctgggcgaaactatttccaaatgctgatgcgttggctttagatctccttggaaaaatgttaacatttaacccgcataaacggattcctgtcgaggaagctcttgcacatccctatttagagcaatattatgatcctggagatgag

SEQ ID NO: 28383 - protein, 158 aa, DROSOPHILA
ICDFGLARIADPEHDHTGFLTEYVATRWYRAPEIMLNSKGYTKSIDIWSVGCILAEMLSNRPIFPGNHYLDQLNHILGVLGSPSRDDLECIINEKARNYLESLPFKPNVPWAKLFPNADALALDLLGKMLTFNPHKRIPVEEALAHPYLEQYYDPGDE

SEQ ID NO: 28384 - DNA, 3230 bp, DROSOPHILA
acaatttagtcggactaaaatgcaacaaaactatataatttgcgtcgcagccataactcgcgaactctgacccctggcacgcgaggtgaaagggcagtgagagtgacaggtggcgcacaaatcagcaatctgcatgcgaatcggtattcacgtgggccagaatgtgaatatgtgaatacgaatgtgagaatgaatacgaaatgaagacgttcgaaacgaccgtccgaggtcagttaacatttttcagggcactacgcatggcaatccatttgaaaaattcgcagaccgttaggcatattacttgccatttccggcggggcgtaaaaattcaaatttgattgcaatgcggcagaaactgaattatagggctaaaatctgggcaaaggccaaatatgcaaaggaaactaaaaataggcatttaaatgcaaaaggccgcgccttttggcgattgcaaattaacgctaataaataagagaaagcgtcctcgatttgtgtggcccacgatttaccaacaattgcattcatttgcatacgcaattatgcgataattgccacaaggttcccagccccaaaatgtatgctacaaataaggaagagtcgatgtgaaaatggaagggcaaaggtggaaggggaaagcctatcccaccattggtttgctatcttatcagttgtccgcaactattgattcattactcggtggcacagtgggtgtggcagcatcaacgatagtgactcatgggtgaactcaaaaaagaaatggtatggcaatccattttgattttttagtaaggaatatatttataaacatacaaaacattattttatattttatttgagacaatatatgtccactgtgctgccgtgtgtttgattacacggtacgcataattgaggtgctcggaatttatgcggcttatcagccatcgatatgcggttagatataattgctttgcaataagcgacctttactgattgctttctttttatctctggccataaattgcagctattgccccacaaaatgctgccaaaccacgcctgagcctcaatctcaatctcaacctgaactagggccagaaccagaacacaactgtgatcatagacataacaacgatagtggtgccggaggaaagccattggaaaccaggagaaccagcgtcacagccaaagatgagggaatccggggacacagccagcagcctgccagaccgcaactgagcgatttatagatcggcagataataccgcgaccggaaaccaaaatcaatttccccggcgatagcaatcggcagaggaaaagggcaggacatcggacaacagagcagcacattcgccaaaaggaggctgtaatgacgacaattgacgcgatgtagcgctgtgtcgacaatcacatcgatgagatccatggacttggcgaaggcatctttcagattgatatgatggaaggagacaatgctgccctcgcgcttggcacgatcgagtgcctcgcgtcgcttgagggccttttcgcggcgcatctgattcttataaaattcagcaaaattgttaacgatgatgggaataggcaaagcgattaccagaacaccgcatatgcaacacacagtaccaataacctttcccagtgcagttgtgggatagatgtccccgtagccaacagttgtcattgtaatacccgcccaccaaaatgtttccggtattgaaacgaattttgtatccttttcatccttttcggcaaaatatgccagcgaagaaaatatgagaacgcccatggccaggaacagcattagtagaccgagttccttatatgagttacgcagcgtaaagcctaacgactgcaggcccgttgagtgacgggccagcttaaggattcgcaggatgcgcatgatgcgaaagacctgcaccacccgacgcacatcctggaactggtccgttgcattcttattcgtttccaatagaaataacgaaacaaagtatgggagtattgccaatagatcgattatgttaaggccgcccttaaagaacttccacttgtccggcgaggcgctaaacctaagtatgtactctagagtgaaccacgtgatacacacggcctcaaccattgccaattgcggattatcctgtggtgtaccgttgtcaatgtgttgtagttgtggtagggtgttcaacgtcagggctatggtagacaggactatgaatagtatggatatcactgcgataacctgcgaacggtaaagaacaatcgagactttgtcgagaccatgattcagcaacgattcaatttcaatgcaatcaaatcacaacgataatagtaggtaggtacgagtatttgtaaggtatttgatatttggttttggtttttatatttgctatatttggtaggcacataacacgatacgttcattccatatcaagtctgtctttaatacacatcaagttttggtttttgggttttaattaattgtaaaacacggtcacaacaatcagcaaatgtcagcgagttctctccacgagagttcactttgattctgtatgactatctatctgctttttaattgggttaagttgaccatctgtgttagagttctggtctcgaatcaagcttcttctgaagattgttagtcgtaactgggtctgttaattttggttgtaactatatcgtttcattgggcaggggttacgcttcatttggggtcttagttggctttcctaaacagttctttgtacttttcaaaggctgctgtactatatgtgaagtatatatttattcgtcgtgaatccttcttcgtaacacaaaccataagtcaaaatcaaaggttggcaacaaacgaaaacacaaaaacataaaacatgggttgggtatcctaggtctcgaagtttcggggtctctagtctagatcaactctttctctggaaggtgtgggtgtaagtggttgaggtggttctgtggttagtggttttcggtggctagtggttggtgtggtgtgcgtgtggttgtggttgtggttcgggtaatagttgtggtgtgggtaactgtaagtgtgtgttcttgttgtggggacagatcacatgacgcaacacaaggacataacacacctacatacttatcagctatacgtgtgtgtgtctgaacggttctaaaatggtatgagggtgaaccagggggggcactccgtcgttaaataagagacgctacccttggggtctgcagtcgacataattgttagattataa

SEQ ID NO: 28385 - DNA, 3441 bp, DROSOPHILA
ttgcagctattgccccacaaaatgctgccaaaccacgcctgagcctcaatctcaatctcaacctgaactagggccagaaccagaacacaactgtgatcatagacataacaacgatagtggtgccggaggaaagccattggaaaccaggagaaccagcgtcacagccaaagatgagggaatccggggacacagccagcagcctgccagaccgcaactgagcgatttatagatcggcagataataccgcgaccggaaaccaaaatcaatttccccggcgatagcaatcggcagaggaaaagggcaggacatcggacaacagagcagcacattcgccaaaaggaggctgtaatgacgacaattgacgcgatgtagcgcagacttatggtcggcgaacgcgacagggaccgtgaggcggtacgctgggcaacgggtgaatcaacaccgcttcaaaccaataatggagtattacaaatggtcgggcaattgcaaggtggacaggctgctggccagcaacagcaacagcaacaagcgactcagcaacagcaacactcgaagcagcagcagcaacagcagcagcagcaacagcagcaactgcaactcaagcagcatcagcagcagcaacaggacatcctgtatcagcaacataacgaggcaattgcaattgcacgcggactgcaggctgcaacacctgccgacatcggcgataatcagccgtactacgatacaagcggtaatgtcgattgggagcgggcgatgggagccggtggagctggtgcatatggtggcatcggcatcggatctctaccagcagctggcggtgctgcttatcaccttgggccagctaatcccgcaggcctcgtttctcgtcacttggattacggtgatggcggccaccttgctggcccatccgccggtcttcctgctggagctgtgggatcaggagcaggagcgggagccggtgcgggagcatcagtcacgggatcaggatcaggagcagggacaggaacaggaaccggagccggatctggatcgggcagtggagcagcaggcaaggaagttcgctacgcccctttcccagtcgcatcaccaacgcactcgattcccacaacctcccagcagatcgttggcagcgtcggtggcgtgggcgtcggtggtgccagcagccagtcgatttcgggcggtgttcccacccacagccagagcaacaccaccggcgctctgcagcggacacattccagatccatgtcctccataccgccgcccgagccgttcatgatagcccagtcgaaggcggtcaacagccgcgtgtccatcaacgtgggcggggtgaggcacgaggtcctgtggaggacgctggagcggctgccccacacgcggctcgggcggctgagggagtgcaccacccacgaggccatcgtggagctgtgcgacgactactcgctggcggacaacgagtacttcttcgaccgacatccgaagagcttcagctccatcctgaacttctatcgcaccggcaagctgcacatcgtcgacgagatgtgcgtgctcgcgtttagtgatgacctggagtactggggcgtcgacgaactgtacctggagtcctgctgccagcacaagtaccaccagcgcaaggagaacgttcacgaggagatgcgtaaggaggccgagtccctgcggcagcgcgacgaggaggaattcggcgaaggtaaatgcgccgagtaccagaagtatctgtgggagctcctcgagaagcctaacactagtttcgccgcccggtaccgttcgcaggttatcgcagtgatatccatactattcatagtcctgtctaccatagccctgacgttgaacaccctaccacaactacaacacattgacaacggtacaccacaggataatccgcaattggcaatggttgaggccgtgtgtatcacgtggttcactctagagtacatacttaggtttagcgcctcgccggacaagtggaagttctttaagggcggccttaacataatcgatctattggcaatactcccatactttgtttcgttatttctattggaaacgaataagaatgcaacggaccagttccaggatgtgcgtcgggtggtgcaggtctttcgcatcatgcgcatcctgcgaatccttaagctggcccgtcactcaacgggcctgcagtcgttaggctttacgctgcgtaactcatataaggaactcggtctactaatgctgttcctggccatgggcgttctcatattttcttcgctggcatattttgccgaaaaggatgaaaaggatacaaaattcgtttcaataccggaaacattttggtgggcgggtattacaatgacaactgttggctacggggacatctatcccacaactgcactgggaaaggttattggtactgtgtgttgcatatgcggtgttctggtaatcgctttgcctattcccatcatcgttaacaattttgctgaattttataagaatcagatgcgccgcgaaaaggccctcaagcgacgcgaggcactcgatcgtgccaagcgcgagggcagcattgtctccttccatcatatcaatctgaaagatgccttcgccaagtccatggatctcatcgatgtgattgtcgacacaggaaagcaaacaaatgtcgtgcatccgaagggtaaaagacaaagcacccccaatataggcaggcagaccctcgatgtgcaaagcgccccaggccacaatctctcgcaaacggacggcaacagcaccgaaggcgagtccaccagcggacgcaatccggccaccaccggaaccggatgctataagaattacgaccacgtagccaacctgcgcaactccaacctgcacaaccgacgcggatccagctctgagcaggatgcagtgccgccctacagcttcgacaatcccaatgcccgccagacctccatgatggccatggagagctatcggcgcgagcaacaggcactgctgcagcaacagcaacagcagcagcaacagatgttgcagatgcaacagattcagcagaaggccccgaacggaaatggaggtgcaaccggaggaggagtggccaacaacctggccatggtggccgcatcaagtgcggcaacagccgtggccaccgccaccaatgccagtaatgccagcaataccgcccccgggtcagagggcgccgagggaggcggtgatggagatgggggcggtgtcgatgacgacaacctttcccaggccaagggactgcccatccagatgatgatcacgcccggggaagtggccgagctgcggcgccaggtggccctggagaacctgcagaaccagcggatggacaacctggagcaggacgtgcccgtggaattcgagtgctgtttctgcacgaccaagggtttgccgggatgccatggcgagtgtattccattgcgcgcgaatagcgtttag

SEQ ID NO: 28386 - protein, 1019 aa, DROSOPHILA
MVGERDRDREAVRWATGESTPLQTNNGVLQMVGQLQGGQAAGQQQQQQQATQQQQHSKQQQQQQQQQQQQLQLKQHQQQQQDILYQQHNEAIAIARGLQAATPADIGDNQPYYDTSGNVDWERAMGAGGAGAYGGIGIGSLPAAGGAAYHLGPANPAGLVSRHLDYGDGGHLAGPSAGLPAGAVGSGAGAGAGAGASVTGSGSGAGTGTGTGAGSGSGSGAAGKEVRYAPFPVASPTHSIPTTSQQIVGSVGGVGVGGASSQSISGGVPTHSQSNTTGALQRTHSRSMSSIPPPEPFMIAQSKAVNSRVSINVGGVRHEVLWRTLERLPHTRLGRLRECTTHEAIVELCDDYSLADNEYFFDRHPKSFSSILNFYRTGKLHIVDEMCVLAFSDDLEYWGVDELYLESCCQHKYHQRKENVHEEMRKEAESLRQRDEEEFGEGKCAEYQKYLWELLEKPNTSFAARYRSQVIAVISILFIVLSTIALTLNTLPQLQHIDNGTPQDNPQLAMVEAVCITWFTLEYILRFSASPDKWKFFKGGLNIIDLLAILPYFVSLFLLETNKNATDQFQDVRRVVQVFRIMRILRILKLARHSTGLQSLGFTLRNSYKELGLLMLFLAMGVLIFSSLAYFAEKDEKDTKFVSIPETFWWAGITMTTVGYGDIYPTTALGKVIGTVCCICGVLVIALPIPIIVNNFAEFYKNQMRREKALKRREALDRAKREGSIVSFHHINLKDAFAKSMDLIDVIVDTGKQTNVVHPKGKRQSTPNIGRQTLDVQSAPGHNLSQTDGNSTEGESTSGRNPATTGTGCYKNYDHVANLRNSNLHNRRGSSSEQDAVPPYSFDNPNARQTSMMAMESYRREQQALLQQQQQQQQQMLQMQQIQQKAPNGNGGATGGGVANNLAMVAASSAATAVATATNASNASNTAPGSEGAEGGGDGDGGGVDDDNLSQAKGLPIQMMITPGEVAELRRQVALENLQNQRMDNLEQDVPVEFECCFCTTKGLPGCHGECIPLRANSV

SEQ ID NO: 28387 - DNA, 2542 bp, DROSOPHILA
atgaaacgtgaggctacagtaaaacttctctaaaagcaactatatctccttaaaattaaacatatttcaatatatagagacgatgtatctttaaaatttagcttgcactgtgagtgaactttaggattaacgaatgtttgagcagctgtgctcagcaattcaattcaattcgagtgttattttaacctttaagcttcagctttttttgaccccacacggcgtatgagcaatgtgtcacttttggacagctcacctgaacaatctgagcgatccgcgacagctgcctaattaaaattatcgaagattccgcagcttcgtcgccgtctgccagcgctttttgagtgcagccaacggggcggattgtcgatcggtaaaaatagctcatacgcaatgtgggcacacgaacgcactggcacttctttcttgtcatctcatgtgcagccgggttgaatgactcgcgactaaatataacacttgccgtttgccccggtttatgtaatagccattcaagtgttgatctaagccaatgcaggcgacatcggaattggatgtttttgagatcgcttcgccctgctcattaggcgcattgataaacagataaacagatatggggaaacgtgtttggtcaagtgtttttttttttctattcatacgcttctgatggcacagttctttctgtagaaaaacgcatacactcattgaaaaatcgccgcgccagaagatctacattttatgccggctgtagccgtccgttgacaaagagcgaacgagcatcgaaatcgatgaaaataaatcaaaaaaaaaaaaaaaaagaaaaaaacgcagatgaacaaatggcaatcccagaacgaggcgagatttcaaaatttttggttcaaaaaaaaaaaaataaaactggcaagagcgggaataccgctctcaacttttctctcgccaacttgtttttggctttcgcttttttttggcagcattttgatcgttggagcgccgtagaatactcaatattgtttgggattccgtggcgagacgatcgttgaaaaagtcgcgcgcgctgctaaaataaattcaagcgctatattattaggcaaacaaaaaggaacacacatcattataatccccttaaaagttaagatataaatacgcaggcgacgaggggaaatacgaaatacaaagtaaacacattttattgctggataattttactgtgcccagtgacaagagtgctaacacatttaatacacattcaagtgctggcaaatagagccgaaactgggccaaagttgatttgaaaccaaatattactcatacgccaccggcaccgcattcattcccccacctaagctatcacttcttgaatgagcccaatgagcggactgcgccaacagctaaagctaaatgcggctatcaagtcctcggtgacatcatcggcctcgtccaccggcttgctgtccttgctgtcctcatgtgaatgctgctcgtcccgcagcgcctggatcctgcccacccattgcaggaactcggcctcgttgattaagccattgcctgcgaatcggaagagaagaggatgtgaggttgagaaataagaaagttgtattgcaaggacaactcgtgaatatcctgacggcaagcaagtgcaacagtagctccagtaattgaaagcactcgcaaaaagaaagccagaaagttgcagtactcagcaaatcagttagccatggaatccccatccatttaaatggtattttccaagtctgaaattcgtcaaatgcatacccaaaagataaacattttccgtgcaagcgctgctggaaacctttttccacaaaacacttttcgcagctggaacaaaaaaaaatgcattttcattgttgggaagtgttcacacgcctcaatccctggcaacgaggacatcctttgttggcaggatatgctcggcaggcttcctactgcgccaatcccagtgcgcccaggtggtggcattgtcagagacatttccggctgagatctcgccgaccattaacattcacaagaaaaataacaacagcaaatggatagcaggaaaataggaaaacgaaaaatcaaaatcaaagccaaagtcaagggaaaatcctaagccgaatgctgcaagtgagcgctctcagtgggaacggctcaactttttctgccgctgaaacttttataattaaacgcaaaagatactgcgtgcggaaaaccttttgcgctctgctttccggccttgaccttcaccatgataataacaaaaaaaaatataataaaaatataaggagaaaaacaagtgtgaatggcaaagaaagcgaagttgaaatctctgatagtccacgctcgcataaattttggtggcgaatgccaagggacatcaaaaaaataaaaagaggagcgggtggtatatcatttgctttttttatctctaattgcaatttgtttgagcaaaccgcagccataattagaattgctaatttatttgccagttaaaagcaaaaaaataaactaggacgatgtatatataatcctattaaatcaaatg

SEQ ID NO: 28388 - DNA, 2863 bp, DROSOPHILA
aatattgtttgggattccgtggcgagacgatcgttgaaaaagtcgcgcgcgctgctaaaataaattcaagcgctatattattaggcaaacaaaaaggaacacacatcattataatccccttaaaagttaagatataaatacgcaggcgacgaggggaaatacgaaatacaaagtaaacacattttattgctggataattttactgtgcccagtgacaagagtgctaacacatttaatacacattcaagtgctggcaaatagagccgaaactgggccaaagttgatttgaaaccaaatattactcatacgccaccggcaccgcattcattcccccacctaagctatcacttcttgaatgagcccaatgagcggactgcgccaacagctaaagatgctgggtacagcattgctgggcaaacgggccaccaagtctgtcaaaaagaaaccatttacggaggtggaaatcaaagatctacgcacagcattcgatctactagacagaaatcgcgacggtcgcgtcaccgccaacgagctgcagtttatgctaaagaacctgggcataaacgtgagtgacgaactcatacacgatctcatacgtgaggcgagccactcaggcaatggcttaatcaacgaggccgagttcctgcaatgggtgggcaggatccaggcgctgcgggacgagcagcattcacatgaggacagcaaggacagcaagccggtggacgaggccgatgatgtcaccgaggacttgatagccgcatttagagtattcgatcgggatggcaatgggttcataacgcgcgacgagctgcagaccgccatggagatgattggggagcccttgaacgagcagcagctggagcagctgctggtcatcgcggacttggaccaggacgggcgcatcaattacgaggaattcacgagacttttgctctaagcagattaacgcccatcaaggaggcatggtcaaccccaaaaccctggaaatttcgagcggattgcagcccgagttgccccttcagcataattgttaagctattaagaatatactcagacatgcagaaaataataatgcaacaaaatgtgcagagcgtaattgtttgaaattttatacaacaataaatttatttatacaagggtatgaaaaaagtgcaaggcaggccacacacacatacacacccataacgttttagtttcatcacacacacacacaacatattcatacatatgtaaattagtttcaaagttttgtcgattgtaaaaagtggaattattcattttccatataatgcaagtgaaattttcatgtggaaaatgaaagtgaaaagtttagactaatttgtgtagacattttgcgacggaaatgatttaaatcactcagagacacacacaaaacatttacatttaacatataaaatgcatattcggataagtctgagcgcgtgagtgatattgtgtttaggatgctgcgaaaatgaagagcagacaacatttggagaaattacaaataaaaatttaattaaaatatatccagattcgaagaaggtcggcatgtggattcatatatttgtattttattgtagttatgctgctttcgatgtatgcgcgtttcaaataccccaaaaaacaaacaaaaattgtttcaaatttgttagaataagaaaataaatgttaacaatttatataagaaaccaaaacatttaatttcagttgggaagttactcgatagagctgcaaaaaacatcgatatttaaatgaatttatgaactacttaaatatgaatattatttacataactgatacaaatttgtaagtggaatccaaatttatagtcacgatgttttttcagctctattacatagaacttaaaacaaaatacgaacagcaacaactatattgaaagttaatgaaaatataattaaacattaactaacaaccagagaagaacatttcagagttctaggatttaaaagtttaaagacaagtaattttttttttttttttgaattattgtttgttttcggttcctttttgattgattttccaaattcagtccattgcatattgccgtcccatagataattcagcaaaaaatatcaattgatttttataacaattacaactcatcgatttgaggtatcgtggtttcaaataataagttttaattagtttatcgcccttttttgatacaaatttagaaaagttaaaaacgaaaaccataaaatacaatttaaacaatttatatatataaaaaagtgctcttttgaaaaatcagtgaaacgagaattaaaatatatatatatttacatacatttaaaatactatatggataaaagttgcgtggagtaaatataatcaggtcaaaggtacaaatagcaaaattgggtaaacacaaggaaagcaaataaaaaaccacaacttttgtatggtatttacaacaggactgcaaaggcaaagcaagtttaaacctaatcaaaaatcgaagaccgaatcaaattaaactctagcccaaaacattgaatatacctgatatataatgtatgtatgtacttcgatgcaagtagttttttatgacctcttaatgtgcttaccaactatatgcaggactatatacctacccaacaatattactacttatatacacgattactgtttatgttaatgatcaaactacatacttaatattatcttctatatgtatagatactggaaaaacacacacaagaactaagacactatctgtatgcgtacctaaagtggtagataattggaataggtattaaagatttcataatttataaatgcgatttcgattcggaaaacgagatgtggcataataaataaaaacggtacacgaacgctc

SEQ ID NO: 28389 - protein, 193 aa, DROSOPHILA
MSPMSGLRQQLKMLGTALLGKRATKSVKKKPFTEVEIKDLRTAFDLLDRNRDGRVTANELQFMLKNLGINVSDELIHDLIREASHSGNGLINEAEFLQWVGRIQALRDEQHSHEDSKDSKPVDEADDVTEDLIAAFRVFDRDGNGFITRDELQTAMEMIGEPLNEQQLEQLLVIADLDQDGRINYEEFTRLLL

SEQ ID NO: 28390 - DNA, 3095 bp, DROSOPHILA
aaacgaaagtgcaaaagaccaaaaataaaataaagcagaactcagctcaattgcagcaaatttgcgcctggcgaaaaaaggaattggggaatggggcgcagcacgagaaaaataaatatttttaccacaaaagccaatttgcccgcacaaatttaaacttcgctcgaggatgtacataatttttggtgcctttttatgaacttccaaaaagagtccttcaactttgttgacagtttaaacgatcttgcgttttatagattcatctcctgccttacatcagctctatatatgatattaatatgattttggcaaaatataataatttaataaaaaatttgtgttcaacttttaatagtttagtataacttactagagggtatgcaacacttcgctttattgttttttcactttcagccgtctttaaagttttagcacctttttgcagctgcttattctattatttagttatttatcaatgttctgactttagtctgggctgggcttgggtcctatggtccaatcccaatgggatcggcacgcacagcggcccacaagccaccatcccccatccagagagacgtctgaaatcgagcgtaggtgtctgcggttgtagctgtttgcatgagcattttttgatttagtggcaatttcgtgtggcaaaaattgccgtgtgccccaagggtagacttgaaaacaagcggattacaggcagagcgagtggaggagctaacaagatgaaaactggaacaataagcagtaaaacacctcagagaaatcggcatgtaagtggtgatcgctgggcacagatcattcattatccttcaccaagaggtgatgccagcggggaatatcagttggcctatctatggccttatagtttgcatcatagagcttgaataactaacttaatttacctttttttttaattaaaaagcaagagcatttagttgagtggcctttatttgcaatacaaaaaatttgacgaagaaataaatcaatttcaaatcaacttattggcctcctccacctcgggatctgcttctgctgctccatttgcagtggtgttctcttggtctccctgctcggtggtttccataggggaagctggttccccagcagcttctggttgggcacaggagcaggcatccctggtgttctccgcaatccaatcattgaagctgcccactcgtgtataaacgcccggggcattcggcttggcacatccttcgccccaggacacgattcctgccagctggtaagcgtcgccggaacccagtacatgcatgggtccaccgctgtctccttggcaggagtccttgccaccttgctccacgtagccggcacagatcatgttgtcggtaatcttggactcgccgtagttgctattgcggcactcttcttggctgaggatgggcacttccacctcctggagggtatcagaaattggtccgccctcactcagagctccccatccggtgaccacggcagtttgacccgcataattttcgctcggagtgggcatgcatactggatgcatatcgatgccaagacgaactggttcattgaaacgaatcaaagcaatgtcactgtcaaagttcctggtgctgtacttcgggtggatgagcaccctggaaacccggcgatccacgatcttgacgtggctatcctgacgattatgctccagcaatcggaccgtgatcaaacgatggtagaagccatttacacaatgggcagcggttaaggcatactgatcgttaaccaaagaagcgccgcaatagaaattaccgaaccacatgagcattatcatccagggatactcatggacctccgtctcctgacctccgacgatgcgatgacgagtattgatattaccacaggagcactctgcgcactcccttttggccggagagctccattcggctggcacctcgggtcccaggatcgattgaatccagtccagaaagctactctgccttagttgagctagattgtttaagatcttctcaggatcggaggcggaacgcagagagggcgtggcacaagccaaatcgcccagtgctgtggcaagaatcagcagaagatgaaaattacacatggtgtactaacctggccaactggcaattggcaactaaccaaatggatcctggccacatccagcaagaagactgatgagaaccagaagtgctagccaagccaaagaactggctagaccagaatcaccaaaggaaaccggctcccgagaaaggttagcgcactttatggaaacttttcttttaatcaataaatataaaacagcttgaaaatgggatcttcgacgaagccgaagttgacttactcttgcaagggtggcaaaaagttttggagcatatatcccaagaaattgcatagttattttcggcgaaaatagttcgtttcttggcatatgagattagtgattttggaaataacaagctttttgtaatgaaaacttgtctttcacattggatggaagatacaaattctgatataatattaaacattgccagccaagcaagagtattgaactattaatagatacagaaatagccagatgttcgctacttgatcttcttggtctcctgctggcagaggcaagcctgtttggtgaggttcttgatccaggttccgtagcgattcactctggcatagacgccaggataaccggccttggcacagccctcgccccacgagacaacgccggcgatctgatgctctcgcgttccgctggccacgatgtgcaaaggacctccactgtcgccctggcacgagtccttgccaccctcgtcgtatccgccacacagcatgttatccgtgatcttgttgccatagcgactcttgcgacattcgtcctgcgatagaattggcacttgaacctcctgcagaaaataatattcagatatatttatattgcattttatactccaatcttaaattggctaacctgaagagtatcggaagtgggtccaccaactttgagcgctccccagccagtgacaatgccattctcgcccttgaaacttctgcccggcgttggcatacaaacgggatggagcacctcgttgaactccaccggctca

SEQ ID NO: 28391 - DNA, 1095 bp, DROSOPHILA
atgtgtaattttcatcttctgctgattcttgccacagcactgggcgatttggcttgtgccacgccctctctgcgttccgcctccgatcctgagaagatcttaaacaatctagctcaactaaggcagagtagctttctggactggattcaatcgatcctgggacccgaggtgccagccgaatggagctctccggccaaaagggagtgcgcagagtgctcctgtggtaatatcaatactcgtcatcgcatcgtcggaggtcaggagacggaggtccatgagtatccctggatgataatgctcatgtggttcggtaatttctattgcggcgcttctttggttaacgatcagtatgccttaaccgctgcccattgtgtaaatggcttctaccatcgtttgatcacggtccgattgctggagcataatcgtcaggatagccacgtcaagatcgtggatcgccgggtttccagggtgctcatccacccgaagtacagcaccaggaactttgacagtgacattgctttgattcgtttcaatgaaccagttcgtcttggcatcgatatgcatccagtatgcatgcccactccgagcgaaaattatgcgggtcaaactgccgtggtcaccggatggggagctctgagtgagggcggaccaatttctgataccctccaggaggtggaagtgcccatcctcagccaagaagagtgccgcaatagcaactacggcgagtccaagattaccgacaacatgatctgtgccggctacgtggagcaaggtggcaaggactcctgccaaggagacagcggtggacccatgcatgtactgggttccggcgacgcttaccagctggcaggaatcgtgtcctggggcgaaggatgtgccaagccgaatgccccgggcgtttatacacgagtgggcagcttcaatgattggattgcggagaacaccagggatgcctgctcctgtgcccaaccagaagctgctggggaaccagcttcccctatggaaaccaccgagcagggagaccaagagaacaccactgcaaatggagcagcagaagcagatcccgaggtggaggaggccaataagttgatttga

SEQ ID NO: 28392 - protein, 364 aa, DROSOPHILA
MCNFHLLLILATALGDLACATPSLRSASDPEKILNNLAQLRQSSFLDWIQSILGPEVPAEWSSPAKRECAECSCGNINTRHRIVGGQETEVHEYPWMIMLMWFGNFYCGASLVNDQYALTAAHCVNGFYHRLITVRLLEHNRQDSHVKIVDRRVSRVLIHPKYSTRNFDSDIALIRFNEPVRLGIDMHPVCMPTPSENYAGQTAVVTGWGALSEGGPISDTLQEVEVPILSQEECRNSNYGESKITDNMICAGYVEQGGKDSCQGDSGGPMHVLGSGDAYQLAGIVSWGEGCAKPNAPGVYTRVGSFNDWIAENTRDACSCAQPEAAGEPASPMETTEQGDQENTTANGAAEADPEVEEANKLI

SEQ ID NO: 28393 - DNA, 5624 bp, DROSOPHILA
aattggacaaactagacacaggaacggtattcccttgcagttttattggtagtaaagttccagattcatgccatcgtgaatttcatctaagaaagcgaaaaagaaatgcgggtaaagcaaggcgttacaaggacactaaacaagggcttacagtcagataggcgaatcgggtccttgaagattgtgtaccacttcttcaggacaatcttctcgtgctttgtgcccgtttgtgccgcgattagtttcttgaggtccccaatcgtgtcgtccgggttgcacttgacgcgcacctgtgggttaatcgttggttaacgatgcttgcagttgccttgggtacttagctgcttaccttcttgccaagacgatcgttacacgttatttctatcatattttatggctttgctagacaaatcacaacaataaattcttgatttgttgtggtattattgcttagggttgtcaaataccctttaccgaataccgagtggtttgagggatcgctaattgtccgcaatgctatcgatattttatttaattttaaatatgtttaaataacaatcatatagaaagtcgaagttaaagatatcagaagtctgaaagtatacttagaaagctcaattgcttgtcatgacgcaaatctatcacatccttgtaaaacgataatatttgttaacaaatttatatttaaatttcagtcttcttcttagttatcaagccagaagtcgaatgtttcggcgttaatagaaaaataatgtatgtttgcatatttgcacacctcattcaaattatttttctttgttgaacaaaagataaaagtgtaaaaattaaattttttattcttgacccattatttctcttggttaatgaaaacaaattccgtttctcaacgttccctttaataatccatgtgaacaatcgataggcggcgaaacatcgatgattgctagaataatcgatgtgtcttccccgttcattcgaattttttcgccgctcggaatagacgtgattttgccgtcgtgacggtggaggctatttttaaaacggtcgcggcgcttgcaaacaaaattcatatccagctattcaacggaggaattcattagtacggcagtacaagaaatattactaagtatgtcacatatttgcgggcaaactgccgaaagcactgtgcggagtttttgtttgtgtgcgtgcgtgcctcatttttacattcacgtacatacatatgtacatatatgtacgctatgacgcagctgtggaaaacttgtttgggtttccatttcaccgaatcacggaatcaacgaatatttgcgcctgtgctgcgaactcattttgggcagtaagccattgtattgattatcgcgcgttgtttgtggatggcgtggtccgccggagcaccctgtagcgtctacatccctaccccgctccctggagtccgatatctgtgcgcgaaaggccgggcgggcgtcgttttcggctatgtggcccaacaccaatggatccccacggtcactggcagcaattcgcgatccgaaatgctccgccctatttttagacgcggtctttgcggcctgcctacttacctacctccccaatgcattctaattaaaaaccgggcactgcgctcatttccacacgcattgcattgcataatgcggcattaatgtggcggggaaagctcgcttcggaaagcactcgagcattgaagtgaagagaccgaatgttttccagctgcccaattgtaaacaacccacgcctagcacgcacacacacgcacacgcacacacacacagactggttttaatgtttactccaaataaatcgttgcccatgttaattatttgtgtcttcgcagggcccgagcactggagggaatctaatcatgagcgaaaatacataccagatagaaacgcgtcggcggtcgcgttccaagacccccttcctgagatcgagctgcgaccatgagaactgtgagcacgccggagaggaggggcatgtgcaccacctcaaaaggaaatcggcggcccccaatgtgcagtaagtatctgggatactcccgaaataggcctacggacgaagccctttatcgcgaacccataacattatttttagcccttataagtagtaaaattgtaagcatacaatatgtttacggagttcgagtcaatttcattttgagaattaggagaattcagtttaaactctataattatttcctatttggtcctgagtcacctttttctatactgaccattggtttcagtaagcaagttggactgtagtaagacacatccatagcgactgtatgtttgtatgccgtgtgctgccgccatgacgtcacctttttgttattcacgctcgccgcgaatttgaatttcgaagcgggtagaaaacgaaggcaaagccgcatacagggtgcagcatctggtcgagcttcgttagtttttggcgcctatttcgagagcgcctggtcggtctgatgatcagtcttcaagactcgatgacgacattcggagtccaacgtcggccgtcagaaatcgttttcacgttttagcctctaaatcgagcatgctggggtgggctaacagtcgtttgcgctgaaggccagcggcggttataagcatatttttgtgtttttgttttgatacgttgtactcgtcgtttcaaacgattccgagcacgttatcacggacttactgaaatatttttcccaaatcttacctcttctctgcagaacgataatagaggagcatatagtggagtcgagtatcagtaagaaaacccgggcaaaagcgttcgcccagctgacctcggactattcgagcgacgacatgactccggatgccaaacgcaaacagaactcgatcacggccacagtcacgtcgattctcaccaagcgatccggcggcgccacatcgacaccgcggaacagaagccagctggagaccacacaaaacacgctgaattccgcccaggaaaagctaaaccaatcgaacggtaacctcagctcgggaaatgtcagcgattatctggcctacatcgagtacagggatgctggtgaatactggaagtgagtgaatcatttctacacattttaaacagtatactaatgatgctattttgcagcaaaactcccaagacggactatacctactcagaactgtcccctcaccgacgccagttggcgccaggaattgtggccatgcccaatatgtccagaaagagcctagagaaccataacgatcgagtcaactacatggtccagcagaaccctgcgcaagaggagttcatccgccgccgctaccagtccaagtatacccagcaggttaactatgactccgcagatgaactggacgccacatttgggcagcaaaagcagagctggtggcttatccgcctcatccaactggttgttagcagcattaccaccgtgtggagtcgggtgaccaatctctcggccacggagacgactgcctatcaaaactaccacgctaagcgccagcagagtcaacaagttggactttggtggaaaatagtacagaccatcggaggaggacttgcaagtttgctgcgctacctgtatgttttcatcggatcggtgctgagtttggacacgtggttgctgcgatcctcggatgcggaaaacaagtcgaaaaagcgcttcctcatatttctgctgattttgttgcccttgctgctgctgtcgggtgagtaggatttaaagcaccgtccgatttttgatgtaaagtaaaatatgttagagcgtgtgccgtgaccttgtaccggttcgagaattcatactacatgcatatagatcacctccagtcgttgtatttataaactcgtctggtcgttggcagtcgcgtgacgccatcgataatttgttagtaaaatcccgcggatcagatttaagtggccatgtgatgacatattttattttccattcaccgtctgccaaggttaaacgcctaatttgctttgcctttgcaggtctgttctattacatacaccccaatgaaactttcccacccaaatccctgtccgaatacacattcaccctacctgagttgcccaaaatcgatgtgaaagactacctgaaccaggagcagttcgaatcgctacgctctcaggccgccgagcatgcggtccgcgttcgcgattgggccgacgactacgttttgtacttgagaaccatcggtcagaacgtggtcaacaagggtcgtcagttatttcagggcgatgataaagtctattatgagcgtgtgtagggaacatctgcaatgggcaggctacagctaccagatttagtgatctggttgggtgcaacgccccttgcacttagacaaatatgagaaactttctttatgaacaatatgagtacaaaataaagcatttgatccgttttttgtccgtctgcttgacccgcagttttgcgcacttactttatagtttttcgtcccgtcatttacccacttcataggcaaacccacctctcataccccaccatactaaccgacacaattcccaacaaaatgcaacatcacaggctgatgggagaaggatagagctcgccgctgttcaaattgtaaaactttcgtaatcgttaacttcattcttgtccaacaattagggccgttatccgtctgggttagtgccctaactaaatcttacttgttgttaaacaacgtttaattgtaatttgtgcactgtttgctttgtaatagtctatacaaaaataaatcgcaaacaatttcatatgaaacatcaagtacaaagaagagttgtttgttttatttgccatttgttggaagttcgctaaatggtaagtaagatgtaaacaaagcaatattagttggccagaatcgaactctatccttctgcatttgtgttggaataaccccaaaaacgagttccctgttacctcagtccggttgataattgaagttggtagggactgtaaatgtagaaggattgccaactaatagtgctatgtttaattttctccttccccaggatggttgctcttgcaggaggatcaacgtagtgcttacgttcagcgtgcggaagcactgttgccgctgccactatctattttcggctccctacgtagtcgattttcaaatgctggagccaccttgaaaagttggatggaagtgcccaccgtcaggagtccccagcgggaagccgaggccattaaggtaaacatggccagcattgaacagaacatccagaaagccttgactgccgaggaatacgaaaatatcttaaaccatgtaaacagctacgtgcagcagttggtcgagctgaaaatgcagcagcattccaaggagctcgcaccgcaacagattgaactctttgttaagctgatgaaggaaaacctcaagcagattatgtacaaaacggagctaagcgaaaaggatttgtctgatctggccataaaactgaaactggagctgcaaagctcaggcggttggcaagatggagcgaaactatcacaagctaacttagaggagataaccaagctaattaaagcagaggttcacctccacgaatcgcactacaccattcaattggacaggatagactttgcatccctgctggagcgtattcttgctgcgccagcattg

SEQ ID NO: 28394 - DNA, 1439 bp, DROSOPHILA
acgtgattttgccgtcgtgacggtggaggctatttttaaaacggtcgcggcgcttgcaaacaaaattcatatccagctattcaacggaggaattcattagtacggcagtacaagaaatattactaagaaaagctaaaccaatcgaacggtaacctcagctcgggaaatgtcagcgattatctggcctacatcgagtacagggatgctggtgaatactggaacaaaactcccaagacggactatacctactcagaactgtcccctcaccgacgccagttggcgccaggaattgtggccatgcccaatatgtccagaaagagcctagagaaccataacgatcgagtcaactacatggtccagcagaaccctgcgcaagaggagttcatccgccgccgctaccagtccaagtatacccagcaggttaactatgactccgcagatgaactggacgccacatttgggcagcaaaagcagagctggtggcttatccgcctcatccaactggttgttagcagcattaccaccgtgtggagtcgggtgaccaatctctcggccacggagacgactgcctatcaaaactaccacgctaagcgccagcagagtcaacaagttggactttggtggaaaatagtacagaccatcggaggaggacttgcaagtttgctgcgctacctgtatgttttcatcggatcggtgctgagtttggacacgtggttgctgcgatcctcggatgcggaaaacaagtcgaaaaagcgcttcctcatatttctgctgattttgttgcccttgctgctgctgtcgggtctgttctattacatacaccccaatgaaactttcccacccaaatccctgtccgaatacacattcaccctacctgagttgcccaaaatcgatgtgaaagactacctgaaccaggagcagttcgaatcgctacgctctcaggccgccgagcatgcggtccgcgttcgcgattgggccgacgactacgttttgtacttgagaaccatcggtcagaacgtggtcaacaagggtcgtcagttatttcagggcgatgataaagtctattatgagcgtgtgtagggaacatctgcaatgggcaggctacagctaccagatttagtgatctggttgggtgcaacgccccttgcacttagacaaatatgagaaactttctttatgaacaatatgagtacaaaataaagcatttgatccgttttttgtccgtctgcttgacccgcagttttgcgcacttactttatagtttttcgtcccgtcatttacccacttcataggcaaacccacctctcataccccaccatactaaccgacacaattcccaacaaaatgcaacatcacaggctgatgggagaaggatagagctcgccgctgttcaaattgtaaaactttcgtaatcgttaacttcattcttgtccaacaat

SEQ ID NO: 28395 - protein, 260 aa, DROSOPHILA
MPNMSRKSLENHNDRVNYMVQQNPAQEEFIRRRYQSKYTQQVNYDSADELDATFGQQKQSWWLIRLIQLVVSSITTVWSRVTNLSATETTAYQNYHAKRQQSQQVGLWWKIVQTIGGGLASLLRYLYVFIGSVLSLDTWLLRSSDAENKSKKRFLIFLLILLPLLLLSGLFYYIHPNETFPPKSLSEYTFTLPELPKIDVKDYLNQEQFESLRSQAAEHAVRVRDWADDYVLYLRTIGQNVVNKGRQLFQGDDKVYYERV

SEQ ID NO: 28396 - DNA, 20460 bp, DROSOPHILA; identical to SEQ ID NO: 23665

SEQ ID NO: 28397 - DNA, 1954 bp, DROSOPHILA
ccgcgttcagttgtccggctagaaaagcggaagaccgggaaatccagacgcgctacagacgcccgatatctgctcccactctcagcgcaagatcgcgggaaatcaggaagctccgaaaacatcggataaccgtttttatttttattcccctttggttcgttctcgcctccgtttcttctgttgcttctgttacttctgttttcgtgtcttaagtttcggagcccttcgccgatttccagcaattagttactacatcatatatgttctgtgttatcaaaaacgcgagcgaaagaagcgctctatctgcgattgtaaagacaaacaccacaagaaagtagctgtgtgcccctcgggcaaatgaaccgaaattaaaggagattacaaacatcgctatcaagcaaatgtagagactgttagtccggcgaacaaaggctagcaacatctgaggagcacaagcacgtgcagagtggaagggtcgccagctcaaaacgacaaatgaaaaccaaaaaccagaccaacatcatctgctccaactgccaatgctttagccactcgaatcggggaatagccatcaccgacgagaagaacgtcctgcggatccagagctacacctacaagtgcttgaaccacaatccgcgacctcggatattccgctgatagtgatacacacgtcgcatccacatccaactcgactcgatccctccgccagactcatgtactacgccgtcgattactacgcggatatgggacaaatctctcaagatcgcactctattttccgtttgctattcccaacatttatttcgctgccaaactggcccaaaacaatagccattgattgggccaatgaagaacatggcctgctgtgaatgcgagcatacggctctaagctgctgcccgccatcagtgtccgtatctggtgaagcgctacgagaaggagttcatcaaccagggcggcgatagtgcctggctgggcggcctggactttatacccgccaaactacgtgccatatacgatatcaataaaatattagcccatcggccctggctgctgcgcaaggagcatatcgaggggaagaacagctggtcgctgtcggaggtggtgcacgccatggtcctgctctcgcacttccactcgctgtcctcctttgtgttctcctgcggcctcacacaaaagctggacgggctgtccagtcccaagctgaagagtccgcccgcagcagtggcggccctcgcacccaccattctcatcactcccacctcgccgacggagccgcagaaggggaagccagtgctggcggagatctcgctcaacaatgcaaatccggattacgacagccagaccgcagcgagcagtaatggaggagctccaccggactcggcaaatgcggcggagctgagcagccgcttccagaaggtggagcagcagacggcggagctggcggccgtgactccggaggcggctgtgggcgtgcccaccaacctgtcgcactacgtggacgatgccaacttcatttaccaggactttgcccggcgcggcaccgagagcatcaacacgtttcgcatccaggactactcttgggaggatcacggctactcgctagtggacggattgtacaacgatgtgggcatcttcttggacgccaagtttcgggcggcctacaatctcacctactgcaccatgggcggcatcaagaatgtggacacgtccaagttccggcgggccatttggaactacatccagtgcatctacggcattcgccacgacgactacgactatggcgaagtgaaccaggtaagaaatcaattatgatggtcattcactttcaaagatgtctgcaacattgtgaaacaggcaactttatagtcgaatgccttgaagagcacttgtgccattgagttcttggccgttccaagtattttccatattttccaattaactttataaacattcc

SEQ ID NO: 28398 - protein, 233 aa, DROSOPHILA
MVLLSHFHSLSSFVFSCGLTQKLDGLSSPKLKSPPAAVAALAPTILITPTSPTEPQKGKPVLAEISLNNANPDYDSQTAASSNGGAPPDSANAAELSSRFQKVEQQTAELAAVTPEAAVGVPTNLSHYVDDANFIYQDFARRGTESINTFRIQDYSWEDHGYSLVDGLYNDVGIFLDAKFRAAYNLTYCTMGGIKNVDTSKFRRAIWNYIQCIYGIRHDDYDYGEVNQVRNQL

SEQ ID NO: 28399 - DNA, 5068 bp, DROSOPHILA
aacacaagttttaaattgaatatttaaatgaattccctttgatattcgttaattcaagttacgctccccaatgatcgttgccattatcataaggtgaactacttccgccgctccaggcacagcatccattgccattttgacccacggagctctcccgcagcatggcctgcaggtgattaatgtagttgatggcaatcctgggtaggcaaagatcatataaatatattacagagctctaccgcagatactttcacttacctcaaactctcgattttggagtactttttcccatttggcttggatatgggtagcttggagcgcagtaagtcaaaggctcggttcatgtcccgcatcctggttctttcccgatcgcaggcggtgcgtctatagtccttctccatttgcagcgccttctcccgccaggcgggattgtgctctttggcgatgtccacctcagtgctattggctatactaccgccgctatagctcatatacatgggcggaggtaccagctcactgggtttgttgcattccaagcccactggcgaaccggtggccacctggccagcatgccacatcgacaccggctgaggtataacgctatatgtgggtggcaacagacccatattgtgcgcttccttctcgtagccacccatcacgctgggtgagtagctatgcggatgagttggcgcatatgccagcaagcctgctccatccgcggttagggtgtagttgagactaactgccggacaactggacgattgaggggcaccgagctctagaagaacgggctgttccgatgattccgcctcgccctcggatccaccgctcaaatagggtccaccggtggtggctgatacgggcaccaaaactggcggtggatcacccggtacgccggccgtggagctcagcagttgatccgtcatcgcttaagccgcttttcgaatgaccgatcaagagttctggccggactgcagcaggtttacctggactcggttggtttttttttttttagcttgtacctttttgttttgcttacttttagttgcattagagacgactctggcgatcgtgatgaatggctcaccatcgatccatcgattcgagacgtgactactcatccggggttgatgagggccacatctcgtctagtttaagaggccaccgctttgtacgtgtgtcaacaggtgatctataggggaccaacttgtcgtcgagggtccttttgtcccatccaatcgctgtgcaaacaaagcggcttaatttcctcgctattgtccgatcgatccgactccgacggctgcgaatggtgatcgaggcgcgtgtggcaggctggagttgcgtccgacttatgtcggatccctctctgggatcagcgatcgacgatcgtcgccacaacttcagtttgagtttttctttttgatcgtcgctatgtacaaacacccacactggaactcagcccatatgaaagagtgtattttcgacgcatgtaaacacaagtgttttgacttaattaaaaaatacacacatatgcatatagctagttatgaatataggttcgtctatatgaaggtaagaaacctaagcttggccaatctagctccaaacttcgcccaattctaatttcaaactaatttggtttctctctagtcaatgaaaaaccgtgatcgccagctaagtgctcttataatcctattaaaaattatattacatattctatacctatttttatgatttttcttaattgaaatagatacttgcttaaaagactgagatattgagcacagtttccattattactacatatcttctttaattaatagtaattaactagcaaattatttttttcttccgaaaattcagaattcctgaaactataaaccgcaaggaaaaaactagaagaatatctactgatagcccgcgaaattcaattcatgtgcaagatctcgggttaccagaaaaaaaaaacaacacacaactagaagtgagaaaattacttacatttttccgaagtcgagagttattttgctagctggctaaccagagaggcacctttgcccggaatcggaaatgaatatgagcagagtgtagtttctagggaaacctagagagttgacttgtttctctccttggctgaacgtttcgggtttccaggaaaatgtatagacttgctaacaacttcccaaatgtgggtcactgtggtggcaattgcaaatcgaagccgaagtttattgttttctgctttataaaaataaacacgctgtgtaaaaaataaaataaatagcgagtacaacgatgcattaagtgggcgccacacggactcagagccaaggcatagatcaattctgtatagctatttacatagaagtgccttagtcggttcggtgctaaactaatatcgcttagttcgatttaagctaatttcatataaactggtagtaagaatcgatgtcaagcaaatgcaggtacctcaattcggctaccgttctaacttccgaacttcaggggtcgtagttcgaagtacttgtccagcacttcgtccgtaatcagcttgcgggcggcctgatgctgttccacaatgggtgtgagcgtctaagaagatcatttgagcacattaattacaatgttttttgggaagattgtagcatcatcattgcacttacctcaactgccagcttcttgatctcgcccgtaagcatttcgcctttgctgtaagccactctcacctcctccaacttggcatcgtcctccaggaagaacttcaacagctgataggagacatcaacttccggaactccgcccagcttgcggtgctcctccacagatacgcgtcctccggagaaggcgtacttgttgatcttgttcttaatctgcttgggcgtgtccgtcagataaacagccgagttctggtcgctagccgacatcttcgtcttggcaccctgcagcgccgggaagaaggtcgaatggatgagcgcgcatttgggaaaaccaagacgtggagccacatcgcgagtcatgcggaaatatgggtcctgatcgatggcgcacgggatgaggcagtgcaccttcctgttgccgaagatgaaggggaaggtgctggaaatcgcgggagctgcttgagcggctgggaaaccaatcttgccaatgatgtctgagtccccgaagccaaagatgcccttgacctgattgaaggtaacgcacttctggatgcgaatgatgttctgatacatggcaggacattttctgtaagtaatatagataatacagattatacaggttaaaagttttttaatttacttaccccacgaattccaggttattaaaaatgaacgtcttgttgacatcgaatccaatggccacaatatccttggcgttttcacgtccaagcttgatggcatcctccactttcagatccttccacaaggtcttctcgtcgtcggtcaattgaataaccagcggcacatcaaaggtctcctgcagccacttggtcatgatgaagggcaccaggtggcccacgtgcagggatccggaactgggaccgcgaccagtgtacaaatagaagggtttgccctgttcgcgcagtgttagaatcgtatgaagatcccggtgcgagaagaacatgccccttcggatgaagtggtgggcgggctttcccgtgattttctcgaaacgcgcgataagctcctcatcgattttgctggagccaaaccgttctgcaacgtgtcaacatgtcgtttgattaacttgattaataatttgccttgcaaatgtcttcttacttatcagcttatcatagtcgacgcccgcgtcattactactggccacattccatggatccacaacatcttcagtgggtgcagtggctccctcctgtgcctgggcatccgtgcccgtttccacgggttctgcgtccggttttccatttagtgtcaacgcctccacgccctccacaaccgtctccttggtgtccgccattctgtcagtctgattgttaagaatttaacagataatttaatactggccagtgtaattgggcccttcacatgtgaaatgaggcgcttattagtgtcccaaccatcgattacaccatcgattatttcatctgctctcctgttaatggtaattgttatgctcaatttcaactgttaaaaatatcgataatgagaaatatcgatggattgcaaatttgctattgagtgacaactctggaaaatcagctgttgcgctgcaaactgtgggtgaaaaatgcaagcggataagactaatgtttttcgattaaaataaggaactaataactcagacaacatgcctatcatgtacaacacgggggagtggttcaaggtgcgaccggactactacaggtgggtaatcctaatccatccgttctatacaaaccaactgaaggatacgcccattaatcccattcacagaaaagtggaactggctacgcctgattggcctctggacctggacttggagtatatgtgggtggaagtggctccctatggaggaccactggcggtcactcgtgatccgaccaaattggtgccggtaaagggtaacgctagacccatgattcgcatctttgataccaccggcagggaaatgggtcacatattggtgagttaatcgaaagtaagaaatattatctcaaatattgaaatcaccgtagtggaaccatggcaaacttattgccatgggctggtcagacatggaggagcttatctgcatccaggagaacgccaccgtctttgtctacgacatgtttggtcgggaaaaggagtcctacagcatcggcgatgaggccagtgtcacaaagattgtggagggcaaggtgttccagtcctcagctggcacaggagtggctgtaatgaccacatccggtcgggttttcctcaagcagaacagcagcaagactgaaagaaagctgccggatattcccagtaagaaaaccattgaaataccaaaagaatattatgtcattgctcaacagattccagcatgaactgttcctgctgggagatcgtaaccgagggacgcaacagctactgtctgctgggaagggatc

SEQ ID NO: 28400 - DNA, 2645 bp, DROSOPHILA
cactaataagcgcctcatttcacatgtgaagggcccaattacactggccagtattaaattatctgttaaattcttaacaatcagactgacagaatggcggacaccaaggagacggttgtggagggcgtggaggcgttgacactaaatggaaaaccggacgcagaacccgtggaaacgggcacggatgcccaggcacaggagggagccactgcacccactgaagatgttgtggatccatggaatgtggccagtagtaatgacgcgggcgtcgactatgataagctgataaaacggtttggctccagcaaaatcgatgaggagcttatcgcgcgtttcgagaaaatcacgggaaagcccgcccaccacttcatccgaaggggcatgttcttctcgcaccgggatcttcatacgattctaacactgcgcgaacagggcaaacccttctatttgtacactggtcgcggtcccagttccggatccctgcacgtgggccacctggtgcccttcatcatgaccaagtggctgcaggagacctttgatgtgccgctggttattcaattgaccgacgacgagaagaccttgtggaaggatctgaaagtggaggatgccatcaagcttggacgtgaaaacgccaaggatattgtggccattggattcgatgtcaacaagacgttcatttttaataacctggaattcgtgggaaaatgtcctgccatgtatcagaacatcattcgcatccagaagtgcgttaccttcaatcaggtcaagggcatctttggcttcggggactcagacatcattggcaagattggtttcccagccgctcaagcagctcccgcgatttccagcaccttccccttcatcttcggcaacaggaaggtgcactgcctcatcccgtgcgccatcgatcaggacccatatttccgcatgactcgcgatgtggctccacgtcttggttttcccaaatgcgcgctcatccattcgaccttcttcccggcgctgcagggtgccaagacgaagatgtcggctagcgaccagaactcggctgtttatctgacggacacgcccaagcagattaagaacaagatcaacaagtacgccttctccggaggacgcgtatctgtggaggagcaccgcaagctgggcggagttccggaagttgatgtctcctatcagctgttgaagttcttcctggaggacgatgccaagttggaggaggtgagagtggcttacagcaaaggcgaaatgcttacgggcgagatcaagaagctggcagttgagacgctcacacccattgtggaacagcatcaggccgcccgcaagctgattacggacgaagtgctggacaagtacttcgaactacgacccctgaagttcggaagttagaacggtagccgaattgagcagaaaacaataaacttcggcttcgatttgcaattgccaccacagtgacccacatttgggaagttgttagcaagtctatacattttcctggaaacccgaaacgttcagccaaggagagaaacaagtcaactctctaggtttccctagaaactacactctgctcatattcatttccgattccgggcaaaggtgcctctctggttagccagctagcaaaataactctcgacttcggaaaaatgtaagtaattttctcacttctagttgtgtgttgttttttttttctggtaacccgagatcttgcacatgaattgaatttcgcgggctatcagtagatattcttctagttttttccttgcggtttatagtttcaggaattctgaattttcggaagaaaaaaataatttgctagttaattactattaattaaagaagatatgtagtaataatggaaactgtgctcaatatctcagtcttttaagcaagtatctatttcaattaagaaaaatcataaaaataggtatagaatatgtaatataatttttaataggattataagagcacttagctggcgatcacggtttttcattgactagagagaaaccaaattagtttgaaattagaattgggcgaagtttggagctagattggccaagcttaggtttcttaccttcatatagacgaacctatattcataactagctatatgcatatgtgtgtattttttaattaagtcaaaacacttgtgtttacatgcgtcgaaaatacactctttcatatgggctgagttccagtgtgggtgtttgtacatagcgacgatcaaaaagaaaaactcaaactgaagttgtggcgacgatcgtcgatcgctgatcccagagagggatccgacataagtcggacgcaactccagcctgccacacgcgcctcgatcaccattcgcagccgtcggagtcggatcgatcggacaatagcgaggaaattaagccgctttgtttgcacagcgattggatgggacaaaaggaccctcgacgacaagttggtcccctatagatcacctgttgacacacgtacaaagcggtggcctcttaaactagacgagatgtggccctcatcaaccccggatgagtagtcacgtctcgaatcgatggatcgatggtgagccattcatcacgatcgccagagtcgtctctaatgcaactaaaagtaagcaaaacaaaaaggtacaagctaaaaaaaaaaaaa

SEQ ID NO: 28401 - protein, 430 aa, DROSOPHILA; identical to SEQ ID NO: 20655

SEQ ID NO: 28402 - DNA, 3941 bp, DROSOPHILA
tatgtatgtgtctacatacttacaagtacaacacaacaaccaaccggtttacctaggctccaatttcgttttggcaaatcaacccccattaaaggcctgcacaaagtacatacataatgtgtatgtacaaacgcggtcacttcaatacgtacatacatacatatttaactcgtagactcgtagttaaattcggaagcttcgcatggttttgcctaattgtttcagatttatggggcttacatacatacataattactttatacaacgaaaattactaaatagaatcgttcctgtaagcaggactgacacatttgcttgcgttgattgctattatatcgacctaccatagtcacataaatatgtacatatgtaaatatgtatgtatgtacaatcgcatgcttgacggcagttaagaaatgaagtcaccatttcggtgagctggcaacgattatgctgtggccccgaaaggaatgactcatcgtcccagagaatcgataccaacggtggaaagccaagtgcatgccacactgcgtgcacagcctgctgctacacttgccacaaacagcaggcggaaaagcgcagcagcggcccgaatcggggaaaatagaaagcgctaattatagacgaagtgaacggcagctctgctttcccgcagtcgaaactccgtgcaatgaccccgttctttcaccacgaaatgaatgatcgctgggagaaagaaaaggcaaagaaaaacagtggggttttcttatttctgacaacactgaatctggccgattttattcttgtgtacacaacttatcgccgagttaacttggcttttctgctatacgtgtctttgtggataaaatactttatggtttctcgtacaatcttcatcgttttcgtatgcttttcagtgttgcagtgaattttttgttgcgattggaagcgtaaacactgatttcgacggttaccccgcccaccaatgacgctcccatcgagcgttgaagtggcgtgacgcttagtactcctcagcgccctcaccctcgccgtcaccggagtccatgccgacctcctcgtagtccttctcgagggcagccaaatcctcacgggcctcggagaactctccctcctccataccctcaccaacgtaccagtggacgaaggcacgcttggcgtacatcagatcgaacttgtggtccagacgggcccaggcctcggcgatggccgtggtgttggacaacatgcacacggcacgctgcaccttggccaaatcacctccaggcaccacggtgggtggctggtagttgatgccaaccttgaagccagtggggcaccagtcgacgaattgaatggtgcgcttggtcttgatggtggcaatagcggcgttgacgtccttgggcacaacatcaccgcggtacagcatgcagcaggccatgtacttgccgtgacggggatcgcacttgaccatctggttggccggctcgaagcaggcgttggtgatctcagccaccgacagctgctcgtggtaggccttctcggcggagataacgggggcgtaggtcaccagagggaagtgaatacgtgggtagggcaccaagttggtctggaactcagtcagatccacgttaagggcaccatcgaatcgcagagaggcggtaatcgaggacacgatctggccaatcagacggttcaggttggtgtacgtggggcgctcaatgtccagattgcggcggcagatgtcgtagatagcctcgttgtcgaccatgaaggcgcagtcggaatgctccagggtggtgtgggtggtcaggatggagttgtagggctcgaccacggcagtggacacctggggggctgggtagatggcgaactccagcttggacttcttgccgtagtccacggagagacgctccatcagcagcgaggtgaagccggagccggtacctccaccgaacgagtggaagatgaggaagccctgcagaccggtgcactgatcggccagcttgcggatcctgtccagaaccagatcgacgatctccttgccgatggtgtagtggccacgggcgtagttgttggccgcatcctccttaccagtgatcagctgctcggggtggaacagctgacggtaggttccggtacggacctcatcgaccacagtgggttccagatccacaaacacggcgcggggcacgtgcttgccagctccagtctcgctgaagaaggtgttgaacgagtcatcacctccgcccacggtcttgtcagacggcatctggccatcgggctggatgccgtgctccaagcagtagagctcccagcaggcgtttccaatctggacaccagcctgaccaacatggatagagatacattcacgctgtggatgaggaggaagggaaaacggatgattagttacacaccccaagaaaatcgataattgcagagccgcgcccaacttgagccggcactgcgtgcgagtgagagaggtagctaaatggtatactgatttttttgctctactttgccgacgccggaattttactctctcgccattttctctttaattctatccaaaatctacagttatgcgtcgaagtatcatggtaaccgaatttagaatttttaagattaatgaagcgttccagcagcatagaaataatgaatattttttttatctagattttaagagccattcctcattgcgaacaaaaaaaaaaaacaggcatgacgtcatcacttttgaggaaaaaacgcaggccggccgccattttgagaaaaagccgcatcgcgtttttgcccattgaattttgcccacacaaatttcttttcagcattatttcactagatttttttttaaagtactcaccatattgagtttttattggaagtgtttcacacgcgacaaggaaaattcacagaattgtgtagagctacgatttcgaggtctgactcagagagcgtatacgttcgaactgccggctatgaggcttgacaaacgtaaaacgaatatgaaatgtggaaagcgggctgctttatataggcaccggagctagagacggcaagctgtcgacttaaacgccgcataaccgataactgaagtgggagaggtaatggcacttggtctctctaaaacttgctgcggtattttgcaggactagttgggactcgaaccagggcgtgaatctttgcttgcccaaccggtagacctaaccggttgctaaagtgggccaacattaataatatttttgttgaatgtttcataaaagctattttaatataaattcgcatcgttaccgattcaataaggtttagtaaatcattatatttctgactccatattgatttccaacagcaaattaattaactccataacttcccctctccctttggagcaaaggatgtagttaatatcttaacatctaaacttgttttgtttttttattcaaataggagttatattaaatagaaatgtaaaaaacaaagcaggttttaagaaaatgatgtcaggagattttgaactcctactcatggtcactctaatcgcagtctgcaatttacgtgtttccaacttaacgcccccaagttaatagccgtaatcatttgaaaagaaaggcacgcacgcacaacgccatgcggatcgaacctggggactccttttggacgaaaaaggcgatgttttccaacgcagaaaggcagtactttgagacggtccgtccgcggaagaccagtgtgagtaaaagttgaccgtcgatggcgatttcacaagtgacgtttaagtggcgggaacttctactcacaaatccctgagccctgtgatatgatttattttatggagccgtgatccggacgaaaaatgcacacacatttctacaaaaatatgtacatcgcggtgcgattgtgtcgcttaaagcacacgtacacccactgtcacactcacactcacatgcatacaccgccggcgaactttg

SEQ ID NO: 28403 - DNA, 1386 bp, DROSOPHILA
aacgtatacgctctctgagtcagacctcgaaatcgtagctctacacaattctgtgaattttccttgtcgcgtgtgaaacacttccaataaaaactcaatatgcgtgaatgtatctctatccatgttggtcaggctggtgtccagattggaaacgcctgctgggagctctactgcttggagcacggcatccagcccgatggccagatgccgtctgacaagaccgtgggcggaggtgatgactcgttcaacaccttcttcagcgagactggagctggcaagcacgtgccccgcgccgtgtttgtggatctggaacccactgtggaggatgcggccaacaactacgcccgtggccactacaccatcggcaaggagatcgtcgatctggttctggacaggatccgcaagctggccgatcagtgcaccggtctgcagggcttcctcatcttccactcgttcggtggaggtaccggctccggcttcacctcgctgctgatggagcgtctctccgtggactacggcaagaagtccaagctggagttcgccatctacccagccccccaggtgtccactgccgtggtcgagccctacaactccatcctgaccacccacaccaccctggagcattccgactgcgccttcatggtcgacaacgaggctatctacgacatctgccgccgcaatctggacattgagcgccccacgtacaccaacctgaaccgtctgattggccagatcgtgtcctcgattaccgcctctctgcgattcgatggtgcccttaacgtggatctgactgagttccagaccaacttggtgccctacccacgtattcacttccctctggtgacctacgcccccgttatctccgccgagaaggcctaccacgagcagctgtcggtggctgagatcaccaacgcctgcttcgagccggccaaccagatggtcaagtgcgatccccgtcacggcaagtacatggcctgctgcatgctgtaccgcggtgatgttgtgcccaaggacgtcaacgccgctattgccaccatcaagaccaagcgcaccattcaattcgtcgactggtgccccactggcttcaaggttggcatcaactaccagccacccaccgtggtgcctggaggtgatttggccaaggtgcagcgtgccgtgtgcatgttgtccaacaccacggccatcgccgaggcctgggcccgtctggaccacaagttcgatctgatgtacgccaagcgtgccttcgtccactggtacgttggtgagggtatggaggagggagagttctccgaggcccgtgaggatttggctgccctcgagaaggactacgaggaggtcggcatggactccggtgacggcgagggtgagggcgctgaggagtactaa

SEQ ID NO: 28404 - protein, 428 aa, DROSOPHILA
MRECISIHVGQAGVQIGNACWELYCLEHGIQPDGQMPSDKTVGGGDDSFNTFFSETGAGKHVPRAVFVDLEPTVEDAANNYARGHYTIGKEIVDLVLDRIRKLADQCTGLQGFLIFHSFGGGTGSGFTSLLMERLSVDYGKKSKLEFAIYPAPQVSTAVVEPYNSILTTHTTLEHSDCAFMVDNEAIYDICRRNLDIERPTYTNLNRLIGQIVSSITASLRFDGALNVDLTEFQTNLVPYPRIHFPLVTYAPVISAEKAYHEQLSVAEITNACFEPANQMVKCDPRHGKYMACCMLYRGDVVPKDVNAAIATIKTKRTIQFVDWCPTGFKVGINYQPPTVVPGGDLAKVQRAVCMLSNTTAIAEAWARLDHKFDLMYAKRAFVHWYVGEGMEEGEFSEAREDLAALEKDYEEVGMDSGDGEGEGAEEY

SEQ ID NO: 28405 - DNA, 3755 bp, DROSOPHILA
gttccaaaacttttggcaatttgaaagcctcttatatctagtactccggatattcttacgaatgtcatacgaggtgctaagcaagtccaatattaaaaatttcactcaaatatgtatatattcgcattaactaatttaaacttcttgttcagctgcggttgccacatttagaagcatgcctgcgcgccaaggacctccaaaggtattccacgctaatagacctttcttctatgctataaaggacaacacccatggccttctatttgccggtcattttatcacaaccaaggttgagcagtctgaaaaatgtaacacatgtacctaaaggaaaaataaatatgtatatctttggcgtgggaaatagttgagaaataaattgtacttccacttaagttacttattaaacatttgacacattaaacgtgtaggaattatctattatttattattattattattatttattattataacataaatctgcctttgaaggtatataaagggtgttattcgattctattgactcattctattgacttctccctagaatttttggcaaaatataataaacaaatttaggtagggaatgatttcagtttcagctttcctctgttatcagggaacggaaaaaatcccattattgtcgaagacaataacaagctcaagctgagctttggctgataaggtcgcagtaaatcgtgtggacctgaagtcaggccagtctattacgtacgctttgcagactaggtttactgtaagcaaaattactgagtatggattatcgtttggtgccatgtggtgagttatccggcagtttgactttaaaaagccagtgaaagaaaacgcattatggatgtaaagagtgaaatcaatgagaacaccgaaggcaggcgagagaaaaacccgtttgggagcacgaactgaagagaaatcattgttttgtgggggaatacatatgcatatgcgagtataaaaacaatgtacgctcgctgagagaattcagttgttgctcaaaggccacattataaaagtcgagggcgatagccggtttataaaaagaaattaatttacacactcgaagccgctggtgaaaaacagtaccagcagtcggagcaggcagttaattaccctttccgataatcaagctagtgaatccccggcgaaacggccaaccggagagatatagtgaacaccgtttgtggaggtgactcatcagtacactgcaattacataaatttatgaaaacgagcacacctcatccacggtcgatttggatacttacaggttgctggttgctccccctgctcggcctagccctcttcccgtttccaccggtccacacggctgacgtcaccatggctgacgccgcccaccaggagttcgcccgccggctggcccttttctctatcaacgtgtacggcaagctgtcggggcagaagcccggcgagaacatcgtcttctcgcccttttccatccagacttgtgcggcgatggccaggctgggtgcagaaaacgagacggctacccagctggaccagggactgggcttggcctctagtgacccagagcaaatcgcacacagttttcaccaggtgctggccgcctaccaggacagtcagatcttgcgcatcgccaacaagattttcgtcatggatggctaccagctgcgccaggagtttgatcagctgttatccaagcagttcctctcggcggctcagagcgtggacttttccaaaaatgtacaagcagcggccaccatcaacaattgggttgagcagcgcaccaaccatctgatcaaggaccttgtgccggctgatgtattgaactccgaatcgcgactcgtccttgtgaacgccattcacttcaagggcacctggcagcaccagttcgccaaacacttaacccgcccagacacctttcacctggatggggagcgaacagttcaggttccgatgatgagtttaaaggagcggttccgctacgccgatctgccggcgctagatgccatggctctggaactgccctacaaggactcagacctctctatgctgatcgtactgcccaacaccaagacgggtctgcccgctctggaggagaagttgcgcctcacgaccctctcgcagatcacgcagtcgttgtacgaaacaaaggtagcgctcaaattgcccaggttcaaggcagagttccaagtggaattgtctgaggttttccagaaggtgagctttactttaaacacataagcaatgatatggacttcatgttaatataaacctcctccagctgggcatgtcaaggatgttctccgatcaggctgaatttggaaaaatgctacaaagtccggagccattgaaagtgtcagccatcatacacaaggccttcattgaagtcaacgaggagggaacggaggctgcggccgccacgggtaagtggtcaaagtcattggtattttttggcatccatcatcctgtgcatgtcccatttgttcatccgtgtctgtcttgtcttcttcccatcctgcaggcatggcggtgcgtaggaagcgcgctattatgtcgcctgaggaaccaattgagttctttgccgaccatcctttcacctatgtccttgtgcatcagaaggatctgccattgttttggggctcagttgtgcggctcgaggaaaataccttcgcctccagcgagcatgatgagctgtgatggtacctgattctttggcaaaacaataaagacagctatttatttacaatggaaattaagcatttgtctgaagctttgggataatccatttatcggcatacctgggtggcatacattacgagaaataaattgcatctgctccattaccagtttggccacttactaattcgagttatataacccttgagctacgactttgatgttcatttgcaggaatggtcatgtgctacgcctccatgctcacgttcgaaccgcagcccgtccaattccatgtccagcatccatttaactattacattatcaataaggattctactattttgtttgcgggaagaatcaataagttttgaagttagcactccatcaaaatccaccaatcacaaccattgaactgaaatgcaatgtaatcccaattcacaggtatgtttatgagccttacttcgctgcccatgccgaagccggatccgatacgtttcaatgtcgaccatccatttacattttacatccttaacaaggactcaaccgctctcttcgctggcagcataaagaaactctaaataggcaaacatactaaccaatccacaatgttactcgagggtctcgtattcatttaacgtgcaagcgggtcagtcctatattgctggcttgacgagcatattcagcttttacattgtctataaggattcacaaaattatagtctgtgcgcaattgatgatcttatatatacacttaatatttttatactaaccaagcatgtagccgtagcctcaataaagtctaaaagcaaatgtctaaaagtctgcttcgttttcatggttcctcctcagtatggcgggtgatggccgtagctgccttcagtcgcaaacacttcattgccaaccatccttttgctttctacgtgaagacccattacgatctgccgatattcactgggcgctacttgggttaagcaataggaagcttcctatgaaaaaaaaaattgaagttcaataaaataaaataaacggcagccacttaatagctgtgatttcgtcaagtcgaagtaatttatagaaata

SEQ ID NO: 28406 - DNA, 1514 bp, DROSOPHILA
cagttgttgctcaaaggccacattataaaagtcgagggcgatagccggtttataaaaagaaattaatttacacactcgaagccgctggtgaaaaacagtaccagcagtcggagcaggcagttaattaccctttccgataatcaagctagtgaatccccggcgaaacggccaaccggagagatatagtgaacaccgtttgtggaaggttgctggttgctccccctgctcggcctagccctcttcccgtttccaccggtccacacggctgacgtcaccatggctgacgccgcccaccaggagttcgcccgccggctggcccttttctctatcaacgtgtacggcaagctgtcggggcagaagcccggcgagaacatcgtcttctcgcccttttccatccagacttgtgcggcgatggccaggctgggtgcagaaaacgagacggctacccagctggaccagggactgggcttggcctctagtgacccagagcaaatcgcacacagttttcaccaggtgctggccgcctaccaggacagtcagatcttgcgcatcgccaacaagattttcgtcatggatggctaccagctgcgccaggagtttgatcagctgttatccaagcagttcctctcggcggctcagagcgtggacttttccaaaaatgtacaagcagcggccaccatcaacaattgggttgagcagcgcaccaaccatctgatcaaggaccttgtgccggctgatgtattgaactccgaatcgcgactcgtccttgtgaacgccattcacttcaagggcacctggcagcaccagttcgccaaacacttaacccgcccagacacctttcacctggatggggagcgaacagttcaggttccgatgatgagtttaaaggagcggttccgctacgccgatctgccggcgctagatgccatggctctggaactgccctacaaggactcagacctctctatgctgatcgtactgcccaacaccaagacgggtctgcccgctctggaggagaagttgcgcctcacgaccctctcgcagatcacgcagtcgttgtacgaaacaaaggtagcgctcaaattgcccaggttcaaggcagagttccaagtggaattgtctgaggttttccagaagctgggcatgtcaaggatgttctccgatcaggctgaatttggaaaaatgctacaaagtccggagccattgaaagtgtcagccatcatacacaaggccttcattgaagtcaacgaggagggaacggaggctgcggccgccacgggcatggcggtgcgtaggaagcgcgctattatgtcgcctgaggaaccaattgagttctttgccgaccatcctttcacctatgtccttgtgcatcagaaggatctgccattgttttggggctcagttgtgcggctcgaggaaaataccttcgcctccagcgagcatgatgagctgtgatggtacctgattctttggcaaaacaataaagacagctatttatttacaatggaaattaa

SEQ ID NO: 28407 - protein, 392 aa, DROSOPHILA
MADAAHQEFARRLALFSINVYGKLSGQKPGENIVFSPFSIQTCAAMARLGAENETATQLDQGLGLASSDPEQIAHSFHQVLAAYQDSQILRIANKIFVMDGYQLRQEFDQLLSKQFLSAAQSVDFSKNVQAAATINNWVEQRTNHLIKDLVPADVLNSESRLVLVNAIHFKGTWQHQFAKHLTRPDTFHLDGERTVQVPMMSLKERFRYADLPALDAMALELPYKDSDLSMLIVLPNTKTGLPALEEKLRLTTLSQITQSLYETKVALKLPRFKAEFQVELSEVFQKLGMSRMFSDQAEFGKMLQSPEPLKVSAIIHKAFIEVNEEGTEAAAATGMAVRRKRAIMSPEEPIEFFADHPFTYVLVHQKDLPLFWGSVVRLEENTFASSEHDEL

SEQ ID NO: 28408 - DNA, 4013 bp, DROSOPHILA
cgagttccagcaagaactatcccaggttttaatgctggttagctgaaatggatttgttattgaaatttgattatacgcaacctggctactcacagatgggcatgaaccgaatattcagtggtcaggcagagcttgggggaatgctacaatccgaggaaagcctttttgtctcccagatcgtccacaaagcatttatcgagattaacgaagtgggcactgaagctgcagccgcaacgggtgagcctgcaaaaaaaaaaggttccaaaacttttggcaatttgaaagcctcttatatctagtactccggatattcttacgaatgtcatacgaggtgctaagcaagtccaatattaaaaatttcactcaaatatgtatatattcgcattaactaatttaaacttcttgttcagctgcggttgccacatttagaagcatgcctgcgcgccaaggacctccaaaggtattccacgctaatagacctttcttctatgctataaaggacaacacccatggccttctatttgccggtcattttatcacaaccaaggttgagcagtctgaaaaatgtaacacatgtacctaaaggaaaaataaatatgtatatctttggcgtgggaaatagttgagaaataaattgtacttccacttaagttacttattaaacatttgacacattaaacgtgtaggaattatctattatttattattattattattatttattattataacataaatctgcctttgaaggtatataaagggtgttattcgattctattgactcattctattgacttctccctagaatttttggcaaaatataataaacaaatttaggtagggaatgatttcagtttcagctttcctctgttatcagggaacggaaaaaatcccattattgtcgaagacaataacaagctcaagctgagctttggctgataaggtcgcagtaaatcgtgtggacctgaagtcaggccagtctattacgtacgctttgcagactaggtttactgtaagcaaaattactgagtatggattatcgtttggtgccatgtggtgagttatccggcagtttgactttaaaaagccagtgaaagaaaacgcattatggatgtaaagagtgaaatcaatgagaacaccgaaggcaggcgagagaaaaacccgtttgggagcacgaactgaagagaaatcattgttttgtgggggaatacatatgcatatgcgagtataaaaacaatgtacgctcgctgagagaattcagttgttgctcaaaggccacattataaaagtcgagggcgatagccggtttataaaaagaaattaatttacacactcgaagccgctggtgaaaaacagtaccagcagtcggagcaggcagttaattaccctttccgataatcaagctagtgaatccccggcgaaacggccaaccggagagatatagtgaacaccgtttgtggaggtgactcatcagtacactgcaattacataaatttatgaaaacgagcacacctcatccacggtcgatttggatacttacaggttgctggttgctccccctgctcggcctagccctcttcccgtttccaccggtccacacggctgacgtcaccatggctgacgccgcccaccaggagttcgcccgccggctggcccttttctctatcaacgtgtacggcaagctgtcggggcagaagcccggcgagaacatcgtcttctcgcccttttccatccagacttgtgcggcgatggccaggctgggtgcagaaaacgagacggctacccagctggaccagggactgggcttggcctctagtgacccagagcaaatcgcacacagttttcaccaggtgctggccgcctaccaggacagtcagatcttgcgcatcgccaacaagattttcgtcatggatggctaccagctgcgccaggagtttgatcagctgttatccaagcagttcctctcggcggctcagagcgtggacttttccaaaaatgtacaagcagcggccaccatcaacaattgggttgagcagcgcaccaaccatctgatcaaggaccttgtgccggctgatgtattgaactccgaatcgcgactcgtccttgtgaacgccattcacttcaagggcacctggcagcaccagttcgccaaacacttaacccgcccagacacctttcacctggatggggagcgaacagttcaggttccgatgatgagtttaaaggagcggttccgctacgccgatctgccggcgctagatgccatggctctggaactgccctacaaggactcagacctctctatgctgatcgtactgcccaacaccaagacgggtctgcccgctctggaggagaagttgcgcctcacgaccctctcgcagatcacgcagtcgttgtacgaaacaaaggtagcgctcaaattgcccaggttcaaggcagagttccaagtggaattgtctgaggttttccagaaggtgagctttactttaaacacataagcaatgatatggacttcatgttaatataaacctcctccagctgggcatgtcaaggatgttctccgatcaggctgaatttggaaaaatgctacaaagtccggagccattgaaagtgtcagccatcatacacaaggccttcattgaagtcaacgaggagggaacggaggctgcggccgccacgggtaagtggtcaaagtcattggtattttttggcatccatcatcctgtgcatgtcccatttgttcatccgtgtctgtcttgtcttcttcccatcctgcaggcatggcggtgcgtaggaagcgcgctattatgtcgcctgaggaaccaattgagttctttgccgaccatcctttcacctatgtccttgtgcatcagaaggatctgccattgttttggggctcagttgtgcggctcgaggaaaataccttcgcctccagcgagcatgatgagctgtgatggtacctgattctttggcaaaacaataaagacagctatttatttacaatggaaattaagcatttgtctgaagctttgggataatccatttatcggcatacctgggtggcatacattacgagaaataaattgcatctgctccattaccagtttggccacttactaattcgagttatataacccttgagctacgactttgatgttcatttgcaggaatggtcatgtgctacgcctccatgctcacgttcgaaccgcagcccgtccaattccatgtccagcatccatttaactattacattatcaataaggattctactattttgtttgcgggaagaatcaataagttttgaagttagcactccatcaaaatccaccaatcacaaccattgaactgaaatgcaatgtaatcccaattcacaggtatgtttatgagccttacttcgctgcccatgccgaagccggatccgatacgtttcaatgtcgaccatccatttacattttacatccttaacaaggactcaaccgctctcttcgctggcagcataaagaaactctaaataggcaaacatactaaccaatccacaatgttactcgagggtctcgtattcatttaacgtgcaagcgggtcagtcctatattgctggcttgacgagcatattcagcttttacattgtctataaggattcacaaaattatagtctgtgcgcaattgatgatcttatatatacacttaatatttttatactaaccaagcatgtagccgtagcctcaataaagtctaaaagcaaatgtctaaaagtctgcttcgttttcatggttcctcctcagtatggcgggtgatggccgtagctgccttcagtcgcaaacacttcattgccaaccatccttttgctttctacgtgaagacccattacgatctgccgatattcactgggcgctacttgggttaagcaataggaagcttcctatgaaaaaaaaaattgaagttcaataaaataaaataaacggcagccacttaatagctgtgatttcgtcaagtcgaagtaatttatagaaata

SEQ ID NO: 28409 - DNA, 1365 bp, DROSOPHILA
actaggtttactgtaagcaaaattactgagtatggattatcgtttggtgccatgtggttgctggttgctccccctgctcggcctagccctcttcccgtttccaccggtccacacggctgacgtcaccatggctgacgccgcccaccaggagttcgcccgccggctggcccttttctctatcaacgtgtacggcaagctgtcggggcagaagcccggcgagaacatcgtcttctcgcccttttccatccagacttgtgcggcgatggccaggctgggtgcagaaaacgagacggctacccagctggaccagggactgggcttggcctctagtgacccagagcaaatcgcacacagttttcaccaggtgctggccgcctaccaggacagtcagatcttgcgcatcgccaacaagattttcgtcatggatggctaccagctgcgccaggagtttgatcagctgttatccaagcagttcctctcggcggctcagagcgtggacttttccaaaaatgtacaagcagcggccaccatcaacaattgggttgagcagcgcaccaaccatctgatcaaggaccttgtgccggctgatgtattgaactccgaatcgcgactcgtccttgtgaacgccattcacttcaagggcacctggcagcaccagttcgccaaacacttaacccgcccagacacctttcacctggatggggagcgaacagttcaggttccgatgatgagtttaaaggagcggttccgctacgccgatctgccggcgctagatgccatggctctggaactgccctacaaggactcagacctctctatgctgatcgtactgcccaacaccaagacgggtctgcccgctctggaggagaagttgcgcctcacgaccctctcgcagatcacgcagtcgttgtacgaaacaaaggtagcgctcaaattgcccaggttcaaggcagagttccaagtggaattgtctgaggttttccagaagctgggcatgtcaaggatgttctccgatcaggctgaatttggaaaaatgctacaaagtccggagccattgaaagtgtcagccatcatacacaaggccttcattgaagtcaacgaggagggaacggaggctgcggccgccacgggcatggcggtgcgtaggaagcgcgctattatgtcgcctgaggaaccaattgagttctttgccgaccatcctttcacctatgtccttgtgcatcagaaggatctgccattgttttggggctcagttgtgcggctcgaggaaaataccttcgcctccagcgagcatgatgagctgtgatggtacctgattctttggcaaaacaataaagacagctatttatttacaatggaaattaa

SEQ ID NO: 28410 - protein, 424 aa, DROSOPHILA
MDYRLVPCGCWLLPLLGLALFPFPPVHTADVTMADAAHQEFARRLALFSINVYGKLSGQKPGENIVFSPFSIQTCAAMARLGAENETATQLDQGLGLASSDPEQIAHSFHQVLAAYQDSQILRIANKIFVMDGYQLRQEFDQLLSKQFLSAAQSVDFSKNVQAAATINNWVEQRTNHLIKDLVPADVLNSESRLVLVNAIHFKGTWQHQFAKHLTRPDTFHLDGERTVQVPMMSLKERFRYADLPALDAMALELPYKDSDLSMLIVLPNTKTGLPALEEKLRLTTLSQITQSLYETKVALKLPRFKAEFQVELSEVFQKLGMSRMFSDQAEFGKMLQSPEPLKVSAIIHKAFIEVNEEGTEAAAATGMAVRRKRAIMSPEEPIEFFADHPFTYVLVHQKDLPLFWGSVVRLEENTFASSEHDEL

SEQ ID NO: 28411 - DNA, 7285 bp, DROSOPHILA
caatggagatacgaaattctatttctctttgtgtgccgagcgttgtggaaatacatttaaatacggaacaacgtgaggttaattgtgcggagcacacttgttaattagggaatgtcagcgggcgcgacagttggcgctcccctcaccccttcccaacccaccgaaatccgaaaataatgcttccaagccacgttttcattggattacgtaagctgtaaaccagtttatgatgttgttgttgttactgttgttgccagtgtgtgtcaaggaaaagctaaacacaattacaacgcccttctgtctggtaattaaaaacggaagccatgcccgaagccatagtaggctggctaacgagacctgcacatcggcccaaactggttggctttggctttaggccactttcgaggaaaatccgcccacgacgagccgaaaaccgcaaaacacgtccgccagtggaaatcgcatcgaaagttttgcggtttcgagccatttttccattaactcgaaattctagaagatcaattcaaatcaatgttcatgtgagattttccttatgaatacctgtatttttatataccgagatacgtatgtacaaacaatcttatcctacaatttcctgtttttgaggcagctttatcttataaaaactgttcgaaacaaaattataatttccatatacatatcttcaacgtgaggtttttgctcccttttttctgttcttaattttcctattggccaggcaatagtgcatttgcataaataaaacatttattggtagtaaaagttaaacaaatatgtacgtaattcccgaaacatttcaaatttgcataaataaacaaacgcgattggtaacagagagcggaaaaacaagttacagtaattaccgttgggagggggtgacgaaacaaaccaaaacaaaacgaattatgctcgtgtgagtgtgcgcgacgcaacaggttgaggctgcttggcgcagcttttgaccgatcagtttagttcagttagcattgtcaactgctcacgaacggttcgaaaagcggagcgcgcgtaaaatcattctgtaaatcattcaaaaggcggaaaactcaaggtgtgtgtgtgggttttgttttcaaattccgtgtgcttgtgtgtgtgagagagggcgagagcgacagtgtcgtagcaggcagtgttgtaaggtgccgaaacagcgatcccaaccggcacactagttgtcctgctcgcactccagtgaggcaaatgtcaaagtctggtcagtagcaaaacagaattgcagccaagaaaagcggaatcagcgacaaaattagccattagttgggttttacatatagattaggccagcgaaacgacataacgctccaagtggtaaagtgagacctgccagtggcggcacccaacccgaaaaagcctaaccagcgaccactttccagttatccaatggaggcggccaaggattttgcggtggccaagtaccaggacttatgtaacttcctggagcgggatacgcgcggcagtgagctggccatctatggcacctcggccatcatgctggccgtggcctatgccaaacggaagccggcctacctggtgcgccagtttaagcagccctcgcacatcccggagcgcctgatcaacgagcgcgtcatgcacacgggcaagatcgccggggtcaagcagcaggagcaggacaccctgctgatgatccagcaccggccgcttttcccgatcttcactagcagcaaacgcctgctgcccgtcaaactgccgggcgtgcgcgtcaatgccaacggctactcctggctgcagcagtgtctcattgggcgcgaggccacctttctgccccttaaatccgccaagggacaggactttgttgtctgccagctgtgcctggtccatccgccgaggggcaaccgcctgctggacgtctcggagaccctgctcaagctccgcttcgcccgattcgtgcaggatgccgccgccgcggttaagaagaacgggaagtactaccagcatctgaagaaggtggagcagaccacagcggaaaaggaggcctggctctcctgggccgccggctatccctacatctggcgccgctacaacgaactgaggcagcgctggttgcccaaggagaagctgctgccggagctagtgcgctgattgcgatctccccgttcctgcctcgatgctatttacagggctacctagctcgccaccattaacttagttccatggccagctactctctatatttttattatgcctgtttactagcttgtgcatttgtgtcttagtgttgcttgctatctattgttatacgattggcaaatatcatatacgatataagacagcatttgtttacaaaccctcgagcacaagtacacaagtcagtctcaaaagcttattagtaaggggaatagctagcgcgacttgcccaacgcgactttcgatgcccaggcggtacgtgatcgtgtgctaatttccacacccagtagagccaagaacgtcagcattttttaaatattcaaataagcgaaatgtttttaccacggatgacatcagtgcgtgtgcctgtgtgtgtacgtgtgcgtgtttcccaaataaaatgccgaaatacctaacttttcacgcttgtatctgaatttcttaattccattccatttttttcgtctcccgaacgatcagttgcagttcttcatccatctccaccagcaatctctggcaaaactcaggcaaaatgagctgcggaatctccatggttaaatatatcctatttatatttaatttgctctgttcggtgagtagcatagatacatttaagattacataatttcgagcggccaagcttagatcgacttctcagccttttaggctggcagtgagatcataactttcgtgcggaataaactggttttcccaaaattggtgttttcagtattgaaaggctgagaaagtcgaggcccacaaaagtggtgagcatgagtacattttaaagccacagaaggcactctcgttaaatgcatttttgtatttttgtgttctttaggtcggctttcatatttacatatcatgaaattaaacatatctcaattaatgtttattaaggacccttaaagtaggatctattatagcatttatggtgtctcttttccggtcagcactatcactttccggttacgaaacgcactgtacgtgcaaagtgggggcagagcttgagatcatcatcagtattccaaaaccagttattaaaattgggctacgtttgtgacgtagcggtatccgaaaaattctgtataattttgtgtacactacgtacacttttgtttactttggagtcccaaaaccagtttgtgttgtttcggtccccacaaccgagccccacatccacaaacatgcatcccattagtcggagtcagtccgaggttaactggttccaaatggcaaccaaacaatcattgaaacgccagcaacggtggcatttcgatatggttttgcaacttctaactcactgccccaaagtcactgcaccgccaggtggaactgtacttcgtccaaccagtttggggctgggaccctgacttgctgctggtgggaaatctgactgcgtcggagtaccagcgcattattcgcgtcacgcaaacatggatgtcattcactacgggcggaaaaacatcagcacacggcgctaattcttcaatcgtatgcagtatacggatatagaaaatttacaaaacaaaaccattttttgttgatgggaaatcggtaaacgagatggatgacctatctacttgaaataggtcatttgatttgttcaagagttccaatccgcagttctccaacctttttgataatttaaagtagctgcaattaacttaagaaccaacatggaaacatacaaatattttgtctgtgtgtaaagtctgccgccacttcagtggaaagttgtgtaatggttcaagaggggggggggggggggaagggggtctcacccaaaaatagttgacttaatttaatgtgaacttgctcccattgtgagacgacgagccaaaactcggaaacaacgaaatatcatctacacacgcacatcatggaatggaaacacgggggtcgttggcggtacacttgaactcaattttccgagggagggcgatctagaaatgccagacgaatgcgagtgggtggactggttattattataattgtggaccagtgtcgaaatgtcgctctcttctgatcggatgcgatgctaactattctgatcccacgaaccgctgagctcggcggctgagtcatgctgcagtttggcgcaatcctacgaatttatgaactatagtttggctgggggtggatctaatctaatgactacgtcaactgatacaatcaaagccaaagtaaatatgtttttaatagttatcgtcgatggccaggcgcttttatgcataatcttaattaacgaagcgaatcggattgataagagataagcttgtgatagccatgcaaatagccaatctgaaactctataaacgaaaatcgccgaagaactgggcaataatagaaagtagttttaataataaagcaggtgatttcgccatatcgcaaatattgaaatgcatgtccctggaagtagttccagtttctcgcagtgcatattatttgtcgaacaacaggcatgagcttttaacgcctacaagctttttaatgaaacaaaaaagctaatgatatcccagccagcatttatatggatgaatattcttcaggcgatttggtatcgcaaatcttgtcaaatcatttgatcaaattaaatcataaataacttagaactgtattaatttattacatgattagtaagtccaatataaaacggatatgaagtgattgtttttgaccaatttctgtcaaaatctgagggcttgagaattcaagtttagttagattagacaaccctggttggctcaggattgataaactcaacatttcccttcctcagatatgcggcatattgctgatcgtattcggagctctgctgttcagcaaagtccgtaacatggatgacttcgcggaagccctgcgaacccagcaggtgcccgtaacgatgatcatcctgggcaccatcatcctgctgatttcctggttcggctgctgcggagccattcgggaatcctactgcatgtccatgacggtagagtactgatcctgcatcgtgccattcatcttgcaattcaaaatgtattctttgtggcagtactcgatcttgctgttcgtcctgatgattggccaactggctttggtgatctacatgtgggtgcagaaggacaagtacctggagatcatgggcgacgtggtcgagaaggcctggaaccatcgcaccagtcgttccgactacatggacgcgattcagatcagcgtaagtatttagggacttccaaggacatgtgacccgccttcaactgactttctgccgctcccgcagatgaaatgctgcggacgcagtggctacaccgactacgcctaccagggcaagttccctccctcctgctgcagcgacaccaacaactgccgctgggagaccgtctaccggcggggatgcaaggtcaccttcgttgagtctgggacaggaacagcgacatcatcaagtatgccggtctggtcatcgccgccatcgaagtaagttattgtccagagtaacgcaatcgaacgaaatcgatcatcgaatctaggtgcttccccatgtgaatttcgaaaatatgatggatgggttcatgttacctaccttccattgtgatttcttggggataaccaaaaagtactaagtaatgtaaatcataattcgtagcaatgcagtttagtttgttattttaccataagcgttatgagatttacacctacatgtatatcttccaatataccatactctgtttgctttcagtttgtgggattcgttttcgcctgttgcttggcgaacagcattcggaactatagacgccgtgcggaatattaatcgacaaaggactaaggccttgcactaattttaattgaaaccgaaagtacgaattatgttgcccaattttacgaatatttacctgatacagatggccattcaaatttgcataatctcaagcgtaagcagcaaatgcagcaaatccaatgacgaatgcgtaacgatcacttttgtaagatcgtttgttcaaagttacactgaatgtgctaatatgtttaactgtacaaaataacttatactcctggagattgcaataaacggagaaatttatttacaatttacgaaaagagttcagtctttgtcttaatgggaaagcttacattgtttgcaattcgacttaatccctaaagcacctatttttctaaattgccacgggaggatttcggccattcgcgataacgttttaatctgcaaagtaataagtataaatagagttggccgaaaccaacaagtacactttgattacagatcattatcaatcattggctctattgacatatttccgtagaactaacctatcagaagactatatttagttagttagctttttagggctcagacgaaatcttatctccattgagctattttatctatgaagggcacatagccgttttgtgaatgtcaatgggaaattattccgccgtggaaaccccaatagttgccaaaatcttgttgaagttaggctgggagtgcactcgctaaaaggtttattgctcgattgatagtacataaatctaggcgataagatcggggactcacggggaaacggactccaagcaacgtaatatgtgagtcagcgtgcaccgcgtactcttgactggtgataaggcaaggtgtggagggtgtgaatgattcatcttatgaacgatctaacgcccccaagatggaatcgcacgagggctagataaaattccgccaccagcagtttgcacctaccattcgttgaatgaatcattgcgccaaggatgtaatttcccaggttcggaccaccacaatgatctggtatctcgtgggtgcaaagcgattcaccaagtacaagtacatgggcatcggagcttccagcacaagtacatacggaattttatggccgagataagagcgcagccgataagatgaggactccgagtaagctttaatagccgcgttctgtccgagggcccattcagttagacgaacatcgtcacatcgaacgaacggattatccagctagccaacgagaaacccgaacagaacccagcaccatgaactgtctatccgcgatgttcaagtacctgctgtacttgctca

SEQ ID NO: 28412 - DNA, 1109 bp, DROSOPHILA
gttagcattgtcaactgctcacgaacggttcgaaaagcggagcgcgcgtaaaatcattctgtaaatcattcaaaaggcggaaaactcaagttgcagttcttcatccatctccaccagcaatctctggcaaaactcaggcaaaatgagctgcggaatctccatggttaaatatatcctatttatatttaatttgctctgttcgatatgcggcatattgctgatcgtattcggagctctgctgttcagcaaagtccgtaacatggatgacttcgcggaagccctgcgaacccagcaggtgcccgtaacgatgatcatcctgggcaccatcatcctgctgatttcctggttcggctgctgcggagccattcgggaatcctactgcatgtccatgacgtactcgatcttgctgttcgtcctgatgattggccaactggctttggtgatctacatgtgggtgcagaaggacaagtacctggagatcatgggcgacgtggtcgagaaggcctggaaccatcgcaccagtcgttccgactacatggacgcgattcagatcagcatgaaatgctgcggacgcagtggctacaccgactacgcctaccagggcaagttccctccctcctgctgcagcgacaccaacaactgccgctgggagaccgtctaccggcggggatgcaaggtcaccttcgttgagtctgggacaggaacagcgacatcatcaagtatgccggtctggtcatcgccgccatcgaatttgtgggattcgttttcgcctgttgcttggcgaacagcattcggaactatagacgccgtgcggaatattaatcgacaaaggactaaggccttgcactaattttaattgaaaccgaaagtacgaattatgttgcccaattttacgaatatttacctgatacagatggccattcaaatttgcataatctcaagcgtaagcagcaaatgcagcaaatccaatgacgaatgcgtaacgatcacttttgtaagatcgtttgttcaaagttacactgaatgtgctaatatgtttaactgtacaaaataacttatactcctggagattgcaataaacggagaaatttatttacaatttacgaaaa

SEQ ID NO: 28413 - protein, 235 aa, DROSOPHILA
MSCGISMVKYILFIFNLLCSICGILLIVFGALLFSKVRNMDDFAEALRTQQVPVTMIILGTIILLISWFGCCGAIRESYCMSMTYSILLFVLMIGQLALVIYMWVQKDKYLEIMGDVVEKAWNHRTSRSDYMDAIQISMKCCGRSGYTDYAYQGKFPPSCCSDTNNCRWETVYRRGCKVTFVESGTGTATSSSMPVWSSPPSNLWDSFSPVAWRTAFGTIDAVRNINRQRTKALH

SEQ ID NO: 28414 - DNA, 6654 bp, DROSOPHILA
tggactaaactcgcagattcctgtaacttggaagcaccacgagtttgctttagaagatgcctttccgttgaactaaaactagacgagtaaagcgtatctcaaacattgtatcttccgaaccaaaatagtgctgcatacttttcgggatatgtcttattcaatgtaagtaatacaaaaagaaaaaaggtaacttcttaaaacttgtaatatttgtcacaaatgaatgacgactagatttggccatgtctgtaacaataaacgtacaaaatattcgaagttgcagaaatggggatccagcattcggatttggttttttgtcaaacttttaaatatagaatcggaccacatctttttaagaccttaaaaaactgatttgaagttagacccctcataatgccaactaaatttgttaaacaaaaatatgcccctatatgccaatcaaatttaaatacaatgctttctcagcgtttcagttaaatactttgggttgtttaatggttttatacgtatacatgtgctaagtccatgtatcttatatttcgtaaatccatagattttgttcgacgaaactttgctaaatgatattgatctttcaaatataacttgttaatttcctttcatcgccgtggcaaatccttcgagagtgagtactacttgttaaacgcatatatgaggaaaatttattgatgaataatgcgaacatgcaaacggaacacatccccgaattcacacaaagcatctctgtggtatctcttttggttttttatttgttgcatcaactccgcggaactccagctacctcactgcaggtcgtagtagtcgacgttattggcggtcagatgttctctattaatttggagcgtgctgctgtttccacttcaaacttttattaacatatatagtatgggtttgccggtatattgcaaacgggaactaagtgtagattcgtgaatgatatcagactggactgcaaacgtttagtttctagcatgttttttttactctctcctttatttgttggaatttttgagttttatataggtggagttttcaaaatgacattaattcataggggtgagttttatatatagttcgactggctgttgcaggtgctggtttcgaatttttggatggggatgctaaagggcggctccgtttgtgttcatcctcatttagccatcaaccaagttcttactcgccattcttttgttcgtcctcagattcggattctgaaagagaatagaatacaaaatgttagtatgggggcttcaattggtacaaactgaaaagatgtgcagctccggttatgctgtccaaatgattattggccaaatttaactatggaaagttatctggacacccaaccattcaaatgctttggcacaactccccgcttggctcaatcgaatgaagcaaccattcggagcttttatgaggggattgtgcatgcggactaggacaaatgcagctgtccaaacgattattggccaaattaaccacggcattgggttatatgggcacccaatcattctttcgcttttgcatactgtacatgaaccctttaaaactggttcctaataatgggaacactttaaaagcttggtaagaagcatgctcggtgaagtcagctatttgtgtccaagttttcattggcctttgatgctcggattttgtgaggcaacaaggcaagcaaaaactcaaatgctcttgcaattttgtacaatgaaaatgtcatccaggacaagaccattctcaaaaagtgcactgtgtaaagtttcgaaggaagcaaaatttgaatatttatattgtccaggttttcattggcctacgttgttcagtgaatggaaatcaacgaggcaagcaaaaaacccaaatttctcttgcaattacgtaccagaatcaagctatttaagacaagaccattctcaaaaattgcacgctgataacatttatcaaaacatactaaccttcttcggctgactgaagccattcgacaaactttcgcatttgttcaaggaaatgcattttgcccttgtttgagtggccctccttgtaccagcgcaagatgatctcctcggacaggacctcggtcttgtagaacaacaaaatgattttctggaaggccttcatgaagttcatgttctcgtagcagaattcctgcaccttcaagattagggccaattccgaacggtcggtcgaggcgaaagcctgcaacagtgggcagtagttcttcagatgacgaacagcctgatcggtaaccagctcctccttcttgttccattcgcccaatgacatgatggtggaccaaatctggtaaagatcatacatgagatttagtaaggaaatcatccagttggattatttacgcatcgacttacaataacaattatttcatgatcgggaatgttggtgcgctgcgagaagtccttaatgtctgaggttatctcattatatggcttctcatcgttgatatcatcgatgagcgcctgctgcaactcacgcttcgcctcctggctagcctgagccttatgtagcttgacgatctcgttaagttctttgtcaagaaaaacttgtttaaaatattcctcagtacgtttgttcggtgggaaaaagtccataagtctggaaaaacgtgaaaaagtggaaccattattaataatttaagttaacgcattcaataatcaaccttaaatgacgtattgaggtgtacgaaattaaatcagcacccaaatgaagcgaaaggtcatttgcgaattgggtaaaactccgtcgaactttcttactctaggaatatcaattaaagatgcacaactggatcattgagtcatcttcctgagaacattccggggctaaaaacaaatcacaactaaaaacttacttgctttccagtccacccttcttaagcgcctgaatcagatatgcaatgcccttctcttgcttgaacgtctggaacagctctagtagaaactccaatgcaatgccatccttgattaggtgctcgttgtttagtaccagtaaaacatttggcggtacagaaccgttgactgttgatcaaaaatagggttaaatatagggttagtcaaatgttttcgcaaaacaagtttagacggccggctagcaatcctgtccttgggctcgtggcccttagatgtggttagttcatccaagagtcagtataccaagtgaaggattactttagcccctcagctgcaagttgaacaagtgtttatcgaaacaactaattgaaagaccgaatgggcagacgcaagcaatgcacaggaggaacaggaacataaatgttaagacttacctaaccagagcgctgtcatacgcgcaagcttgatgcgttcactaggagtaaagccctttacgaataatagaacctttcccatctcctcttcgaacattttctcaaggtacttgtaccgtctgatgagcttgacaaatacctggaaaaggtaaagtgtgattgcccctgttagcggatggtgaaattttactgtgttctcacgcaggaggcttttgtatttgttgttgcaacattagaaatctttagattgctggcggtagtaattttacaaaataaagacaagtaaaatgtggctttttattttgcatattttgacaccgattgagttgttgagatgcataaccggttctaataatatgcactttgattcaatagcgtgaccttcgcagtggttgcatgcatatagtatatatatatagtgttgaataaagagtagttgttgacacataagaaatcttcagaacgttagtgtttaggacaaaccaaagacaagtaaatgtgttgattgttattgcatattcttgacaccgattacatttttgaaactttatagtcagctctaatgatatgcagccacttcacgaatttcatacttttaagtggatccgaagaaaatcatttagtagtaaataaacgttttagcttggaaaacaacaagagctcaacttgtgttgcaatcaaaccaattttcgtttactcataatcataatttaagtatgacctgctaaaagattacaaacctgctcatggttgcgcatgctctccatgctctcgggcgcatcgaagatgcagtagcttgtgcgcggcttttcgccatcctgagatatagaaccaccaggcactgcaattgaaacgaggatggaaaagggtcagtgaagagactaaacacattacttgcagcggaaaacttacctagtagacctcctgcaatcaatatgtcaaagagaacttcaccgtagcgacgatagtcgagcttgttgcccgcgctgtctagatatttagagatttgttccaggtcgccttcagttttttcgagaccagcaatgaccgcatcacggaatcccgttgggtcatatttttctctttcatctctttttctggtcttgatgcgttgacccgatagcactggtctttcagttttttgactcatacaataaattgctgcaaaggtaaatgtggatcagagatggaagcggttttggtttgcccctgtaagtttttatttctgaccagactaaattatcatggccactagattcatttttagatttatcttaattttagtgtaagatgactaaggtggtctccaagcggtggaaaaccgttccctgtatatgtattctcgttgcgctcataatcaaactacaacattttcacctatgaccggcgtttaagtggaaactctagtgaaaactgagcctaagaaagccttaacctaaaaatgccagcgtacatgtgctttaaacacacacattcaagagcggagaacgggcacacttcacatctctttttaattatctctctttttcacacacacatacccactgtgcattttacagtttgataatgtcgacaaaagaaataaaaagaattgagaggtgaggcgaccaagaaatcgacatagaaacgcagaataaagtgaaattttgacgtggttacttgtgttaggtagcgcgctggggaaatgaggtcattgtgcatgtagtgcacataaaaacgcgccgatgactgtgtgctagttggccgggaaaattgtcatagcagcgaaaacgcaaaaattaaattatctaggctatcaagtacacattggtacatataaggaacggcaacttacgctttcacccaaggatattaagtctggccctgtgtttgccgcttccgcgtgtccttgcaatcaattgaaatcagtcgtgtgcgagtgtagtgtgtatgtgtgtgtgtgtgtgcctgttgctttttcacaactaacgaacgtgcgagaatatgtaatttaatttaacctcacgaagcgctggctggttaatgcttctcactcgagtcgacgaaaaacaaagagacagatggcagatcccttcttttcttacctctcttttcttatgagcgagcttttgcacggtaaaattgacacgcacgcacacacacaacaacaaagaaaaggggagagcaaatagaaaatataattttttgtaacggaatttacttttatgccttcaaaataaacgttaacaattttgctcagactacgtccggaattctatttttaacagctatcacaatcggttactaggtatatgtgttgtttgcctcgaatccagcgcccctctgctcgcaccactttgttaaacgaaattcggagagcgaatgagacgacacacgagcgcacgaacgaagcggacgagccgagaacgaagacatgtggttcggcgccattttgaagcgatacactgacatggcgaaagcggaatgatgggcacagggaaaacgaaaattagggggaaacggtgagaaaaaatgtgggatgggggttcaaagtgtgtatattgctgtcgcgcttattaaataatgagcaaggtacagtcgaacaaaggccgacggccaccaaatgattttttgcatgaatatatgactgcccgatgactaatctggccttaggtacgcacgcagttcgtacataaccccttttccaacgaaagcgcagacaaaggattggtcaaggccagagaaatgaccaggaccgcgattttactcgccctatttgtctttctgtgtacttaggtctactctagcgctatttttcactcctatacttacgattaaaacaaaaaaatctgttttgctgcgaataaaagtaactttttgcgtagctgttgggctgcttcttctggatgacttgcggtatgaccgtggcctgcttcgtacgcaatggtacagagctcactaaggtgtccaaaaggtggcaacattttggtgaagctgttggctggccccactaaccggacctgaaaatggtgcagcgctgccggacatttaacggaatcaaagattccacaaaagtcatgtttgcattaacaaaattcatatttaaccttaacaaattcaacaaattaagttaagtccattttagtagcgttgcgaggagtttattttcgaaaatacgcctttgtatatattatatatttttcctccactttaaacaaaatcgaaaggtgtccatttgtcagctatttaaacaatatggcatcgccgccttacttgctcagtaagaaaatttaactgttttttttttgcgcacctgaaagcggcgatagacattgtttacttttagtttatatttacattatcca

SEQ ID NO: 28415 - DNA, 1802 bp, DROSOPHILA
tttaacaaagtggtgcgagcagaggggcgctggattcgaggcaaacaacacatatacctactcgctcataagaaaagagaggtaagaaaagaagggatctgccatctgtctctttgtttttcgtcgactcgagtgagaagcattaaccagccagcgcttcgtgaggttaaattaaattacatattctcgcacgttcgttagttgtgaaaaagcaacaggcacacacacacacacatacacactacactcgcacacgactgatttcaattgattgcaaggacacgcggaagcggcaaacacagggccagacttaatatccttgggtgaaagccaatttattgtatgagtcaaaaaactgaaagaccagtgctatcgggtcaacgcatcaagaccagaaaaagagatgaaagagaaaaatatgacccaacgggattccgtgatgcggtcattgctggtctcgaaaaaactgaaggcgacctggaacaaatctctaaatatctagacagcgcgggcaacaagctcgactatcgtcgctacggtgaagttctctttgacatattgattgcaggaggtctactagtgcctggtggttctatatctcaggatggcgaaaagccgcgcacaagctactgcatcttcgatgcgcccgagagcatggagagcatgcgcaaccatgagcaggtatttgtcaagctcatcagacggtacaagtaccttgagaaaatgttcgaagaggagatgggaaaggttctattattcgtaaagggctttactcctagtgaacgcatcaagcttgcgcgtatgacagcgctctggttagtcaacggttctgtaccgccaaatgttttactggtactaaacaacgagcacctaatcaaggatggcattgcattggagtttctactagagctgttccagacgttcaagcaagagaagggcattgcatatctgattcaggcgcttaagaagggtggactggaaagcaaacttatggactttttcccaccgaacaaacgtactgaggaatattttaaacaagtttttcttgacaaagaacttaacgagatcgtcaagctacataaggctcaggctagccaggaggcgaagcgtgagttgcagcaggcgctcatcgatgatatcaacgatgagaagccatataatgagataacctcagacattaaggacttctcgcagcgcaccaacattcccgatcatgaaataattgttattatttggtccaccatcatgtcattgggcgaatggaacaagaaggaggagctggttaccgatcaggctgttcgtcatctgaagaactactgcccactgttgcaggctttcgcctcgaccgaccgttcggaattggccctaatcttgaaggtgcaggaattctgctacgagaacatgaacttcatgaaggccttccagaaaatcattttgttgttctacaagaccgaggtcctgtccgaggagatcatcttgcgctggtacaaggagggccactcaaacaagggcaaaatgcatttccttgaacaaatgcgaaagtttgtcgaatggcttcagtcagccgaagaagaatccgaatctgaggacgaacaaaagaatggcgagtaagaacttggttgatggctaaatgaggatgaacacaaacggagccgccctttagcatccccatccaaaaattcgaaaccagcacctgcaacagccagtcgaactatatataaaactcacccctatgaattaatgtcattttgaaaactccacctatataaaactcaaaaattccaacaaataaaggagagagt

SEQ ID NO: 28416 - protein, 422 aa, DROSOPHILA; identical to SEQ ID NO: 3576

SEQ ID NO: 28417 - DNA, 3930 bp, DROSOPHILA
tcgtcgcataaaaaaagcaagcgccgccactcgtccccctcgtcatcgtctagcagcagtgggagcagctctagcagcgatagcgacgacagtagcagcacctcgagcggatccaaaacttcaggcagccgcagcaagcgatccagtcggcatggacaccgcagccaccacagcagcagtcggagcaaatacgaacgtcgcgatcgcgacagagaaagggagcgggcgcgggagcgagagcgggaccgtgataggagtcatcgccagcatcgtagtagccagcttagtggaagtcaccaccagaaacagcgccgacatcgcgagtccagccattcaggcgaagatgctggcggtagcagcagttaccaccgctcctcgcggcagagcagcagccgtagccatgatcatggcagcaaccgtagccatgatcacggcagcagcagcagcggacggaagcggcaccgcacgagatcccgctccaagtcgcgaagcactcaccactccagctcgaaagcatactcctccacttccgcgtcgcatccgcgcaagcgccattaagaaaaatcttgcgcgtaaaaatccgaagttaattgttaatattacataattattatttcttctgtttaagatgctttttagtaaacagttttaaatcagcctaataaattaaaaactcagaaaaatttgtttttttttcatgtgttatgcgaatatcctcataataattagatatatttttaaagttggacatacgggaatacgggaattaagttcccaataatacaaacaagtaaacttttttaaattcaataaataatttattttttctataagcaataacatttttgctaaattaagacttggtaattaggtaatactattgttgttctatggaatattcgatcgaaacattcttatcagtctcaaaaacttaaaacaaacttataatataacccatatgttataacccattgatgaacaaaaattagactctttggccttagtcgacctcctcgaccgtgggtccagagtagcctccaaatcctcccgcctgctggccgcagtttgctcccggaccaccagctccagctcccgcaccctgctgatgcatcttggtcatgatgggggagcagtggcgggtgagctcctccagcttgtggtcgaactcctccttctcggcagtggtgttgctgtccagccaccggatagtgtcgttgcacttgtccaagacggagttcttgtcagcctcgtccaatttgccagcaggtgcctgttccacggcctgcttcacattgaagacgtagctctccagggcatttctagaggttattcgctggcgatgcttctcgtcctcgtcggcgtacttttcagcctcgttcaccatgcgatcaatctcggcctgcgagagccgtcccttgtcgttcttgatcgtgatgttcttggccttgcccgtgctcatctccttggcgctgacgttcaggattccattggcgtccaagtcgaaggtaacttctatctggggcacaccccttggtgcaggtggaatgccggacagatcgaaggtgcccaatgcattgttgtccttcgtcatcgcacgttcgccctcatacacctgaatggagactccgggctggttgtccgcgtatgtggagaacgtcttagtctgcttgcacggaatgcgacagttgcgctcgatcagcttggtcattacacctccagcggtctcaattcccaatgaaagtggggccacgtccaccagcagcacgtcctggatcttgccgctctggtctccgctgaggatagcggcctgcacagcagctccgtatgccactgcctcgtctgggttgatggataggttgaggttcttgccgtggaagaactcctgcagcagactttgcaccttgggaatgcgagtggatccgccgacgagcacgatgtcgtggatctgacccttgtccatcttggcatcgttgagggccttctccacaggctgcagggtgttgcggaagaggtccgcgcacagctcctcaaacctggcacggcttactttggtgtagaagtcttggccctcaaacaatgcgtcgatctcgatggtggcctccgtgctagaggagagtgtgcgcttggcccgttcagctgctgttctgaggcgtcgtagggcgcgagggttggagcgcagatccttcttgtacttgcgcttgaactcctccgccaggtgggtgactagccggttgtcaaagtcctcgccgcccaagtgtgtgtctccggctgtggagcgcacctcgaacagagatccctcgtcgatggtcaggatggagacatcgaaggtgccgccgcccaagtcgaagataagcacattgcgctcacccttgaggttcttgtccagtccgtaggccaatgctgccgccgtgggctcattgatgatgcggagcacattcaggccggcgatgtgaccggcgtctttggtagcctggcgctgagagtcgttgaagtaagctggaactgtgatgactgcatccgtgatgctctcgcccagatacgcctccgccgtctccttcatcttggtcagcaccatcgaactgatctcctcgggagcaaatctcttggactcaccccttatactccaccccgatcttgggctttccgccgtcgcttacaactttgaaaggccagtgcttcatgtcctctgcgattttgggatcgtcgtattttcggccgatgagtcgcttggcgtcaaacactgtgtttctggggttcatggccacctggttcttggccggatcaccaatgaggcgttccgagtctgtgaaagccacgtaggacggcgtggtgcggttgccctggtcattggcgataatctcaaccttgccatgctggtagacacccacgcaggagtaggtggtgcccagatcgattccaatagcaggcattgtgtgtgagttcttctttctcggtaacttgttgaaagtattcagagttctcttcttgtattcaataattacttcttggcagatttcagtagttgcagttgatttacttggttgctggttacttttaattgattcactttaacttgcactttactgcagattgtttagcttgttcagctgcgcttgtttatttgcttagctttcgcttagcgacgtgttcactttgcttgtttgaattgaattgtcgctccgtagacgaagcgcctctatttatactccggcgctcttttcgcgaacattcgaggcgcgctctctcgaaccaacgagagcagtatgtcgtttactgtgtgacagagtgagagagcattagtgcagagagggagagacccaaaaagaaaagagacaataacgaataacggccagagaaatttctcgagttttctttctgccaaacaaatgacctaccacaataaccagtttgttttgggattctagaatattcgctttattttggaaatttctttataaatacggctgcttaagttaattatgttagagataatcgaagggtttgttacgcggatgttgtccgccagaaaggcctatggaactttgacaagatattcttaaaaatgtatttacatactaacttaaaaaagctatttatttattagattaatacagacaattgcatgcagatgattgttagtgttttttatttaaaattacgtaaaggttgtcaagactgttgttgtcaactgtttacactgtgaaataagttgaatttttcgctttaaaggtaaatatgaaggtttctttgcttaattaaacgcaatttttttattcaatataaacaatatttattttacttataaatcaaaaacaaattaaaaatattaaatatacaagaaaataaacaacaaattccaagtttgcacacttttgagtctatatataaacgttagaagatcacacagatttacatatgtatgtacatatg

SEQ ID NO: 28418 - DNA, 1890 bp, DROSOPHILA
atgcctgctattggaatcgatctgggcaccacctactcctgcgtgggtgtctaccagcatggcaaggttgagattatcgccaatgaccagggcaaccgcaccacgccgtcctacgtggctttcacagactcggaacgcctcattggtgatccggccaagaaccaggtggccatgaaccccagaaacacagtgtttgacgccaagcgactcatcggccgaaaatacgacgatcccaaaatcgcagaggacatgaagcactggcctttcaaagttgtaagcgacggcggaaagcccaagatcggggagatcagttcgatggtgctgaccaagatgaaggagacggcggaggcgtatctgggcgagagcatcacggatgcagtcatcacagttccagcttacttcaacgactctcagcgccaggctaccaaagacgccggtcacatcgccggcctgaatgtgctccgcatcatcaatgagcccacggcggcagcattggcctacggactggacaagaacctcaagggtgagcgcaatgtgcttatcttcgacttgggcggcggcaccttcgatgtctccatcctgaccatcgacgagggatctctgttcgaggtgcgctccacagccggagacacacacttgggcggcgaggactttgacaaccggctagtcacccacctggcggaggagttcaagcgcaagtacaagaaggatctgcgctccaaccctcgcgccctacgacgcctcagaacagcagctgaacgggccaagcgcacactctcctctagcacggaggccaccatcgagatcgacgcattgtttgagggccaagacttctacaccaaagtaagccgtgccaggtttgaggagctgtgcgcggacctcttccgcaacaccctgcagcctgtggagaaggccctcaacgatgccaagatggacaagggtcagatccacgacatcgtgctcgtcggcggatccactcgcattcccaaggtgcaaagtctgctgcaggagttcttccacggcaagaacctcaacctatccatcaacccagacgaggcagtggcatacggagctgctgtgcaggccgctatcctcagcggagaccagagcggcaagatccaggacgtgctgctggtggacgtggccccactttcattgggaattgagaccgctggaggtgtaatgaccaagctgatcgagcgcaactgtcgcattccgtgcaagcagactaagacgttctccacatacgcggacaaccagcccggagtctccattcaggtgtatgagggcgaacgtgcgatgacgaaggacaacaatgcattgggcaccttcgatctgtccggcattccacctgcaccaaggggtgtgccccagatagaagttaccttcgacttggacgccaatggaatcctgaacgtcagcgccaaggagatgagcacgggcaaggccaagaacatcacgatcaagaacgacaagggacggctctcgcaggccgagattgatcgcatggtgaacgaggctgaaaagtacgccgacgaggacgagaagcatcgccagcgaataacctctagaaatgccctggagagctacgtcttcaatgtgaagcaggccgtggaacaggcacctgctggcaaattggacgaggctgacaagaactccgtcttggacaagtgcaacgacactatccggtggctggacagcaacaccactgccgagaaggaggagttcgaccacaagctggaggagctcacccgccactgctcccccatcatgaccaagatgcatcagcagggtgcgggagctggagctggtggtccgggagcaaactgcggccagcaggcgggaggatttggaggctactctggacccacggtcgaggaggtcgactaa

SEQ ID NO: 28419 - protein, 629 aa, DROSOPHILA
MPAIGIDLGTTYSCVGVYQHGKVEIIANDQGNRTTPSYVAFTDSERLIGDPAKNQVAMNPRNTVFDAKRLIGRKYDDPKIAEDMKHWPFKVVSDGGKPKIGEISSMVLTKMKETAEAYLGESITDAVITVPAYFNDSQRQATKDAGHIAGLNVLRIINEPTAAALAYGLDKNLKGERNVLIFDLGGGTFDVSILTIDEGSLFEVRSTAGDTHLGGEDFDNRLVTHLAEEFKRKYKKDLRSNPRALRRLRTAAERAKRTLSSSTEATIEIDALFEGQDFYTKVSRARFEELCADLFRNTLQPVEKALNDAKMDKGQIHDIVLVGGSTRIPKVQSLLQEFFHGKNLNLSINPDEAVAYGAAVQAAILSGDQSGKIQDVLLVDVAPLSLGIETAGGVMTKLIERNCRIPCKQTKTFSTYADNQPGVSIQVYEGERAMTKDNNALGTFDLSGIPPAPRGVPQIEVTFDLDANGILNVSAKEMSTGKAKNITIKNDKGRLSQAEIDRMVNEAEKYADEDEKHRQRITSRNALESYVFNVKQAVEQAPAGKLDEADKNSVLDKCNDTIRWLDSNTTAEKEEFDHKLEELTRHCSPIMTKMHQQGAGAGAGGPGANCGQQAGGFGGYSGPTVEEVD

SEQ ID NO: 28420 - DNA, 20978 bp, DROSOPHILA
cgaacctcctctggaagctcttgaatttcctcaggtttctcttcttcatacggaacttcctcaacggtgaccgttgtttcgggttgcttgtcgtcctcttcgacggtttcaattttggtgacttctttgcttgtcacccttgaccttcttgataacacgagtacggatcttcttcttcttaggcttgccatcttccgtaacggtttcaacgacgcaaacctcctctggaagctcttgaatttcctcaggtttctcttcttcatacggaagttcctcaacaggtgaccagttgtttcgggttgcttgtcgtcttcctcgacggtttcaattttggtgaattcttgcttgtcacccttgaccttcttaataacacgagtacggatcttcttcttcttaggcttgccatcttccgttatggtttccaccacgcgaacctcctctggaagctcttgaatttcctcaggtttctcttcttcatacggaacttcctcaacggtgaccgttgtttcgggttgtttgtcgtcctcctcgacggtttcaattttggtgacttcttgcttgtcacccttgaccttcttaataacacgagtacggatcttcttcttcttaggcttgccatcttccgtaacggtttcaacgacgcgaacctcctctggaagctcttgaatttcctcaggtttctcttcttcatacggaacttcctcaacggttaccgttgtttcgggttgtttgtcgtcctcctcgacggtttcaattttggtgacttcttgcttgtcacccttgaccttcttgataacacgagtacggatcttcttcttcttaggcttgccatcttccgcaacggtttcaacgacgcgaacctcctctggaagctcttgaatttcctcaggtttctcttcttcatacggaacttcctcaacggtgaccggttgtttcgggttgtttgtcggtcctcctcgacggtttcaattttggtgacttcttgcttgtcacccttgaccttcttgataacacgagtacgggatcttcttcttcttaggcttgccatcttccgtaacggtttcaacgacgcgaacctcctctggaagctcttgaatttcctcaggcttctcttcttcatacggaacttcctcaacagtgaccgtcgtttcgggttgcttgtcgtcctcttcgacggtttcgattttggtgacttcttgcttgtcacccttgaccttcttgataacacgagtacggatcttcttcttcttaggcttgccatcttccgtaacggtttcaacgacgcgaacctcttctggaatctcttggatttcctcaggcttctcttcttgaaacggaagttcttcaacggtgaccgtcgtttcgggttgcttgtcgtcctcctcaacggtttcaatcttggtgacttcttgtttattacccttgactttttttattaaacgagttcgaatcatctttttgctcggggagccgtcttcagatattgtttcaatagtttttataatttctggcgattctgtgatttgagtcgtgctggatgctagtttatgtgttggtgttttttgttttatgtgtgttgtgtctgtggcttgatttgtatctgtgtaaaaaagtgtgcatttagtatattgtattgtattgctattgtggcattgctttgttttgtgtaatatgtgctttgggttcgaagggacggtgctagtgaaagtaatacgcctttttttaactaactaaatataatctaactatatacttacccgtttccacttttaccgttttatctaagctctttgtcgcgaaatgtttatacatttgaacatcctgcattacgtttttttgagtactatcaatgtcatctcttaaggcttgtgttgttactagtgattcagtggtcgttgaatattcctcttcgtgtgttctggtttcaaagtgtgcatttcgggaaatctgtggtgaagtttttaggatcgactctgatgcaaattgtggagtttgtaaagcattttctaattttttttcttctatggctggcaactgaatcgatgcggcaatacacatgttgggttgttctgtcgtgacagaagttatgttttcttctacgtctgcccgagtgttaaccaatttagcttcttctacagtaatctgtacatatggaatcccaccttcctcgctgtaagcaaggtttgtggatgattttgtaactggcattgcttttagctcctggggttcgaccgttgcaaggctacccaaagatggtaccgatgtcacctcttgtactaccgaaaccactaactcagaattcaaatttgaattggaagtcaggtttacagttcccggcttaaaatcaccatgcccttcaatgttttcataaatattaacagttgcattttcggctggcttaagaaatgtcggtacagaactagtagttgctcgcgttaatgcgtgcggctcaaacgcaatatcaggtgtttcttcataagcaagttgctgacaaacatttacagaattctgtggagtttgctgagttaagttagctgttttttgcagtggaattttaagttcatatgtttcttgaatagagctaacgctaacgacttcctcggttaccaaagattgaagttcatcagcagcagcttgagctgtgtcctgaagaatgttaggtttaggtaggatgtcctcttttaagaatgtcgattgtattgttgttaaataagctttgctcgtatcagaattcttcgataccttaacaaataagccatgtttgttttgatcttgaattgctttagtttgttcgtaaacattaacctcagacacgtttgtgtgtacgtggtcttcagctgatttaatcctagcttgggcaatgttgtctaaaggagcttgagcttcactttccatttctaagggaacttgtgtatctataacgtgcgattgattgactatatcggtagacgttaaagtggctaataatgtagatggctgtggggctaaatgaataccacccacattatctattggcaccacttcaataacaactgtttccagctgagtgccttcggtaattggtttacaaaaattctctatttcggcattttcaaaaatatcttccttatgcataactagattatccatttgaacgtgaactttatttgactccacctgagcgacatactcctgttgcgccttctgcacagcgacatgcgtatctttaagaagtacagatgattctaagggaatgacatcgaatgtggtggtgccttgaagtagatttaaagatggttttgctctggcctccaaaggagatacagtcggtattgacaactccttatcgaaaactggtggttgttgagaatctgatgtcaccttaaacgtactgtctatcgactcgacagcagaaaccggaagtaatcgtccatctgtgagttcctcggattcctctatcgcttgggtttctctgacgcgtacttcatgctgtgtttcttcatagtttgtctgcgcaagcgatggttttggaggcgaacttaacagaacatcaattccttcaacaggatgcgtctttgtagtcatcgctaaaccgagccgcgatggaataatatcagttgttgctgccacataagattgctcacgagtcgtaatctctttttcagcctcaaaagtttgttggagatcggttgcataaacttgaggtagatcgtgagtgatctccgcttgttgtatgttatatttatcaactttttgctcctgtcccatggcttcatatactgttgcttcgtccacgagcttcgcatgaagattttggtcatccttaagaagtttgggtttgtgggtcggtgtagtttcaagacccagattttgttcagtttcaaatgcaatttgatcctctgcgattattgattgacttaggctatcctgcacatttgtggcaatttgttgatcggcagataagatttcgaaattttcagatgcattaaaggcaacgttttctgtcaccattgtatgccgaaagggaactagagatttttgaggcactataccagctggaaactcggaatcaactgaatttatcgaagagtcgtatacaatcatttcagatgactttgtttcatataaatgatcaatattaggagatgcacatttgtttgaaactttaaagtccgtcatgtcactggtaccttgttgttcttgcacgtattcagttagaggcaaccgatgtaactctgaagaagcaggtattgccttctccagcggaattaagggagctttaaggtcctcctcatgctcgagtgtttcttcttgtcgaacttgtgcgatgcctgtcgtgcagtccaaaataattttagccagacggccacttatatgatcaacatctttcagggactcctctttctctaaaatatcagtctctcttacatttatctcgtgcaaactttttattgaagattggatcgtttccaatgcgggtaatactgggttcaggctcgaaacatgttcgagaacatttgtctgctcggaaatggagattttctgatcagattcataaggctttggcttaatatgaactggctgagtaatgtttaagtcctttaattcttctgtactttcacttacaacagctgttgtcgtttttaacgatgttgtgctttcaattaactgtacacgacctttagatgatttattgtaatctggtgtattcaaatcgcttagaacatcaaacgaatcgattttctcaacgttcggtaaagtgatttccccaatattaacatttgcctgataataaggcaccttctgttcatctagtctatccaaagattccatatgctggggcctcgtgatattggccacttgcagagctgacgaagttccaatggcagcgctttgttcaggatggcgctctttaactgatagaacgctttctccctctaaggtaacacatgagctggtttccagagattgcagcaacccaaactggctttctgttgtttgtgtctgaggctttagatcctctgtgcgtgttagagtactttctagcggctcctgctctctaacatctgttccaaattgttgatgcatgctaatatctgcatttaccgccgtcggtttggtatcttcggttttatcgattgtcgactccatcggaagtacaactaggccctcagcatatttaaatccatcggtgacagtttcggctttagtaagcttttgattaggtaagacatcaataatatccgtacttgactcggttatctgcacgtttgttacttccaaaggttgttggttttcatctagaattgtgtcccccgttttgaactcaggatgttgaaaggcatcaatgtgactagtactctctaacatatctggcttactagtaactccaatcgacatcgtctcaaagacttgattagctgatacagactttgtttgctccgtaataatatcacttgatgtcagacctggttgaacttcgtatatgcttgtaacctttaactcagcaggaaacatatttgatgtagctaactgtggtgccagttctatattggaagatagaatttcctccttctccactgtcgtgtcctgcttaatctgcaacgcagattgctcgacgaaatcgaatttgggattcaccagttttggagctacggaaacaaattctccctcagtgtcagtcaccgtcgtggtctgaacttttgccacatactccccttcgctaatatttacttttccttgttctatcttgcgattatcgtctggtaccaaaccgagtgattcgaggagggtctcttcgttactctcggctgtgccatatgcctctgttaaggcgcccttagctggttttgtcgattctacatttggttcgataagctcaactgtcgtttctacaagattcatctgctgcgtttccccaatagttaacgcacttgattgccccaatgtgccctcggccattttcggggtatcaactgctttcaaatccttaactgcattttcattggaaactgtttcggaagttgttacgtggtgctgcatttgcatatctatagtggcttcttttacatctttctcaaaaataggcaaatcctcggctattggactatgagaatcagcggtgctactgactagaccctcagataactcgaataattccaatgcattacttttggcagtctgtgttttggccaccgtttctctttccaaactatcaaaagtgataatttcttgcacctgaacgggaacctcctcggctttaatggtataatcagctaatcccttagtaggctgggttattaatggcatatggtccacgttctccaaaacttccagttcttgtccaccgactgcctttgattccgttaccgacatcgaaggtgtctccatgcgttctttagcagcttgttgcatttcgcctatagagtcctccggctggcattcggtaatgcaaaggctcatgttgggggtaagtcgaggcgaaatagtttctcccggtggcctaacatcagtgacatcccttcccacagtttcggagggtaaaacttccgcgataattaactcctcctggctcagtagtttctgctgaacggtgtcctcaatggcagaggtgggttttagcttctcaatggtctccagtgcttggtgctgttcttcggttatctcatgcgagaataatatgtcgctctgtacctcttgcgaaacggccttcagtggctttagatcctcgatagcttcttcggcgtttggagcttcaaccaccaaggagcgtgactctttcatcttccgctgggctttcacggatttcggtattttggaaggcaattcctttgaagactcagccgtctttgcatgtgagacattaagtgcatgctttagccttacttcaatattttcggtaagcttgttttctttgggtctgggagattcttttcgcaggccaaactcatcgagtggtaacacctcctcattgatggccaataccttttgaggtagaatctcctcctgtacccgcgacgccgttgggcttggagtagaaagttctgtggtgactgaaactgcaacggtctgaagcgtgtcttttgaaagattttgtatgggtagtgtttcgtatgtggacagagactcctcaatttgctcaagagtttctgactgtggtaattccgcgcttgtttcgtgagccagtgtttctttctgttcgcattgaattgttgtctcggaaacttcctgttcttgttgtttgtgttttttatgctttttgattttagtgttcatctgcgcaatttgtttagtctgaacctgaattttcacttgttcttgttgttctagattttgcacatgttcttgttcctgctttttgaatagtttttccactttagtggttgctgtttctgtgaatgtaatgtaattaaacaatgacaatgtcgacctctctttgtgtttctgttaataacaacgataaaacaatgatatgaacagctataagccgtgctggcatcattcatttagtatgtcttgccaaatagagacagccaatgcgaaatgagttgcacaaaaaacgataggataagaaatgatacatttttccttaaacattttttttcatgattttcaaacagacagaaatgggagatagaccttacctcaatttacatccaaagaagtccagcttggcgtgcaagggaataaagctcttctactcttaaaagtgaatgcatattgcaaaagcattagagtgtgcgatagtcaataatagttaagcttatatggtacaaagtagcagcaagatatttaagttaaaaccaggtgaatatagcttttagtggtggcgattagcggttaatgggtatatttattattcggtggcgtctttttagaatatacacatgatttcttggtttggcttaacaaaatttaattgttatatttgtatacacaatatttattattgtttttgtatttgtattttttaataatattattagactgtagttgagtagttcgtgggatggtacatcgttactggtgggatttatataactggtggtttgtttttttttttacaggacatctgtgtttatattcaaaccttcttggacaattatcgttcgttcctcgacaaatgtttcctctttcggatttgttatgggattttattggccatgttttgggattggcgcgaaaagcgtaggtaagtttacaaagcagagttacatattaaaaaaaaaaagaaatagatataaacttttttcagtatgcgtattaaaaaagtctctttatactaatcgattttagctttaagttaaggaaaatccgaatattttcctggaactcacctattttcacatgtgtgatggcctcgtgactttcaattatttgcgaagtctctactattctctagatttcagtgaatcaaattaaatagaaatgtttaaaatttgtaaataattatcagcccattttttttgacaataattaagttgaaatgcgaaaattaacccacataaaggaaacgaaaattaattctaaaacgttttttttttagcatttcaactatctgcacaacaaatttcaaacaaaacaaaaacacattgaacaaatttcaaacctcctttccacaaattttccagtcctgtgatatgaagtcctccctaacaaactttcgaatgacgatctcaatcgtgatttcgtatgtctgaatcatgcgtatgaagggcttgaagcccacagttgctgctaggatggtctcgtcctcattggaagactcgctcagtatttgggagatcagttcttcgtggccttctcgctcgacgagctgcaccagggccgattgcgactctggtttcttcagcgatataaatatgttttgctcatacatatatgtgatttcgtagtgctcacagccatagcgcaatagcagtccaatagtggccaaatctctaagggcagactcgccaatttggccgaaagactcggcctcgatggactcgagcagccattgtacttcctcgtgatgcgaaagtacttgaacatcttcaattgttatgatcttttcgctaatttttgtgcgtattagctccaccgttttagttatctctattttcttgctagacgtatatgtttccttttgctctacttgcacctcaacttcgtcctcctcgtcgtgctggactttctcctcaatctcttcctcctcttctatttcttcaattaattggctactacgctcttcggcatcggcaacctcgcgatctttaacgactaaaacctcagatatttcgctcttttctacgagtacggatacgggttgcttcaccttgatcacattcatgctggtctctaccgcgctagttggaataatacggatttctgtcttttgcacgttctgggactctgaggcaccggatcttttcaccatagttttcttgccagacttcttcttgacggtagtcttggccttggtttcctcaactatggtgctcgtggatgatatgtcgaacttggcccgagtcattgtcatgccaatctcatttatgagcttgcagttatagtaaccgcagtcttcgcttgttattttcattatttctagcgtagcttcctgttcctgcactaccatgcgatacttttcggatgccctaagctgaacgttgttgaaataccactgaatatctaaagtcaaagggttagaaacgaaaccaagctacatcaggtcccgacactaaaactctttggcatacaatacctggtatcggattgccagcaaactgtatcgagaacttggctgtttcacctaaggcagcacggcagtcacgcatttcgtttagtagtgaaggcgagcatttagcagctataagcacacagatggcataatatctatagattagactctaaagggagattctaaaagcggtagagggatgattacattgtgtacttacacagatcggtttacaacatgttggttttcgtgtgactttgagtgcatatttctggtgtctgtttgtttttagtcgtgtgataattaaatatgctataattattaacacttaaatgtttttggatacatgcaacattggcttcatttcaacaaaatgatctgaagagcaagcagcgttctgggaatgttatagaatttctttgggttggattgaacactttttaaaaatggttggttagttaaaatttagaataaaacgcaatgaattcgataaaccaattacttgtagatgatatacagatatcgatactgtaagagatacattttatatacgaatgataattaatttaaatttatactataagttctatattggcgtttacttttcggataatattactcattatgggcgtagttgggtttggggaggggtcaagccttagagcagtaaaggactgagacaatcacaaagctacaatatcttgagtagggcaattcacaagtttaactatttgttgctgttgtacgatacattgtattatacatggacaaatacgaaatagaaacagaaaatagaataagacgggagacagaggacagactttgtgaatttttgtagttttgtggtttaagacaaaggcacagtagacatttgtgtgttggaaacacgaaattaaaacacatatacacataacagtggtaacagagctggcattagtcgagaatacatacctttgagagccacctgcatttcctccatttgagacacccattccggcttgcggtaatccttcgaacccacgatgcctttttcggtatagatgaaaacatagtggaagtaataaaaacaaattcaattaaacgtgttcttgaaaaaagaaatttgtaaatttagttcagtattccttaaactagaaaagtattgcctatttgaagtttgtttggtgtataattctgcaggtgtttaaaactaaagtgttatggggggtttagggaaattaagagagactggactcgagagagtttgggaaacataaataatgcagctccagacatctgaaaaagaattttactaacaaagccaaataacagttgattcatattaaagattgcatcatatgccgaataaaccatattagtaccttcgaccgcaaagagcgccgtagtcactgccacaccgagtggattgtatgcctcgaaactaattgtacccaaatcatcgggatagacgtggttaatgaccagcactgaggtgccatcttcgaaattttcgatctgatattcctcggaggcgaatatctgctcgtcgtcgcgcagccatttgaccttcggtttcggttttccaacgaccttaacctccagcttcgcttgctcgccttcttttggctcgattttctccggtagttttttaataattttcggagcttgttcgtcgattgagagggtctaaaatggttttcgaaaaatccttggtttaagttctcaagtacaacagttacgcttactctatcaagtagatcctcctcagatcctgtgagtccagtgatttcagaatcggggatatattcaaatgctaaaaaatacacatttgaaagcgttatcaatataagcgtgtctcggcacggaactttcttgaaacgaactcaaaaaacgaaaaagtatttacaaaagacgggatcagtgggttgatcggaaaagttggagatacatattttatggaattgatagacagtaaggcatttgaacgagtagaatcacatgcaggccgacaaggccagttagtatggaagggatttagaaaattcagttcagtcagggaaaagtgtagttattgtggataacctatctaggtgtgggatgcatgtagtgtgtagagtggcactacttccagccggttaactatttaactaccgatagataccattacaagtaccttgtattttaacgtttgtcttgctgacgctcttgccaattttatttgtagccacgcactcgtattggccttcgttttcggggaaaacttccgtaatctgcagctggcaaacgccttgcaagtcttgcgatatcgtagtttccttgttctcagtgatcttctccgcattgtggtaccactctaccttaggagtgggctttcctgttacttgacaggtcagcagcaatgcctcgccatccataacctccacgggttgaacgagctcctcaacaaaacgcggcgactcaaattcctcggcttcctcttggggaattaggttaacggtggccgttgacgtcactgatccacccacattctcggcccggcaagtaaaaggccccacaaacttgctttggaagttttcaatcagcaacgttgacttattggcctggctaacgatacgcacttcgtttgaactcttgatgggctcgttgtgcacaaaccattggaaggacgataatggctcagattccacaatcgcttcaataatggccacctcgtgctcgccaaagtacttgggctccaagggctgaataaatctcggcggcttaatttgctcatcgggcttttgatctgaaaccaccaccgagcccgaggacttggcctcacccaccttgttcttagcccaaacttcatatttgccagttcgtttgcgagtcatattgacaacctttattgtggtggttgtttctgtagtttcgattatggtctcctcattctcgataatctcacggccattgcgcatccattttacttctggcctaggcaagccatcgtattttgcttcaaagaagagagtaccacctgtgggtacaacaacagcactcagtggagttacggtaggggcctttagtatctcccggggaacttcatcgacccggcttagaatattggcattgccaatggcacgtccaaactgattctgcgcctgcacagagtagacaactgcttcattgggtgtgggattaataacctccagggccacatcgccggttttttcgtcatagaacatttgaactgtttcgctgggtataacttcctctattcctctataccatttgacctcaggatttggttttcctgtcacttgacaagtaaccgtaaccttaagccgctcgggctgtttctcctcaataaactcaatcttaagtggttttgtaaactgggggggaactccttgttctttttctgtattcaatgtgaataagtggaatttaaatattttgtgtgctcttggtagaattacagggaattagggaagtatatacataaacgttcggattaaaggtaagttaagttaagttaagagcgcttgatcgtttgaaaaagcaccacagaaataatcattacaatgatatggcgattaaagaacagtttccgttaagcgcgataaaaaaattactttttgaaattttaaatataatgtcgtcaagcttgggcacggaaatcgctcttaaaataaatactattgttattgcaaccttacctaaaataatgttggtacgacttgtggccactccagcctcgttcttggcctcgcatgtatagacgccaacatcactgggcgtgaccttggcaatcttcaacttcgccacttgctccatgacagtgatttcatacttctcagaagcaaacaggagaatatcgttgaagtaccatttgatttctgggaacggaactccttccactttgcactccagcacggtgggttcctcgggaacacattggcgtgggcgcaatttctcggtgatccttggaggcttaatctccttcttcttcttcttgacaagcttgcgctcctggccgataacctcagaggtagtcgtctcctgctggttttggattaactgctggtcctctataagctcctcatcggccaccttgtctatgccctcttggattcgtttctgggtaatcagttccagctcaggcaacggttgactgtcgtccagcaccacgcgacgcttctccttcttaatgatgttcgatgtgaccttcatttctagatcgcgtcggacgtcctccacatccagctcgataagctgttcagtcgttatgaattgaggtcttgtgtcttcagtctttttgagtagggtaatagtcttttgtgagatctcctgggatatttcatccaccttttcgatttcagcaatagccgcttccagcagctgaggttgaccctctacggaggcctcctttaggcgctttgtgcgcttcttgtgcgccttttgctttgcctcgggagtctcctctgtgggcacaacttcctcttcgggcagtacgtcttccgacactgccacgaccttgacatcgtccactggcatctcttccacttcatcttcctcagcaatgggctcatcgaagggctcggcgacttcctcggacacctcatctactgatggtgtggccttcttcagcttgggcttcttcttcttctctttcttagccttaggctcttttggcttcttgtcctcgggcagcttgagcggttcaagttccagttcctcctcttcgctttcaggcttttcttctggcacaagttgcggaccaggtatggccttctctggcttttgctgttcttcaattggtttagatggaattggcttcagttgaacttcttccggctgctgttcaggcagtggacggcgtttaccagatggccatttcttttcctccaagacttcttcaacaggctgtttcttttcacctctcttccatggcacctgtggctggtcttcttcgggctttggttgcttctccagttcaatgtgttcagcctcttccagttgcgttggctcagcatcgggaatttccggcaagtcttcgtgttttggcttcttaacctttctggtctttcgtttctcttcctgaacgatttcatcctctttcttctccacatgctgcaagtccacttcctctagtttgacttcttcgggcttgatagaagtgcgttgagtaggcttcaaacgcacttcctcgatggtcgcctcttgaggtagctccttctttggccgagtaactcgctttagagcaacttcttcaaccttctcgatgatttcttcctttctaggctttggcttaggtgccgttttacgttcgtcagcaacttcctttacttgtggctcctccggaatttcctcaactggttgcacttcttcgggctgggttgcctcttcttcaaactcttcagtttcttcagctggttcttcagtggattcttcagctgcaacctttgttttgggctttttcttcttaacacgcttctttgttacatccagtatatcctctgtagtggtgatggcaaactctttcacctcgaattccgtttcaggtgtttcgggttgttccgcttccgacacagcaacaatctttttcacgggcttaagcaagacctcctccacttgttctttttcgggcagaagacgttgttttcttggcgcaggtttcagtgaaatcttttcgacttgctcaacctttgcctcttcgggcgcaggcttaggctttttgggttcttcggttacggtttctttcacctcttcggcttgcgattcttccggcttttctggctgttctgtctgatccactgtcttttcggttacaactttcttgggctttttaatactttttactttacgttgcctttctgttatttcttcctgctccccaattatttcttcttgcagaacctcctcttctggttggtcttcttctatttctatttcggtcttttctatagtcttcttcggcttctttgcctttttgacctttcgcttttgttcctggatttcatcttggtcaacgatttcctcctgttcctcgatgagctcttcttctggagccacgtcttctggaacttcctctactggaacttcctctactggaacttcctctcctggcaattcctcaacatcagtcttttcaactgtcccagttggtttctttacttttttaacctttttgctctcttcaacgactagttgctggtcctcagcagtttcttcctcttcaacagtctcctctgttgggatttcttcttctttgagctgtttctctgcgactgtcttgggtttcttaacctttttgaccttcttcttttcttcaactatctcttcctgttcttgaacaacttcttcagactctttgattatctcttcatggggagtttcttcttcggtcacctgctgtgtaagcttgggcttctttgttttcttaagcctacgtttttcttcaacaatttcctcaatttcttcaataacttctttctgcggcacttcctcttctggagatatttcctcttccggctgttcttcaaacaactcctcggtaacttctttcgtcgacttgggccttttggttttcttgattcggcgtttttcttcgacaatcatttcatcttccttaactacagtctctatttgggcatctacctcatcgggatgcacttcttcagtgggctctgacttgggaatcttctttttaccacgctgccataggacaggctctggcttctcctcaaccttaggctcatcgggcagaacatcgactgctttttcgtatgtcttggtcggagctacatccaacttttcttcgattacgtcttgaggttgcggtttctttttcttgcgttcccaaagaacaggctgtggttcaggctgaacgggcttgataagatcctcttctatagtgtcgacggcaatctccagactctttggaagctcttgtttttgctcatcaggcttttgaggcttcttttggccacgcgcccacaaaacaggttgtggctgtggttctgttggcttcggcacttcctcctcaagcgtgtcgactgcaatctcaagagttttcggaatctcggtcacttcctcttggggtttttggggcttcttcttgccacgctcccacatgacaggctgcggttgaggtatgggttcttcagtcaactcatcggtagcttcttcgtaggctttctgttccgcctccactggttgtggtacgggtctggtgctcctcaagggtttcaattgaatctcctcagcctttacagcctccttaggacgagggcgaggtgttggtttcaaggtaacctgctccaccttctgctccggctcccttggtggaatcactcgtctaacagccgttttctttgtttcctcaacgatctgctgctcgactacctgtgatgtttgcacaacttcctgtgataaaactgtttcctgctgagccaccttcttcttgccacgttcccacatgacaggcactggctccggttgctggacaggcgtgggttcaaccaactcgtcgtgcgcctcttcgaaagtcttctcctggggctgaggtttcttcttgcctcgctcccacataactggcaccggctgaggttgttcaatcggagttggttcaaccagctcgtcgtgcatttcctcgtacgtttttggcttctccacgaattcttctttaacacgctgctcctggggttgcacatattgtggttgatctggcttttttctgccacggtcccacataacaggctgttgttgcaacagctgctgttcctgcgtatcatgacgttcctgtaagtgaagcaacgtggagtcttccacctgaataaacttttgaggctcacgaggctgtcgccagctaaacgcttcttgttgggtgcgctggtttattatcttttggtgctcatactcctcgaggctcatcatctgggagtcctcgacctgcacaaactgctgacgctgagcctcctcgatgaagctctgctgttgcaccaatttctgtctctcagaagtctgagagattactgtatcctcaaccgaagtcaggggctgcaactgtgggcgctgttgctgctggcgccaatttacagcctgctgctcgcgtatcaatctctgagcttctagcttctcgcgctccgaaacatgcataatgttaacatcctcagtggtgataaacttctgcttgtagatattcgactgatcttcatactgaagctgttcatcgcgacgaagcactttagagatcgagcccttggagctctcatcaatcatgacgacagtctcctcggctgttcctgtttgatattcctccgtaatggcttgttgagcctgcaggtgacggagctcgacttcctcaatcttgaacttgtcaatctgcttggtaacccgctggacactcttaagctgctggcgcatctccttccagggaatgagatctttagcgttttgctgctgggtgatcagcttatcgatctggtcagtcatctccataatctcaacgctttccatgctcttcaggcgctggatttccttagtgcgctgcacctgctccacctgagcctgttgtggcagctgcccctcagtttcaatttggccttcaagtggttgcagatagacctcatccagatcgaatttgttgagctgttgctgaacactttcgactgccttaagtttttcacgcatagtgatccaaggaatggcttccttttcggtttttccagcaatgatctgctccagggtagcgcctagactcatgatgccctgatcacgttcggttttgatagacttcagtacaacctttgctgcctcaagttttggtgcgggctttttcttttcaattggcgtggcctttaagttaatagtctcctcagtccaggacttgaccggttcaggcttgaagcctggcaggaagactcccttgtccagggaacgacctcgagtgggacgcgatgacttgcgccatggtatcacctttgtagccggctgcagggacttgctccttaccttgggtttcttctgccgcgatcttccctgatgctgaccctgcccgttgacgcccaggaattgaccaaactgctggcctggttgctggccaggttggaaagcgtgtggcgactcgggggcactgtcctcccggccagaggaagaggactcatcctcggcggaatcaatcgttcgcaattgaaaggccgagatgcgtcgttctaagagggattaattggagactttatttaatatatccctaagtctaaaggtgggataactaacaaaacatatccagagttcgaatgggacaataattataatagtttgtcatatgcgcttaatataggagcagagctcaagtagagcttagtataaaaagcgaactattgaaaaaaatccatttaagcaaattttataaaattaaacctttagcaaggagtattcattagatatataaataacactaaacagctagttagttcattcgcaatgagatcgcaagccacttaatgtaatgccccaaggagcatcatccagatgcaattttccaccacttacctgcttctctctacgtacataaacatatatattatctattattctgagccattaaaattcgtatgctgaatatctgttcggactcgaggaaaccaaaaaccctccatctgaaaggtgcgtgtgtcgaccacaaatcacatttcgccagctgacagctcatctgcgttgaccgtgaataaagcataaatgggattgggccctaggtcaatacatatttttgataattggcattgataaaaataggtgcgagtagtcagagtggcgtggagtgagtgagtaggacgattatctatgtttcgtgattcactaatcgtgtgtgacgaatccacttggtggtaatggaaactgcattagcctgcacctaaatctggcacattgtcatggcagcaattgggtacatcgtaacgaatagtgacattcgtttgacttcaactcatcatcctcgtcatcgtgatagatagaatgagggagggggtcgtctgggcttgtggccaggcaagtgtacaattgagagcaaacaattcaaatgcctgtgtatacattaaggccaaaaatagatatctgattagtggcggctacgtcaccaggtggggctgttcagttcgaccatcggcagagctacaacagatttatgggcggggtgtgtccgcttcgatgttctcggggctcatatagacacagaccagccgtatagccagagcgcagtgcggcgcactccaacgatctcagtcggatgtagacaacaatcggcagcagaacagaacacatcacaaggtagacagatctagttggggacatacttataccccgtgcatcgacactacctacctgtattccctaaactcctgagattccgggcgacatgtggatgacgggaagcaagcagcggcggtgcaattttagcagtagcagcagaaggaatgtggcaagaaggacatttggcagttgtaaaaacaagtttccaatcgttatgcattttgcttggatttatttatagacgcggtatttgttttaagtattaaatacatgagagatacaattaaacaacaaaagagtgtacgcgagtgttggttcttaccaattattcaaatggaaacaaatcaattaagttttaaagtcatcgtaaagtgatcgaacataaaaacatatcgggtaaacataaacatgacagataaaagacagataagacttaaaacgaaggtcgcatgagtttttatgattaattttttagtaaagcttctcgccacaaaggaaaacgtgtaacaaaaagtattaaaattggcggcaaaagcggcatttactttcgagtttcgtttggattttgtacacgaaatgtatgattgattgctggcgatcgagtacgaaagtgtgtgacaaacaatagagtaaggaaacgaattagtaataataaaaagcggtaataaaaaatgaataataaaatctcatgcaacatcactacaaaataaataaaattcaattaaacgtaaattcaattaaagtaaacaatacaataatcattttaacatcgtctactatcgaagtcatcataagatggactgaaggactggagcgtacgactgtctgttcggagtttctggtaaaagtcatatatgctgtaatgtatcttaaagcctcctgtcgaagcctttctaacaatgatttcactttcagggggactacggaaccttaatcattgcttaaaagccgaaatctgcctggcagctaaatataaatataaatctcggtgcatctatgaatcacagaggct

SEQ ID NO: 28421 - DNA, 10242 bp, DROSOPHILA
atgtgttctgttctgctgccgattgttgtctacatccgactgagatcgttggagtgcgccgcactgcgctctggctatacggctgaacgacgcatctcggcctttcaattgcgaacgattgattccgccgaggatgagtcctcttcctctggccgggaggacagtgcccccgagtcgccacacgctttccaacctggccagcaaccaggccagcagtttggtcaattcctgggcgtcaacgggcagggtcagcatcagggaagatcgcggcagaagaaacccaaggtaaggagcaagtccctgcagccggctacaaaggtgataccatggcgcaagtcatcgcgtcccactcgaggtcgttccctggacaagggagtcttcctgccaggcttcaagcctgaaccggtcaagtcctggactgaggagactattaacttaaaggccacgccaattgaaaagaaaaagcccgcaccaaaacttgaggcagcaaaggttgtactgaagtctatcaaaaccgaacgtgatcagggcatcatgagtctaggcgctaccctggagcagatcattgctggaaaaaccgaaaaggaagccattccttggatcactatgcgtgaaaaacttaaggcagtcgaaagtgttcagcaacagctcaacaaattcgatctggatgaggtctatctgcaaccacttgaaggccaaattgaaactgaggggcagctgccacaacaggctcaggtggagcaggtgcagcgcactaaggaaatccagcgcctgaagagcatggaaagcgttgagattatggagatgactgaccagatcgataagctgatcacccagcagcaaaacgctaaagatctcattccctggaaggagatgcgccagcagcttaagagtgtccagcgggttaccaagcagattgacaagttcaagattgaggaagtcgagctccgtcacctgcaggctcaacaagccattacggaggaatatcaaacaggaacagccgaggagactgtcgtcatgattgatgagagctccaagggctcgatctctaaagtgcttcgtcgcgatgaacagcttcagtatgaagatcagtcgaatatctacaagcagaagtttatcaccactgaggatgttaacattatgcatgtttcggagcgcgagaagctagaagctcagagattgatacgcgagcagcaggctgtaaattggcgccagcagcaacagcgcccacagttgcagcccctgacttcggttgaggatacagtaatctctcagacttctgagagacagaaattggtgcaacagcagagcttcatcgaggaggctcagcgtcagcagtttgtgcaggtcgaggactcccagatgatgagcctcgaggagtatgagcaccaaaagataataaaccagcgcacccaacaagaagcgtttagctggcgacagcctcgtgagcctcaaaagtttattcaggtggaagactccacgttgcttcacttacaggaacgtcatgatacgcaggaacagcagctgttgcaacaacagcctgttatgtgggaccgtggcagaaaaaagccagatcaaccacaatatgtgcaaccccaggagcagcgtgttaaagaagaattcgtggagaagccaaaaacgtacgaggaaatgcacgacgagctggttgaaccaactccgattgaacaacctcagccggtgccagttatgtgggagcgaggcaagaagaaacctcagccccaggagaagactttcgaagaggcgcacgacgagttggttgaacccacgcctgtccagcaaccggagccagtgcctgtcatgtgggaacgtggcaagaagaaggtggctcagcaggaaacagttttatcacaggaagttgtgcaaacatcacaggtagtcgagcagcagatcgttgaggaaacaaagaaaacggctgttagacgagtgattccaccaagggagccggagcagaaggtggagcaggttaccttgaaaccaacacctcgccctcgtcctaaggaggctgtaaaggctgaggagattcaattgaaacccttgaggagcaccagacccgtaccacaaccagtggaggcggaacagaaagcctacgaagaagctaccgatgagttgactgaagaacccatacctcaaccgcagcctgtcatgtgggagcgtggcaagaagaagccccaaaaaccccaagaggaagtgaccgagattccgaaaactcttgagattgcagtcgacacgcttgaggaggaagtgccgaagccaacagaaccacagccacaacctgttttgtgggcgcgtggccaaaagaagcctcaaaagcctgatgagcaaaaacaagagcttccaaagagtctggagattgccgtcgacactatagaagaggatcttatcaagcccgttcagcctgaaccacagcctgttctttgggaacgcaagaaaaagaaaccgcaacctcaagacgtaatcgaagaaaagttggatgtagctccgaccaagacatacgaaaaagcagtcgatgttctgcccgatgagcctaaggttgaggagaagccagagcctgtcctatggcagcgtggtaaaaagaagattcccaagtcagagcccactgaagaagtgcatcccgatgaggtagatgcccaaatagagactgtagttaaggaagatgaaatgattgtcgaagaaaaacgccgaatcaagaaaaccaaaaggcccaagtcgacgaaagaagttaccgaggagttgtttgaagaacagccggaagaggaaatatctccagaagaggaagtgccgcagaaagaagttattgaagaaattgaggaaattgttgaagaaaaacgtaggcttaagaaaacaaagaagcccaagcttacacagcaggtgaccgaagaagaaactccccatgaagagataatcaaagagtctgaagaagttgttcaagaacaggaagagatagttgaagaaaagaagaaggtcaaaaaggttaagaaacccaagacagtcgcagagaaacagctcaaagaagaagaaatcccaacagaggagactgttgaagaggaagaaactgctgaggaccagcaactagtcgttgaagagagcaaaaaggttaaaaaagtaaagaaaccaactgggacagttgaaaagactgatgttgaggaattgccaggagaggaagttccagtagaggaagttccagtagaggaagttccagaagacgtggctccagaagaagagctcatcgaggaacaggaggaaatcgttgaccaagatgaaatccaggaacaaaagcgaaaggtcaaaaaggcaaagaagccgaagaagactatagaaaagaccgaaatagaaatagaagaagaccaaccagaagaggaggttctgcaagaagaaataattggggagcaggaagaaataacagaaaggcaacgtaaagtaaaaagtattaaaaagcccaagaaagttgtaaccgaaaagacagtggatcagacagaacagccagaaaagccggaagaatcgcaagccgaagaggtgaaagaaaccgtaaccgaagaacccaaaaagcctaagcctgcgcccgaagaggcaaaggttgagcaagtcgaaaagatttcactgaaacctgcgccaagaaaacaacgtcttctgcccgaaaaagaacaagtggaggaggtcttgcttaagcccgtgaaaaagattgttgctgtgtcggaagcggaacaacccgaaacacctgaaacggaattcgaggtgaaagagtttgccatcaccactacagaggatatactggatgtaacaaagaagcgtgttaagaagaaaaagcccaaaacaaaggttgcagctgaagaatccactgaagaaccagctgaagaaactgaagagtttgaagaagaggcaacccagcccgaagaagtgcaaccagttgaggaaattccggaggagccacaagtaaaggaagttgctgacgaacgtaaaacggcacctaagccaaagcctagaaaggaagaaatcatcgagaaggttgaagaagttgctctaaagcgagttactcggccaaagaaggagctacctcaagaggcgaccatcgaggaagtgcgtttgaagcctactcaacgcacttctatcaagcccgaagaagtcaaactagaggaagtggacttgcagcatgtggagaagaaagaggatgaaatcgttcaggaagagaaacgaaagaccagaaaggttaagaagccaaaacacgaagacttgccggaaattcccgatgctgagccaacgcaactggaagaggctgaacacattgaactggagaagcaaccaaagcccgaagaagaccagccacaggtgccatggaagagaggtgaaaagaaacagcctgttgaagaagtcttggaggaaaagaaatggccatctggtaaacgccgtccactgcctgaacagcagccggaagaagttcaactgaagccaattccatctaaaccaattgaagaacagcaaaagccagagaaggccatacctggtccgcaacttgtgccagaagaaaagcctgaaagcgaagaggaggaactggaacttgaaccgctcaagctgcccgaggacaagaagccaaaagagcctaaggctaagaaagagaagaagaagaagcccaagctgaagaaggccacaccatcagtagatgaggtgtccgaggaagtcgccgagcccttcgatgagcccattgctgaggaagatgaagtggaagagatgccagtggacgatgtcaaggtcgtggcagtgtcggaagacgtactgcccgaagaggaagttgtgcccacagaggagactcccgaggcaaagcaaaaggcgcacaagaagcgcacaaagcgcctaaaggaggcctccgtagagggtcaacctcagctgctggaagcggctattgctgaaatcgaaaaggtggatgaaatatcccaggagatctcacaaaagactattaccctactcaaaaagactgaagacacaagacctcaattcataacgactgaacagcttatcgagctggatgtggaggacgtccgacgcgatctagaaatgaaggtcacatcgaacatcattaagaaggagaagcgtcgcgtggtgctggacgacagtcaaccgttgcctgagctggaactgattacccagaaacgaatccaagagggcatagacaaggtggccgatgaggagcttatagaggaccagcagttaatccaaaaccagcaggagacgactacctctgaggttatcggccaggagcgcaagcttgtcaagaagaagaagaaggagattaagcctccaaggatcaccgagaaattgcgcccacgccaatgtgttcccgaggaacccaccgtgctggagtgcaaagtggaaggagttccgttcccagaaatcaaatggtacttcaacgatattctcctgtttgcttctgagaagtatgaaatcactgtcatggagcaagtggcgaagttgaagattgccaaggtcacgcccagtgatgttggcgtctatacatgcgaggccaagaacgaggctggagtggccacaagtcgtaccaacattattttagaaaaagaacaaggagttcccccccagtttacaaaaccacttaagattgagtttattgaggagaaacagcccgagcggcttaaggttacggttacttgtcaagtgacaggaaaaccaaatcctgaggtcaaatggtatagaggaatagaggaagttatacccagcgaaacagttcaaatgttctatgacgaaaaaaccggcgatgtggccctggaggttattaatcccacacccaatgaagcagttgtctactctgtgcaggcgcagaatcagtttggacgtgccattggcaatgccaatattctaagccgggtcgatgaagttccccgggagatactaaaggcccctaccgtaactccactgagtgctgttgttgtacccacaggtggtactctcttctttgaagcaaaatacgatggcttgcctaggccagaagtaaaatggatgcgcaatggccgtgagattatcgagaatgaggagaccataatcgaaactacagaaacaaccaccacaataaaggttgtcaatatgactcgcaaacgaactggcaaatatgaagtttgggctaagaacaaggtgggtgaggccaagtcctcgggctcggtggtggtttcagatcaaaagcccgatgagcaaattaagccgccgagatttattcagcccttggagcccaagtactttggcgagcacgaggtggccattattgaagcgattgtggaatctgagccattatcgtccttccaatggtttgtgcacaacgagcccatcaagagttcaaacgaagtgcgtatcgttagccaggccaataagtcaacgttgctgattgaaaacttccaaagcaagtttgtggggccttttacttgccgggccgagaatgtgggtggatcagtgacgtcaacggccaccgttaacctaattccccaagaggaagccgaggaatttgagtcgccgcgttttgttgaggagctcgttcaacccgtggaggttatggatggcgaggcattgctgctgacctgtcaagtaacaggaaagcccactcctaaggtagagtggtaccacaatgcggagaagatcactgagaacaaggaaactacgatatcgcaagacttgcaaggcgtttgccagctgcagattacggaagttttccccgaaaacgaaggccaatacgagtgcgtggctacaaataaaattggcaagagcgtcagcaagacaaacgttaaaatacaagcatttgaatatatccccgattctgaaatcactggactcacaggatctgaggaggatctacttgatagaaccctctcaatcgacgaacaagctccgaaaattattaaaaaactaccggagaaaatcgagccaaaagaaggcgagcaagcgaagctggaggttaaggtcgttggaaaaccgaaaccgaaggtcaaatggctgcgcgacgacgagcagatattcgcctccgaggaatatcagatcgaaaatttcgaagatggcacctcagtgctggtcattaaccacgtctatcccgatgatttgggtacaattagtttcgaggcatacaatccactcggtgtggcagtgactacggcgctctttgcggtcgaaggcatcgtgggttcgaaggattaccgcaagccggaatgggtgtctcaaatggaggaaatgcaggtggctctcaaagatattcagtggtatttcaacaacgttcagcttagggcatccgaaaagtatcgcatggtagtgcaggaacaggaagctacgctagaaataatgaaaataacaagcgaagactgcggttactataactgcaagctcataaatgagattggcatgacaatgactcgggccaagttcgacatatcatccacgagcaccatagttgaggaaaccaaggccaagactaccgtcaagaagaagtctggcaagaaaactatggtgaaaagatccggtgcctcagagtcccagaacgtgcaaaagacagaaatccgtattattccaactagcgcggtagagaccagcatgaatgtgatcaaggtgaagcaacccgtatccgtactcgtagaaaagagcgaaatatctgaggttttagtcgttaaagatcgcgaggttgccgatgccgaagagcgtagtagccaattaattgaagaaatagaagaggaggaagagattgaggagaaagtccagcacgacgaggaggacgaagttgaggtgcaagtagagcaaaaggaaacatatacgtctagcaagaaaatagagataactaaaacggtggagctaatacgcacaaaaattagcgaaaagatcataacaattgaagatgttcaagtactttcgcatcacgaggaagtacaatggctgctcgagtccatcgaggccgagtctttcggccaaattggcgagtctgcccttagagatttggccactattggactgctattgcgctatggctgtgagcactacgaaatcacatatatgtatgagcaaaacatatttatatcgctgaagaaaccagagtcgcaatcggccctggtgcagctcgtcgagcgagaaggccacgaagaactgatctcccaaatactgagcgagtcttccaatgaggacgagaccatcctagcagcaactgtgggcttcaagcccttcatacgcatgattcagacatacgaaatcacgattgagatcgtcattcgaaagtttgttagggaggacttcatatcacaggactggaaaatttgtggaaaggaggaggagattctacctcaaaaggtattggccatcaatgaggaggtgttaccactcgatgagtttggcctgcgaaaagaatctcccagacccaaagaaaacaagcttaccgaaaatattgaagtaaggctaaagcatgcacttaatgtctcacatgcaaagacggctgagtcttcaaaggaattgccttccaaaataccgaaatccgtgaaagcccagcggaagatgaaagagtcacgctccttggtggttgaagctccaaacgccgaagaagctatcgaggatctaaagccactgaaggccgtttcgcaagaggtacagagcgacatattattctcgcatgagataaccgaagaacagcaccaagcactggagaccattgagaagctaaaacccacctctgccattgaggacaccgttcagcagaaactactgagccaggaggagttaattatcgcggaagttttaccctccgaaactgtgggaagggatgtcactgatgttaggccaccgggagaaactatttcgcctcgacttacccccaacatgagcctttgcattaccgaatgccagccggaggactctataggcgaaatgcaacaagctgctaaagaacgcatggagacaccttcgatgtcggtaacggaatcaaaggcagtcggtggacaagaactggaagttttggagaacgtggaccatatgccattaataacccagcctactaagggattagctgattataccattaaagccgaggaggttcccgttcaggtgcaagaaattatcacttttgatagtttggaaagagaaacggtggccaaaacacagactgccaaaagtaatgcattggaattattcgagttatctgagggtctagtcagtagcaccgctgattctcatagtccaatagccgaggatttgcctatttttgagaaagatgtaaaagaagccactatagatatgcaaatgcagcaccacgtaacaacttccgaaacagtttccaatgaaaatgcagttaaggatttgaaagcagttgataccccgaaaatggccgagggcacattggggcaatcaagtgcgttaactattggggaaacgcagcagatgaatcttgtagaaacgacagttgagcttatcgaaccaaatgtagaatcgacaaaaccagctaagggcgccttaacagaggcatatggcacagccgagagtaacgaagagaccctcctcgaatcactcggtttggtaccagacgataatcgcaagatagaacaaggaaaagtaaatattagcgaaggggagtatgtggcaaaagttcagaccacgacggtgactgacactgagggagaatttgtttccgtagctccaaaactggtgaatcccaaattcgatttcgtcgagcaatctgcgttgcagattaagcaggacacgacagtggagaaggaggaaattctatcttccaatatagaactggcaccacaatgattcgaactcgtttaataaaaaaagtcaagggtaataaacaagaagtcaccaagattgaaaccgttgaggaggacgacaagcaacccgaaacgacggtcaccgttgaagaacttccgtttcaagaagagaagcctgaggaaatccaagagattccagaagaggttcgcgtcgttgaaaccgttacggaagatggcaagcctaagaagaagaagatccgtactcgtgttatcaagaaggtcaagggtgacaagcaagaagtcaccaaaatcgaaaccgtcgaagaggacgacaagcaacccgaaacgacggtcactgttgaggaagttccgtatgaagaagagaagcctgaggaaattcaagagcttccagaggaggttcgcgtcgttgaaaccgttacggaagatggcaagcctaagaagaagaagatcccgtactcgtgttatcaagaag

SEQ ID NO: 28422 - protein, 3263 aa, DROSOPHILA
MCSVLLPIVVYIRLRSLECAALRSGYTAERRISAFQLRTIDSAEDESSSSGREDSAPESPHAFQPGQQPGQQFGQFLGVNGQGQHQGRSRQKKPKVRSKSLQPATKVIPWRKSSRPTRGRSLDKGVFLPGFKPEPVKSWTEETINLKATPIEKKKPAPKLEAAKVVLKSIKTERDQGIMSLGATLEQIIAGKTEKEAIPWITMREKLKAVESVQQQLNKFDLDEVYLQPLEGQIETEGQLPQQAQVEQVQRTKEIQRLKSMESVEIMEMTDQIDKLITQQQNAKDLIPWKEMRQQLKSVQRVTKQIDKFKIEEVELRHLQAQQAITEEYQTGTAEETVVMIDESSKGSISKVLRRDEQLQYEDQSNIYKQKFITTEDVNIMHVSEREKLEAQRLIREQQAVNWRQQQQRPQLQPLTSVEDTVISQTSERQKLVQQQSFIEEAQRQQFVQVEDSQMMSLEEYEHQKIINQRTQQEAFSWRQPREPQKFIQVEDSTLLHLQERHDTQEQQLLQQQPVMWDRGRKKPDQPQYVQPQEQRVKEEFVEKPKTYEEMHDELVEPTPIEQPQPVPVMWERGKKKPQPQEKTFEEAHDELVEPTPVQQPEPVPVMWERGKKKVAQQETVLSQEVVQTSQVVEQQIVEETKKTAVRRVIPPREPEQKVEQVTLKPTPRPRPKEAVKAEEIQLKPLRSTRPVPQPVEAEQKAYEEATDELTEEPIPQPQPVMWERGKKKPQKPQEEVTEIPKTLEIAVDTLEEEVPKPTEPQPQPVLWARGQKKPQKPDEQKQELPKSLEIAVDTIEEDLIKPVQPEPQPVLWERKKKKPQPQDVIEEKLDVAPTKTYEKAVDVLPDEPKVEEKPEPVLWQRGKKKIPKSEPTEEVHPDEVDAQIETVVKEDEMIVEEKRRIKKTKRPKSTKEVTEELFEEQPEEEISPEEEVPQKEVIEEIEEIVEEKRRLKKTKKPKLTQQVTEEETPHEEIIKESEEVVQEQEEIVEEKKKVKKVKKPKTVAEKQLKEEEIPTEETVEEEETAEDQQLVVEESKKVKKVKKPTGTVEKTDVEELPGEEVPVEEVPVEEVPEDVAPEEELIEEQEEIVDQDEIQEQKRKVKKAKKPKKTIEKTEIEIEEDQPEEEVLQEEIIGEQEEITERQRKVKSIKKPKKVVTEKTVDQTEQPEKPEESQAEEVKETVTEEPKKPKPAPEEAKVEQVEKISLKPAPRKQRLLPEKEQVEEVLLKPVKKIVAVSEAEQPETPETEFEVKEFAITTTEDILDVTKKRVKKKKPKTKVAAEESTEEPAEETEEFEEEATQPEEVQPVEEIPEEPQVKEVADERKTAPKPKPRKEEIIEKVEEVALKRVTRPKKELPQEATIEEVRLKPTQRTSIKPEEVKLEEVDLQHVEKKEDEIVQEEKRKTRKVKKPKHEDLPEIPDAEPTQLEEAEHIELEKQPKPEEDQPQVPWKRGEKKQPVEEVLEEKKWPSGKRRPLPEQQPEEVQLKPIPSKPIEEQQKPEKAIPGPQLVPEEKPESEEEELELEPLKLPEDKKPKEPKAKKEKKKKPKLKKATPSVDEVSEEVAEPFDEPIAEEDEVEEMPVDDVKVVAVSEDVLPEEEVVPTEETPEAKQKAHKKRTKRLKEASVEGQPQLLEAAIAEIEKVDEISQEISQKTITLLKKTEDTRPQFITTEQLIELDVEDVRRDLEMKVTSNIIKKEKRRVVLDDSQPLPELELITQKRIQEGIDKVADEELIEDQQLIQNQQETTTSEVIGQERKLVKKKKKEIKPPRITEKLRPRQCVPEEPTVLECKVEGVPFPEIKWYFNDILLFASEKYEITVMEQVAKLKIAKVTPSDVGVYTCEAKNEAGVATSRTNIILEKEQGVPPQFTKPLKIEFIEEKQPERLKVTVTCQVTGKPNPEVKWYRGIEEVIPSETVQMFYDEKTGDVALEVINPTPNEAVVYSVQAQNQFGRAIGNANILSRVDEVPREILKAPTVTPLSAVVVPTGGTLFFEAKYDGLPRPEVKWMRNGREIIENEETIIETTETTTTIKVVNMTRKRTGKYEVWAKNKVGEAKSSGSVVVSDQKPDEQIKPPRFIQPLEPKYFGEHEVAIIEAIVESEPLSSFQWFVHNEPIKSSNEVRIVSQANKSTLLIENFQSKFVGPFTCRAENVGGSVTSTATVNLIPQEEAEEFESPRFVEELVQPVEVMDGEALLLTCQVTGKPTPKVEWYHNAEKITENKETTISQDLQGVCQLQITEVFPENEGQYECVATNKIGKSVSKTNVKIQAFEYIPDSEITGLTGSEEDLLDRTLSIDEQAPKIIKKLPEKIEPKEGEQAKLEVKVVGKPKPKVKWLRDDEQIFASEEYQIENFEDGTSVLVINHVYPDDLGTISFEAYNPLGVAVTTALFAVEGIVGSKDYRKPEWVSQMEEMQVALKDIQWYFNNVQLRASEKYRMVVQEQEATLEIMKITSEDCGYYNCKLINEIGMTMTRAKFDISSTSTIVEETKAKTTVKKKSGKKTMVKRSGASESQNVQKTEIRIIPTSAVETSMNVIKVKQPVSVLVEKSEISEVLVVKDREVADAEERSSQLIEEIEEEEEIEEKVQHDEEDEVEVQVEQKETYTSSKKIEITKTVELIRTKISEKIITIEDVQVLSHHEEVQWLLESIEAESFGQIGESALRDLATIGLLLRYGCEHYEITYMYEQNIFISLKKPESQSALVQLVEREGHEELISQILSESSNEDETILAATVGFKPFIRMIQTYEITIEIVIRKFVREDFISQDWKICGKEEEILPQKVLAINEEVLPLDEFGLRKESPRPKENKLTENIEVRLKHALNVSHAKTAESSKELPSKIPKSVKAQRKMKESRSLVVEAPNAEEAIEDLKPLKAVSQEVQSDILFSHEITEEQHQALETIEKLKPTSAIEDTVQQKLLSQEELIIAEVLPSETVGRDVTDVRPPGETISPRLTPNMSLCITECQPEDSIGEMQQAAKERMETPSMSVTESKAVGGQELEVLENVDHMPLITQPTKGLADYTIKAEEVPVQVQEIITFDSLERETVAKTQTAKSNALELFELSEGLVSSTADSHSPIAEDLPIFEKDVKEATIDMQMQHHVTTSETVSNENAVKDLKAVDTPKMAEGTLGQSSALTIGETQQMNLVETTVELIEPNVESTKPAKGALTEAYGTAESNEETLLESLGLVPDDNRKIEQGKVNISEGEYVAKVQTTTVTDTEGEFVSVAPKLVNPKFDFVEQSALQIKQDTTVEKEEILSSNIELAPQ

SEQ ID NO: 28423 - DNA, 2670 bp, DROSOPHILA
aaaagcgagaattaactgagtatcactttgagattcgataaatatctaagcttgcctttcgagctgctgactaagccaaaatctgagtattcgtcaccctcgtccaaatggatggtggattgtaaaccggaatcgtcgtcttcctcaccaaaatcgatgggcgggggggtgctgcagagcagcggtggtacattcaccataatgccagctgcaaaattcagtaaaaggatcccctaaaattcacttcctgcttcaagaagaacaacaaaaacgctgggaacggttcgatcttctatctctctcgctccactttatcactgtgtgtgtggtgtgtatgtgtgacgcaggtgtggagggcctgcaagtgtgtgtgtgtgtgttagccactcaaggtctgtgttggaattttcttgtttgcatttaacacgcgtcaattttgttgtgtctctgtattatgtctaattgtcgccttattggtggctctaaaaacagatttgccgaatttgcaagtcgcgttttatctgcaattagccatgttttccagaaaacaatactttttcctctgcccacagtgtgaacgtttaacttttggccaaccgacagtgctgaaaaacgttgcgcaacattgataacatacaaaatttgaatcttatctttttcaattcccattttcgatttaaatcattatccatagttcagatagaatagttatattagttatatttctataatagatttttattctttccaattcttttaccgttaaaattgtatttgaaaattattagtaacaagagtaaaatatacatgaaagtctaggctgcagtatgtaatacgtcaaattttgttgggacactaaacaacaaatagtcgtcataaaggcttcttttaaattgttatgatattttccacaatttctgcatacttttttaagcttgctggcaacgccgccaccgtaccaatacaactatcgatagccgcctgtcagttttgacagctgttttaaggttatactgcgctgccgttgcaatcgctccaccaatttggtaattttgcttatttaacatcaaatattgcataaaactaggaaaaccaggaatctgtaaagtggagcgagacggggaacgctattaaggaagtcggataactaaagtacatccttttcttgcagttcacggtcggacaattacataacttgaagaagaaaccatgtcgcaggctcccgttcgcgtttccccgctgatcaagttcggcagatggtccctgctcctggtgggcattgcctacggcgccgcccaccagagccgcctgtccaagaaggaggagaagttgcgcgagatcgaggcacagcagaaggccgtccgtgatgccaagctcgccgaggagaagaagcgcagcgcagaggctgaggcccgtgccttggctgagctttcgaagcccactcccaagcactaggatccttcaggatgcaacatccgcagttcccttagcttaaaaacattgaaaaaccacaacatttacacacgaagttcgcccaaaaggaggagcatcatcgatagtggagccaccatctatcgatcactgactatcgtttttgtgttttcctctgatgcttgtgcaaaaaacagaatgttcgaaattaaatgattgaaacaaaaccattatgtaaatactctcaagtgtttcgtgtttgtgattaagtggtgttcactggaaatatatttatattagcatagtgtttggataggagaggattgagagaatttgagagggtttgagctccaaatttgactaggaagtacatataaatatttttgcaaattgattatcaataattttcctaaattttgttttaaatcttttttgataaacaacaactgatagtttaccttattggatgcccactgtagttgccagctgattggcccacttaagatattggcgccaacagctgatttcaaccggcgtttatttacactttcaattcgctcgcaagtcgtcgcatggctcggctgtttgatcaataatcccccggaatacttccaattccggaggtgttgagacacctttcgtgtttcggggagccattatatcacgcaatcccatcgaggacatgccatcgcatcgcgatgacaaactttctggatcaattgcccaagcatatcagagaaatcgccgagcagggtaagagttttggggttccaacaactttattcaagagccaactaaattcctgtactccagttaatgttctcgcaccggaggaggtgctgacaactcccaaggtgcgattcctggacacccgccagcaatcgctgcacacaatcgtgcgaaaatgcactccggatgatgttagggtgctcaaggatgcggcagccaagtggctggcagagatgccccagtcaggtgattctcagactaatgtataagtagcctcttgtgtttagtttgccactatttattacagcggattccctcttcaagccgcttgtcaatgttagatggtcgcgggtgtcgtttggatgttccgctttagatcgctgcacgggcgggggagtggtcactcgtggaattacagagctatgtggagcagccggcgtgggcaagacccagttgcttcttcagctatccctttgtgtccagctaccccgtgagttgggtggcttgggc

SEQ ID NO: 28424 - DNA, 545 bp, DROSOPHILA
ttttaaggttatactgcgctgccgttgcaatcgctccaccaatttgttcacggtcggacaattacataacttgaagaagaaaccatgtcgcaggctcccgttcgcgtttccccgctgatcaagttcggcagatggtccctgctcctggtgggcattgcctacggcgccgcccaccagagccgcctgtccaagaaggaggagaagttgcgcgagatcgaggcacagcagaaggccgtccgtgatgccaagctcgccgaggagaagaagcgcagcgcagaggctgaggcccgtgccttggctgagctttcgaagcccactcccaagcactaggatccttcaggatgcaacatccgcagttcccttagcttaaaaacattgaaaaaccacaacatttacacacgaagttcgcccaaaaggaggagcatcatcgatagtggagccaccatctatcgatcactgactatcgtttttgtgttttcctctgatgcttgtgcaaaaaacagaatgttcgaaattaaatgattgaaacaaaaccattatgtaaa

SEQ ID NO: 28425 - protein, 81 aa, DROSOPHILA; identical to SEQ ID NO: 6222

SEQ ID NO: 28426 - DNA, 9321 bp, DROSOPHILA
atatttaaagttcgtttcagcagaatcttaaatattaaaaacttagcgggcaagtaaatacaccgcgttcagctgattatcgatagcaaccaggtggtcactctaatagacgttttcatgcgagcccgctgcggtcacaccaacttctcgaccgatttttcccctccatctagggtcactctaattttggacgaggttaggtaagacacgcgcggatgccgcgctgcgtaggataaatccgtcattagcataaccgcattgaagctaagtcttcgggaaaatgcttaagcttgtgcaatacatagccccccgggtgggcggcgccacgccccgaccgactgcctgcggctggggcaacttgctattgatttccccgagaagtggcgcgagctccgagaaatgtataacgcaacgtcgccattttcttttctcctccgccagcagcagcggcactttcgcttcttcttcttcgctctgcaccgaacaacgacaacagttccacgggagtcgcaggaatcgtgagacaatactgttcccaagcacatatagtagtctccaagctcagtcgcagcgtgcgtttcgagacagctcgaaaccagattcagacgactacgtagattccatcccgaaagcagagcagcggacgaggacgaggaaatcgcttttcaacgatcccgacgaaagaactgaggaaatcaaaattgaaggagtaatgtgagtacagccgcaagatttcatatgaaatgcgttggttttttccactcactgtcgccattttatcacccttcgtgccattcctctttttttttttttttttctgtacacctacgaagcgaggtgatgagtaattagtgtgagcgaaagagagagtttggggagagagagaaaaacacatggtttgctaaattttgtcagtcggaggtgaggttttcagccatttgttgtttttttctttgtgtttgcccccgcacatccgcaaaggagtagcaaaagcaacaagaacgacagcgcacgtcataaaaagaatttgcctgatttgtgaaacgtgttcttgcttcgtttgctattttatagcgttttaatttgtctgtatgccccgaacatgaacacgcgcactcacacagcggcacatacggacttgcttgtatgcgtgaatgcctgttgacggcggcattttctcgtgctcgtagaacagttcgaacagtgtgtgcgagcgtataacagtcggcggctgtcactgactagcgccgtcctgctcactcgccagcatgcctttccatcacattctttccatggctcacacgaggttttgtagagatatcgcgatgtttttggtattggcaattttataatttgatgtaaccatcccgacatagatttatacttactatgcttaatttgggaagtgaatggggttaatggtttgcttcgtttggttatctaatgcgtacattgaaatatataatttcagtataattctgtatactgaggacaattttagggaaaagtagggttattctcttaaaattttctctacactataagtaaaggttccatgcaaacacatttaacttacagattatcaaaaatgcattttatcgatcattttatctattttgctacgctctttttgtgtttacttatcatgaaccatgcttgttatgcaataaaaattatttattagaaagttatactatagtattgataaaaactcaagtaacaaccaaatattaaatggtaatagtaacccagttcgtgaactacgccatcacataaacggccccattagtctaaaatgtcaaatgacgccaattgattatgagctccccctttggcgagcgcgcgattcgtcttttcgcatgtcaaaaagcgacaggtagacacacagaaagtcaaaggtgcccccagggactgtcccctcctcccctcgggtgtttgcccaccgttgaaactaggggcaagacatttggctgtctcataaatgttcagagcgttccgcttcgctagttgggcacaaacgttagcgtgccagtgggtcctacaaatagacgtttagggcggtacggtgttccaaattgacagagtaatagacaaaaaaaaacgtgggcctggatcgtgggtgatttgcatggtgcaccccatagtgatgcccactaggatcacgaaaatggagcttacatacgaagtaaagcgaatataaagtggaaatttatagaagttagttcgtaacacaataaacataatttatgttgtaaattttgttttatacaactttaccatccaacttaatcttgcactatatttattaccacattgtatatacactccgcagagttaatattatttttccctaattattgcaaagtgctaacatatataggtcggtaccttcgccagttctgactggaactagaactgcgccaggttgattaatgccagagcaataaacgcagggctttgtacatggggctgtttagtttagttgagcatttaggggctgataaactggggtgaaaaattggtgggagggtgggctgtgaatagaaaccctgctcgaattgcatgttgttgtcaatcaaatttgccttactgtttgcattattcgaaatttatttaatttccctaacacgcaattagtttttatttaagtttattgcggttgtagcacagcacaactcccatgtcagctgtttagcagcgtcgaaagaaatcgaaaagcgaagacttaccttccaagccaagtcgcagttgaaatccaagtcccaactggcagacgtctagaaacggcagcatgcgagcaaagtaagccaagtcactcgtttctttttttcctcaattttctgtcaaagaaatacttaagaaaagaaagtgcagctgtctacgccgagccggaaaaaatgattccagttaagcatggtttaattctcgaaggtcccttttatcaagggaaaatttatgacacacagtttctgggtaatgtgtgtgcagcgcaaaattattttagatggcagataaggaggaattgattatacaaatgtacaacgcgaaattaaaaagtttgtgagaaaactatcaaactatatcaacttcagcgaaattcggttacaaagctcaaagtgggatattttcttaaagattccactgaattcacggcagcgaaataacaagtcgtgaagtcgttcaatttccatgaataaggaaaaggcccttgatacttgacactaagtaaacttcggcaatgcaagataagcatattagaattaaattactttaatctcatttgcctttaccaaagccaattaccatcgcaaccattaattttgccaaagttatctagaataaattacaatacaaaaaggcacacagggtacgcgtgaatttttaatttatcaagttaatgggaaaaacacttgtaatgccactaatttaattttttttatctcgaataaaacagcatcaagataaattggtggtcaaagatcaaaccagtacaagaaactgcaaactactaccttaagttcaaataagctgcaagatgatgatgatgtgagatttcttttcttgagcattccgtttctattttgcatacttagatactcatcgatcttcctttattatttcccagggcaccacacgatcgcgactttggtcacagtggacgtggcggtcgcggaggcgatcgaggcggcgatgatcggcgaggaggcggcggcggaggcaatcgcttcggtggcggcggtggcggtggcgattaccacggcataaggaatggacgcgtcgagaagcgacgcgatgaccgcggaggcggcaaccgatttggaggtggtggtggattcggggatcgccgaggaggaggtggcggcggcagccaagacctccccatgcgtccggtcgacttctccaacctggctcccttcaagaagaacttttaccaggagcaccctaacgtagcaaaccgatcgccctacgaagttcagaggtatcgcgaagagcaggagatcaccgtgcgcggacaggtgccgaaccccatccaggacttctccgaggtccatctgcccgactacgtcatgaaggagatccgccgacagggctacaaggcccccaccgctatccaagcgcagggctggcctatcgccatgagtggctcgaacttcgtcggcattgccaagacgggatccggaaagaccctgggctacatcctgcccgctattgtccacatcaacaaccagcagccgctgcagaggggcgacggacctatcgccctcgtgctggcccccactcgggagctggcccaacagatccagcaggtggccaccgaattcggttcctcgtcgtatgttcgcaacacctgcgtcttcggcggcgccccgaagggcggccaaatgcgggatctgcagcgcggctgcgagatcgtcattgccacacccggacgtcttattgatttcctctccgccggctctactaacctgaagcgttgcacctacttggtgctggacgaggccgatcgcatgttagacatgggcttcgagccccagatcagaaagatcgtctcacagatccggcccgaccgacagacgctcatgtggagcgctacctggcccaaggaggtcaagcagcttgccgaggactttttgggcaactacatccagatcaacattggatcgctggagctgtccgccaatcacaacatccgccaggtggtggacgtttgtgacgagttcagcaaggaggagaagtaagtggaccttaattctaattgtaattgtctagttgatactagaatttagagaagttcctcttataaaatttcttaatttaatatttcctcctatcaatacagattgaagaccctcctgtcagacatctacgacaccagcgagagccccggcaagattatcatattcgtggagacaaagcgacgcgtggacaacctggtgcgcttcatccgcagcttcggagtccgttgtggagctattcacggtgacaagtcgcaatcagaacgagactttgtgctccgtgagttccgctcgggcaagtccaacattctggtggccaccgatgtggcggcccgtggactaggtaagtttgctctcgcagcggcgtagaatatacaccgtagtttgcggccgaaagatttggatgggcctgtttagcgataaggtcacacttgctagggccattgcttacaacataccatcactaccagaggacaccgcacctaacgatcacccagcatcattacacgcacccactacatgcgagcagaacctaatcctacccgtaaaccaacctacccaccatccgaacttcctaaccacacctaatgatatatcccggtatctacccacatctagcgagcgcgccaactcagaaacagttttttttagacatacgccaaatgccgaaatcgaataatcaacttgaacttttaccccaccccctgaccctgacctgcaacccgcccccacctgcaacacccggcccaacccctgctaaaataatgtatgaaatgcgtaatgatcgtatatgatccatatgcactgcggtgtacctgttactacgcaacttttgtctttgtgcgtgtctctgcctctttctctctctcccccccccctctctctctctctctttcttgtttctttctcgtttacagaggccgattttggtagtatgatggggaggataatgaatgagcggcgaccactgcgaacactcgtgacttgagcgacttttgccaacatcagaatcagatctgttatgatatatgatgatagcacatcctgtgtgatatcttgcgcaaaaggaccgatgaaagttctcagattcagacggtcgagagacacgaatatcgaatatccccaacatcatgcatcatatgtggcctctgcagtccccgactttttgttgagaaagagtgaaataatatgatatgagacgtttttgcgaccaaagactaccatctaccaaccaaaaaccatctaccaatcaaccaaataagatccaacaacaacaactgaaccgaaccatcagagagccagctttttcctcagcagtggatggcggaaggcggcgtgcaaagtattgacggggtggcctggcccttgagaaagcactagaattggacatgcaccaagtcgacagcaaaagccaaagcaaagcaagcaagcaaaaacaagcacattgacaccaccacccccacaacacaaaccacactcacaaataagaacacctgacatttgctttaaccagagtgaggacgagaagatccatccggagatggatgatgtgtgtgctttcgaggatccagacgaagatgctgctgctgggtgctgcgtcctcccaaaagctcactaccaccacccactgaccgcgtttgccgccgcatcagttaagcccactgctcctggacgaaaaggcggcccgcttgttgttgttaaccctcccaaaaagttcaatctttatataatggtcgtgtctcctctcggtggtcacctccaaaatggtccatgtgagaagagagcttagtcagaggcgcacgcggctcaatgcaacaaactctccgcttcgccgtgcgatcgagatcgctaccttgctgtttctggggagagtttggaccacgagctgcgcgccgccaatcagagattttgattgagagaaaattgagtgaaacaatttatagcaccaagaaggtaacgtacattttgaaacattttctttttttctcttaaaaaaaaatacaaacaacccacaaatcaaaataccatagactcaatagtatgcaaaagtataaaaaaaaaaatttaaaaaaaaaaaagaaaagacaagtgtgttcaaagtgttcaagacatctcggaaaaacgctaaaaattgttgcaagcgagcgcgcatagcggaaaaatcatttggcaatttgaaaactgttcgtcaaataaataatacaccccaattaagtaagaacacagccaggagctcgaaactaatctatgcgccttctcttttccccggacacctgtagacgtggacggcatcaagtatgtcatcaactttgactacccgcaaaacagcgaggactacatccatcgcatcggtcgcacaggacgatccaacacaaagggcacctctttcgccttcttcaccaagaacaatgccaagcaagccaaggcgctggtcgacgtactccgagaagctaatcaggtgagttcatagcgtggtatcaggttacaacaccatttgggcagtcaaatctagtttgggtaaatctacatctaggtcttatattccaaatcttagaattagcatgcagatcccttaaccacatcgatttactgctctttttgatactgacccttagaggtaaacacaattctgatggtttcttatttctttatcaggaaatcaatcctgccctggaaaatctggcccgcaactcgcgctacgacggtggcggcggacgctcccgttatggaggcggtggcggcggcggtcgcttcggcggcggcggcttcaagaagggcagcctgagcaacggacgaggcttcggaggaggcggcggcggcggcggcgaaggcagacactcgcgcttcgactagatcgcggacaattagatgagcagtaaaagaagctataggaacaggagatttcagtagctaaactaaaccgcactaggtcctaagttaaattaagttcatagcttaagttaagatttcgtactactttcaccaaaccgctgacggttatttttagacttaaattcagactccctgattaatgaaacactacaaaatgcgagctatttgaacatagcgaatttatgtttaaatgatttgtaagttatttgacgctggccgcgaggtcggtacaacacaatccaattgagaacatcaaaaacactttacttaaacgcaaaaaccaattttcaaatatcatgtgataatttcttaatttaacgcaacgtatcactaaactaaaagcaaaggaaatcgtagcgcgaggagtacgttgatgtagtggaggaaaaggaggaagtaaggatcattcccgtctgtcccgttttgatgacaatgaacaaaggctgacctgacgagcgacctttgtttgataaataaattcttcaaattacttttggaaaattaacttttggataccttttatggctcaacacgagaacaagaatgtgtaaagcaaacaaagcaaacgggaaatcacattaactactgacactaaatacaaaagaaaaacaaactgtatgtacaagatgagaagttctctttcaatttaatttttcggaaaaaaataaagtttgtgtatacctattacaacctaaaccaacaacaaagcttctgttttatgcattcagctcaactgaatcgtaagcgactgggtcccacaaaggaatgccatttcccatgaaaggttgcgggtgtaaaataatcgtgatggcagcaatattttcgcagacatcattaagtgcgagacctggtcgctcgtggcagtgtcatcagcgatgccctcaccccttcaaaaatgccagataagacatggtgtcctccagggtgggaataccagagttcccaaccaagttgtctgctagccaagattcactcagcgactgcaaatggcataggcttcttggcattactagtgaatttcgtgaatttgaaataaataatcgaaataactgattcatatttaagatttccgcttttaaatcgttttcgaaatcgtttagactgagggatgtacattcacttcaattactctgatttgaagtcttaactacgttccaggaatcgatagttggcaacattcagtgaaataagcacggcggaccgtcttctgacaccacattcagacgcaatgaagccaatttacgttcgacttggcctgcttcgttgcgcgggttaaacgacctttctttgtccagggtcctcatccgagatgcttatgacaagttagctgtgttcttgggaccagatcaatccacttaccccgtttgcaggacggcgatttccgaggaccgataatgacgctgctggggacgtgaatgtggtcggattggagttcctgccattcgctggctacgttgggacgtcgcgctccggccgttgcggcgaagttgagaaggaagtcatttgtctaattgcttgaattgggctgtgcgcttgcaggacgaaaaggatgagcgggggagttttgattggtgatacgtaaagccaaagcaactttggcaaatttgttatcaagttttgaggcaaaagtttgtttgggtcagtcagtgctggaaaatttctctcttctttctcttcgcttgataccttgaac

SEQ ID NO: 28427 - DNA, 2856 bp, DROSOPHILA
aacgacagcgcacgtcataaaaagaatttgcctgatttgtgaaacgtgttcttgcttcgtttgctattttatagcgttttaatttgtctgtatgccccgaacatgaacacgcgcactcacacagcggcacatacggacttgcttgtatgcgtgaatgcctgttgacggcggcattttctcgtgctcgtagaacagttcgaacagtgtgtgcgagcgtataacagtcggcggctgtcactgactagcgccgtcctgctcactcgccagcatgcctttccatcacattctttccatggctcacacgagcatcaagataaattggtggtcaaagatcaaaccagtacaagaaactgcaaactactaccttaagttcaaataagctgcaagatgatgatgatggcaccacacgatcgcgactttggtcacagtggacgtggcggtcgcggaggcgatcgaggcggcgatgatcggcgaggaggcggcggcggaggcaatcgcttcggtggcggcggtggcggtggcgattaccacggcataaggaatggacgcgtcgagaagcgacgcgatgaccgcggaggcggcaaccgatttggaggtggtggtggattcggggatcgccgaggaggaggtggcggcggcagccaagacctccccatgcgtccggtcgacttctccaacctggctcccttcaagaagaacttttaccaggagcaccctaacgtagcaaaccgatcgccctacgaagttcagaggtatcgcgaagagcaggagatcaccgtgcgcggacaggtgccgaaccccatccaggacttctccgaggtccatctgcccgactacgtcatgaaggagatccgccgacagggctacaaggcccccaccgctatccaagcgcagggctggcctatcgccatgagtggctcgaacttcgtcggcattgccaagacgggatccggaaagaccctgggctacatcctgcccgctattgtccacatcaacaaccagcagccgctgcagaggggcgacggacctatcgccctcgtgctggcccccactcgggagctggcccaacagatccagcaggtggccaccgaattcggttcctcgtcgtatgttcgcaacacctgcgtcttcggcggcgccccgaagggcggccaaatgcgggatctgcagcgcggctgcgagatcgtcattgccacacccggacgtcttattgatttcctctccgccggctctactaacctgaagcgttgcacctacttggtgctggacgaggccgatcgcatgttagacatgggcttcgagccccagatcagaaagatcgtctcacagatccggcccgaccgacagacgctcatgtggagcgctacctggcccaaggaggtcaagcagcttgccgaggactttttgggcaactacatccagatcaacattggatcgctggagctgtccgccaatcacaacatccgccaggtggtggacgtttgtgacgagttcagcaaggaggagaaattgaagaccctcctgtcagacatctacgacaccagcgagagccccggcaagattatcatattcgtggagacaaagcgacgcgtggacaacctggtgcgcttcatccgcagcttcggagtccgttgtggagctattcacggtgacaagtcgcaatcagaacgagactttgtgctccgtgagttccgctcgggcaagtccaacattctggtggccaccgatgtggcggcccgtggactagacgtggacggcatcaagtatgtcatcaactttgactacccgcaaaacagcgaggactacatccatcgcatcggtcgcacaggacgatccaacacaaagggcacctctttcgccttcttcaccaagaacaatgccaagcaagccaaggcgctggtcgacgtactccgagaagctaatcaggaaatcaatcctgccctggaaaatctggcccgcaactcgcgctacgacggtggcggcggacgctcccgttatggaggcggtggcggcggcggtcgcttcggcggcggcggcttcaagaagggcagcctgagcaacggacgaggcttcggaggaggcggcggcggcggcggcgaaggcagacactcgcgcttcgactagatcgcggacaattagatgagcagtaaaagaagctataggaacaggagatttcagtagctaaactaaaccgcactaggtcctaagttaaattaagttcatagcttaagttaagatttcgtactactttcaccaaaccgctgacggttatttttagacttaaattcagactccctgattaatgaaacactacaaaatgcgagctatttgaacatagcgaatttatgtttaaatgatttgtaagttatttgacgctggccgcgaggtcggtacaacacaatccaattgagaacatcaaaaacactttacttaaacgcaaaaaccaattttcaaatatcatgtgataatttcttaatttaacgcaacgtatcactaaactaaaagcaaaggaaatcgtagcgcgaggagtacgttgatgtagtggaggaaaaggaggaagtaaggatcattcccgtctgtcccgttttgatgacaatgaacaaaggctgacctgacgagcgacctttgtttgataaataaattcttcaaattacttttggaaaattaacttttggataccttttatggctcaacacgagaacaagaatgtgtaaagcaaacaaagcaaacgggaaatcacattaactactgacactaaatacaaaagaaaaacaaactgtatgtacaagatgagaagttctctttcaatttaatttttcggaaaaaaataaagtttgtgtatacctattacaacct

SEQ ID NO: 28428 - protein, 578 aa, DROSOPHILA
MMMMAPHDRDFGHSGRGGRGGDRGGDDRRGGGGGGNRFGGGGGGGDYHGIRNGRVEKRRDDRGGGNRFGGGGGFGDRRGGGGGGSQDLPMRPVDFSNLAPFKKNFYQEHPNVANRSPYEVQRYREEQEITVRGQVPNPIQDFSEVHLPDYVMKEIRRQGYKAPTAIQAQGWPIAMSGSNFVGIAKTGSGKTLGYILPAIVHINNQQPLQRGDGPIALVLAPTRELAQQIQQVATEFGSSSYVRNTCVFGGAPKGGQMRDLQRGCEIVIATPGRLIDFLSAGSTNLKRCTYLVLDEADRMLDMGFEPQIRKIVSQIRPDRQTLMWSATWPKEVKQLAEDFLGNYIQINIGSLELSANHNIRQVVDVCDEFSKEEKLKTLLSDIYDTSESPGKIIIFVETKRRVDNLVRFIRSFGVRCGAIHGDKSQSERDFVLREFRSGKSNILVATDVAARGLDVDGIKYVINFDYPQNSEDYIHRIGRTGRSNTKGTSFAFFTKNNAKQAKALVDVLREANQEINPALENLARNSRYDGGGGRSRYGGGGGGGRFGGGGFKKGSLSNGRGFGGGGGGGGEGRHSRFD

SEQ ID NO: 28429 - DNA, 9874 bp, DROSOPHILA
ttctttaataagtattactttttatagacttgaaatggtcaacaagcaagttctatgaaattttgaaattaatgatgaaaattctgtgtgttgtacaatattatattttcttataaataataggatatatttttcctttcagaatattgagccaaccttattttaattctttaaaatattagtaaaaatgatgcgagatttgcgcttttggtagatttcaaaaaatttgtattaattgaaaatgttaaataaaccacaaatggggtgagtctttgctaaatgctcaacacagaaagttgttttatgcttatatttgttaaggtatatttactaatctccgcacagactacgttttggtaggctaggaaatttaagacatttccgaatattaggagtacggaccgacgacgagatacatttaaagttcgtttcagcagaatcttaaatattaaaaacttagcgggcaagtaaatacaccgcgttcagctgattatcgatagctaggaaatttaagacatttccgaatattaggagtacggaccgacgacgagatatatttaaagttcgtttcagcagaatcttaaatattaaaaacttagcgggcaagtaaatacaccgcgttcagctgattatcgatagcaaccaggtggtcactctaatagacgttttcatgcgagcccgctgcggtcacaccaacttctcgaccgatttttcccctccatctagggtcactctaattttggacgaggttaggtaagacacgcgcggatgccgcgctgcgtaggataaatccgtcattagcataaccgcattgaagctaagtcttcgggaaaatgcttaagcttgtgcaatacatagccccccgggtgggcggcgccacgccccgaccgactgcctgcggctggggcaacttgctattgatttccccgagaagtggcgcgagctccgagaaatgtataacgcaacgtcgccattttcttttctcctccgccagcagcagcggcactttcgcttcttcttcttcgctctgcaccgaacaacgacaacagttccacgggagtcgcaggaatcgtgagacaatactgttcccaagcacatatagtagtctccaagctcagtcgcagcgtgcgtttcgagacagctcgaaaccagattcagacgactacgtagattccatcccgaaagcagagcagcggacgaggacgaggaaatcgcttttcaacgatcccgacgaaagaactgaggaaatcaaaattgaaggagtaatgtgagtacagccgcaagatttcatatgaaatgcgttggttttttccactcactgtcgccattttatcacccttcgtgccattcctctttttttttttttttttctgtacacctacgaagcgaggtgatgagtaattagtgtgagcgaaagagagagtttggggagagagagaaaaacacatggtttgctaaattttgtcagtcggaggtgaggttttcagccatttgttgtttttttctttgtgtttgcccccgcacatccgcaaaggagtagcaaaagcaacaagaacgacagcgcacgtcataaaaagaatttgcctgatttgtgaaacgtgttcttgcttcgtttgctattttatagcgttttaatttgtctgtatgccccgaacatgaacacgcgcactcacacagcggcacatacggacttgcttgtatgcgtgaatgcctgttgacggcggcattttctcgtgctcgtagaacagttcgaacagtgtgtgcgagcgtataacagtcggcggctgtcactgactagcgccgtcctgctcactcgccagcatgcctttccatcacattctttccatggctcacacgaggttttgtagagatatcgcgatgtttttggtattggcaattttataatttgatgtaaccatcccgacatagatttatacttactatgcttaatttgggaagtgaatggggttaatggtttgcttcgtttggttatctaatgcgtacattgaaatatataatttcagtataattctgtatactgaggacaattttagggaaaagtagggttattctcttaaaattttctctacactataagtaaaggttccatgcaaacacatttaacttacagattatcaaaaatgcattttatcgatcattttatctattttgctacgctctttttgtgtttacttatcatgaaccatgcttgttatgcaataaaaattatttattagaaagttatactatagtattgataaaaactcaagtaacaaccaaatattaaatggtaatagtaacccagttcgtgaactacgccatcacataaacggccccattagtctaaaatgtcaaatgacgccaattgattatgagctccccctttggcgagcgcgcgattcgtcttttcgcatgtcaaaaagcgacaggtagacacacagaaagtcaaaggtgcccccagggactgtcccctcctcccctcgggtgtttgcccaccgttgaaactaggggcaagacatttggctgtctcataaatgttcagagcgttccgcttcgctagttgggcacaaacgttagcgtgccagtgggtcctacaaatagacgtttagggcggtacggtgttccaaattgacagagtaatagacaaaaaaaaacgtgggcctggatcgtgggtgatttgcatggtgcaccccatagtgatgcccactaggatcacgaaaatggagcttacatacgaagtaaagcgaatataaagtggaaatttatagaagttagttcgtaacacaataaacataatttatgttgtaaattttgttttatacaactttaccatccaacttaatcttgcactatatttattaccacattgtatatacactccgcagagttaatattatttttccctaattattgcaaagtgctaacatatataggtcggtaccttcgccagttctgactggaactagaactgcgccaggttgattaatgccagagcaataaacgcagggctttgtacatggggctgtttagtttagttgagcatttaggggctgataaactggggtgaaaaattggtgggagggtgggctgtgaatagaaaccctgctcgaattgcatgttgttgtcaatcaaatttgccttactgtttgcattattcgaaatttatttaatttccctaacacgcaattagtttttatttaagtttattgcggttgtagcacagcacaactcccatgtcagctgtttagcagcgtcgaaagaaatcgaaaagcgaagacttaccttccaagccaagtcgcagttgaaatccaagtcccaactggcagacgtctagaaacggcagcatgcgagcaaagtaagccaagtcactcgtttctttttttcctcaattttctgtcaaagaaatacttaagaaaagaaagtgcagctgtctacgccgagccggaaaaaatgattccagttaagcatggtttaattctcgaaggtcccttttatcaagggaaaatttatgacacacagtttctgggtaatgtgtgtgcagcgcaaaattattttagatggcagataaggaggaattgattatacaaatgtacaacgcgaaattaaaaagtttgtgagaaaactatcaaactatatcaacttcagcgaaattcggttacaaagctcaaagtgggatattttcttaaagattccactgaattcacggcagcgaaataacaagtcgtgaagtcgttcaatttccatgaataaggaaaaggcccttgatacttgacactaagtaaacttcggcaatgcaagataagcatattagaattaaattactttaatctcatttgcctttaccaaagccaattaccatcgcaaccattaattttgccaaagttatctagaataaattacaatacaaaaaggcacacagggtacgcgtgaatttttaatttatcaagttaatgggaaaaacacttgtaatgccactaatttaattttttttatctcgaataaaacagcatcaagataaattggtggtcaaagatcaaaccagtacaagaaactgcaaactactaccttaagttcaaataagctgcaagatgatgatgatgtgagatttcttttcttgagcattccgtttctattttgcatacttagatactcatcgatcttcctttattatttcccagggcaccacacgatcgcgactttggtcacagtggacgtggcggtcgcggaggcgatcgaggcggcgatgatcggcgaggaggcggcggcggaggcaatcgcttcggtggcggcggtggcggtggcgattaccacggcataaggaatggacgcgtcgagaagcgacgcgatgaccgcggaggcggcaaccgatttggaggtggtggtggattcggggatcgccgaggaggaggtggcggcggcagccaagacctccccatgcgtccggtcgacttctccaacctggctcccttcaagaagaacttttaccaggagcaccctaacgtagcaaaccgatcgccctacgaagttcagaggtatcgcgaagagcaggagatcaccgtgcgcggacaggtgccgaaccccatccaggacttctccgaggtccatctgcccgactacgtcatgaaggagatccgccgacagggctacaaggcccccaccgctatccaagcgcagggctggcctatcgccatgagtggctcgaacttcgtcggcattgccaagacgggatccggaaagaccctgggctacatcctgcccgctattgtccacatcaacaaccagcagccgctgcagaggggcgacggacctatcgccctcgtgctggcccccactcgggagctggcccaacagatccagcaggtggccaccgaattcggttcctcgtcgtatgttcgcaacacctgcgtcttcggcggcgccccgaagggcggccaaatgcgggatctgcagcgcggctgcgagatcgtcattgccacacccggacgtcttattgatttcctctccgccggctctactaacctgaagcgttgcacctacttggtgctggacgaggccgatcgcatgttagacatgggcttcgagccccagatcagaaagatcgtctcacagatccggcccgaccgacagacgctcatgtggagcgctacctggcccaaggaggtcaagcagcttgccgaggactttttgggcaactacatccagatcaacattggatcgctggagctgtccgccaatcacaacatccgccaggtggtggacgtttgtgacgagttcagcaaggaggagaagtaagtggaccttaattctaattgtaattgtctagttgatactagaatttagagaagttcctcttataaaatttcttaatttaatatttcctcctatcaatacagattgaagaccctcctgtcagacatctacgacaccagcgagagccccggcaagattatcatattcgtggagacaaagcgacgcgtggacaacctggtgcgcttcatccgcagcttcggagtccgttgtggagctattcacggtgacaagtcgcaatcagaacgagactttgtgctccgtgagttccgctcgggcaagtccaacattctggtggccaccgatgtggcggcccgtggactaggtaagtttgctctcgcagcggcgtagaatatacaccgtagtttgcggccgaaagatttggatgggcctgtttagcgataaggtcacacttgctagggccattgcttacaacataccatcactaccagaggacaccgcacctaacgatcacccagcatcattacacgcacccactacatgcgagcagaacctaatcctacccgtaaaccaacctacccaccatccgaacttcctaaccacacctaatgatatatcccggtatctacccacatctagcgagcgcgccaactcagaaacagttttttttagacatacgccaaatgccgaaatcgaataatcaacttgaacttttaccccaccccctgaccctgacctgcaacccgcccccacctgcaacacccggcccaacccctgctaaaataatgtatgaaatgcgtaatgatcgtatatgatccatatgcactgcggtgtacctgttactacgcaacttttgtctttgtgcgtgtctctgcctctttctctctctcccccccccctctctctctctctctttcttgtttctttctcgtttacagaggccgattttggtagtatgatggggaggataatgaatgagcggcgaccactgcgaacactcgtgacttgagcgacttttgccaacatcagaatcagatctgttatgatatatgatgatagcacatcctgtgtgatatcttgcgcaaaaggaccgatgaaagttctcagattcagacggtcgagagacacgaatatcgaatatccccaacatcatgcatcatatgtggcctctgcagtccccgactttttgttgagaaagagtgaaataatatgatatgagacgtttttgcgaccaaagactaccatctaccaaccaaaaaccatctaccaatcaaccaaataagatccaacaacaacaactgaaccgaaccatcagagagccagctttttcctcagcagtggatggcggaaggcggcgtgcaaagtattgacggggtggcctggcccttgagaaagcactagaattggacatgcaccaagtcgacagcaaaagccaaagcaaagcaagcaagcaaaaacaagcacattgacaccaccacccccacaacacaaaccacactcacaaataagaacacctgacatttgctttaaccagagtgaggacgagaagatccatccggagatggatgatgtgtgtgctttcgaggatccagacgaagatgctgctgctgggtgctgcgtcctcccaaaagctcactaccaccacccactgaccgcgtttgccgccgcatcagttaagcccactgctcctggacgaaaaggcggcccgcttgttgttgttaaccctcccaaaaagttcaatctttatataatggtcgtgtctcctctcggtggtcacctccaaaatggtccatgtgagaagagagcttagtcagaggcgcacgcggctcaatgcaacaaactctccgcttcgccgtgcgatcgagatcgctaccttgctgtttctggggagagtttggaccacgagctgcgcgccgccaatcagagattttgattgagagaaaattgagtgaaacaatttatagcaccaagaaggtaacgtacattttgaaacattttctttttttctcttaaaaaaaaatacaaacaacccacaaatcaaaataccatagactcaatagtatgcaaaagtataaaaaaaaaaatttaaaaaaaaaaaagaaaagacaagtgtgttcaaagtgttcaagacatctcggaaaaacgctaaaaattgttgcaagcgagcgcgcatagcggaaaaatcatttggcaatttgaaaactgttcgtcaaataaataatacaccccaattaagtaagaacacagccaggagctcgaaactaatctatgcgccttctcttttccccggacacctgtagacgtggacggcatcaagtatgtcatcaactttgactacccgcaaaacagcgaggactacatccatcgcatcggtcgcacaggacgatccaacacaaagggcacctctttcgccttcttcaccaagaacaatgccaagcaagccaaggcgctggtcgacgtactccgagaagctaatcaggtgagttcatagcgtggtatcaggttacaacaccatttgggcagtcaaatctagtttgggtaaatctacatctaggtcttatattccaaatcttagaattagcatgcagatcccttaaccacatcgatttactgctctttttgatactgacccttagaggtaaacacaattctgatggtttcttatttctttatcaggaaatcaatcctgccctggaaaatctggcccgcaactcgcgctacgacggtggcggcggacgctcccgttatggaggcggtggcggcggcggtcgcttcggcggcggcggcttcaagaagggcagcctgagcaacggacgaggcttcggaggaggcggcggcggcggcggcgaaggcagacactcgcgcttcgactagatcgcggacaattagatgagcagtaaaagaagctataggaacaggagatttcagtagctaaactaaaccgcactaggtcctaagttaaattaagttcatagcttaagttaagatttcgtactactttcaccaaaccgctgacggttatttttagacttaaattcagactccctgattaatgaaacactacaaaatgcgagctatttgaacatagcgaatttatgtttaaatgatttgtaagttatttgacgctggccgcgaggtcggtacaacacaatccaattgagaacatcaaaaacactttacttaaacgcaaaaaccaattttcaaatatcatgtgataatttcttaatttaacgcaacgtatcactaaactaaaagcaaaggaaatcgtagcgcgaggagtacgttgatgtagtggaggaaaaggaggaagtaaggatcattcccgtctgtcccgttttgatgacaatgaacaaaggctgacctgacgagcgacctttgtttgataaataaattcttcaaattacttttggaaaattaacttttggataccttttatggctcaacacgagaacaagaatgtgtaaagcaaacaaagcaaacgggaaatcacattaactactgacactaaatacaaaagaaaaacaaactgtatgtacaagatgagaagttctctttcaatttaatttttcggaaaaaaataaagtttgtgtatacctattacaacctaaaccaacaacaaagcttctgttttatgcattcagctcaactgaatcgtaagcgactgggtcccacaaaggaatgccatttcccatgaaaggttgcgggtgtaaaataatcgtgatggcagcaatattttcgcagacatcattaagtgcgagacctggtcgctcgtggcagtgtcatcagcgatgccctcaccccttcaaaaatgccagataagacatggtgtcctccagggtgggaataccagagttcccaaccaagttgtctgctagccaagattcactcagcgactgcaaatggcataggcttcttggcattactagtgaatttcgtgaatttgaaataaataatcgaaataactgattcatatttaagatttccgcttttaaatcgttttcgaaatcgtttagactgagggatgtacattcacttcaattactctgatttgaagtcttaactacgttccaggaatcgatagttggcaacattcagtgaaataagcacggcggaccgtcttctgacaccacattcagacgcaatgaagccaatttacgttcgacttggcctgcttcgttgcgcgggttaaacgacctttctttgtccagggtcctcatccgagatgcttatgacaagttagctgtgttcttgggaccagatcaatccacttaccccgtttgcaggacggcgatttccgaggaccgataatgacgctgctggggacgtgaatgtggtcggattggagttcctgccattcgctggctacgttgggacgtcgcgctccggccgttgcggcgaagttgagaaggaagtcatttgtctaattgcttgaattgggctgtgcgcttgcaggacgaaaaggatgagcgggggagttttgattggtgatacgtaaagccaaagcaactttggcaaatttgttatcaagttttgaggcaaaagtttgtttgggtcagtcagtgctggaaaatttctctcttctttctcttcgcttgataccttgaac

SEQ ID NO: 28430 - DNA, 2725 bp, DROSOPHILA
cggcactttcgcttcttcttcttcgctctgcaccgaacaacgacaacagttccacgggagtcgcaggaatcgtgagacaatactgttcccaagcacatatagtagtctccaagctcagtcgcagcgtgcgtttcgagacagctcgaaaccagattcagacgactacgtagattccatcccgaaagcagagcagcggacgaggacgaggaaatcgcttttcaacgatcccgacgaaagaactgaggaaatcaaaattgaaggagtaatggcaccacacgatcgcgactttggtcacagtggacgtggcggtcgcggaggcgatcgaggcggcgatgatcggcgaggaggcggcggcggaggcaatcgcttcggtggcggcggtggcggtggcgattaccacggcataaggaatggacgcgtcgagaagcgacgcgatgaccgcggaggcggcaaccgatttggaggtggtggtggattcggggatcgccgaggaggaggtggcggcggcagccaagacctccccatgcgtccggtcgacttctccaacctggctcccttcaagaagaacttttaccaggagcaccctaacgtagcaaaccgatcgccctacgaagttcagaggtatcgcgaagagcaggagatcaccgtgcgcggacaggtgccgaaccccatccaggacttctccgaggtccatctgcccgactacgtcatgaaggagatccgccgacagggctacaaggcccccaccgctatccaagcgcagggctggcctatcgccatgagtggctcgaacttcgtcggcattgccaagacgggatccggaaagaccctgggctacatcctgcccgctattgtccacatcaacaaccagcagccgctgcagaggggcgacggacctatcgccctcgtgctggcccccactcgggagctggcccaacagatccagcaggtggccaccgaattcggttcctcgtcgtatgttcgcaacacctgcgtcttcggcggcgccccgaagggcggccaaatgcgggatctgcagcgcggctgcgagatcgtcattgccacacccggacgtcttattgatttcctctccgccggctctactaacctgaagcgttgcacctacttggtgctggacgaggccgatcgcatgttagacatgggcttcgagccccagatcagaaagatcgtctcacagatccggcccgaccgacagacgctcatgtggagcgctacctggcccaaggaggtcaagcagcttgccgaggactttttgggcaactacatccagatcaacattggatcgctggagctgtccgccaatcacaacatccgccaggtggtggacgtttgtgacgagttcagcaaggaggagaaattgaagaccctcctgtcagacatctacgacaccagcgagagccccggcaagattatcatattcgtggagacaaagcgacgcgtggacaacctggtgcgcttcatccgcagcttcggagtccgttgtggagctattcacggtgacaagtcgcaatcagaacgagactttgtgctccgtgagttccgctcgggcaagtccaacattctggtggccaccgatgtggcggcccgtggactagacgtggacggcatcaagtatgtcatcaactttgactacccgcaaaacagcgaggactacatccatcgcatcggtcgcacaggacgatccaacacaaagggcacctctttcgccttcttcaccaagaacaatgccaagcaagccaaggcgctggtcgacgtactccgagaagctaatcaggaaatcaatcctgccctggaaaatctggcccgcaactcgcgctacgacggtggcggcggacgctcccgttatggaggcggtggcggcggcggtcgcttcggcggcggcggcttcaagaagggcagcctgagcaacggacgaggcttcggaggaggcggcggcggcggcggcgaaggcagacactcgcgcttcgactagatcgcggacaattagatgagcagtaaaagaagctataggaacaggagatttcagtagctaaactaaaccgcactaggtcctaagttaaattaagttcatagcttaagttaagatttcgtactactttcaccaaaccgctgacggttatttttagacttaaattcagactccctgattaatgaaacactacaaaatgcgagctatttgaacatagcgaatttatgtttaaatgatttgtaagttatttgacgctggccgcgaggtcggtacaacacaatccaattgagaacatcaaaaacactttacttaaacgcaaaaaccaattttcaaatatcatgtgataatttcttaatttaacgcaacgtatcactaaactaaaagcaaaggaaatcgtagcgcgaggagtacgttgatgtagtggaggaaaaggaggaagtaaggatcattcccgtctgtcccgttttgatgacaatgaacaaaggctgacctgacgagcgacctttgtttgataaataaattcttcaaattacttttggaaaattaacttttggataccttttatggctcaacacgagaacaagaatgtgtaaagcaaacaaagcaaacgggaaatcacattaactactgacactaaatacaaaagaaaaacaaactgtatgtacaagatgagaagttctctttcaatttaatttttcggaaaaaaataaagtttgtgtatacctattacaacct

SEQ ID NO: 28431 - protein, 574 aa, DROSOPHILA
APHDRDFGHSGRGGRGGDRGGDDRRGGGGGGNRFGGGGGGGDYHGIRNGRVEKRRDDRGGGNRFGGGGGFGDRRGGGGGGSQDLPMRPVDFSNLAPFKKNFYQEHPNVANRSPYEVQRYREEQEITVRGQVPNPIQDFSEVHLPDYVMKEIRRQGYKAPTAIQAQGWPIAMSGSNFVGIAKTGSGKTLGYILPAIVHINNQQPLQRGDGPIALVLAPTRELAQQIQQVATEFGSSSYVRNTCVFGGAPKGGQMRDLQRGCEIVIATPGRLIDFLSAGSTNLKRCTYLVLDEADRMLDMGFEPQIRKIVSQIRPDRQTLMWSATWPKEVKQLAEDFLGNYIQINIGSLELSANHNIRQVVDVCDEFSKEEKLKTLLSDIYDTSESPGKIIIFVETKRRVDNLVRFIRSFGVRCGAIHGDKSQSERDFVLREFRSGKSNILVATDVAARGLDVDGIKYVINFDYPQNSEDYIHRIGRTGRSNTKGTSFAFFTKNNAKQAKALVDVLREANQEINPALENLARNSRYDGGGGRSRYGGGGGGGRFGGGGFKKGSLSNGRGFGGGGGGGGEGRHSRFD

SEQ ID NO: 28432 - DNA, 4380 bp, DROSOPHILA
gagggtgttgaaataggaactcaaaatcacgaaggcacttaacaacgcaaatagtgaagctatttagtgaacacagactattatatgtgacataacaaccggaaattgcaggatgatatgaaaaaggtaaaatgcaacaacaaatacagataatcagtagcaagaaatcatcgaagtgtagcacggcaaaataggagttgacatgtatcttttaagaagacctaccgaaatttcaaacatcttgatccagccggccaaaaccgcatctctgtgcaataattcatcgatcgtgtcaacaaactagttagtgcctaccaatgggtcgagaagtctctactacttgcaatctgttcacgacacgaatccagcaaagatgtagctcgattcgtctcctgtgaagcgttgcagaagtacatttcaatatgggtaacgcctgttgtgacttgaggtatctcgcccttccatgaccaaaggagaaaaagaatccatgttgtgagaaatttcagaagccaaatagagtttgcaaagctacaaatctaagtggatgagtatttaggaattttacatatgaagacattgttcatcgggctggatcactgttgaggatcgacttacaaagcaaatttttgaatatttttgaatacatttcactacgtacaaaatatatacatttaaacataatattttcagagcgaggctgtttttgggtccagcaaaaaataatctaaaaatgttttgatctgtaagaagtacgtgcttagtgaggtctacctgtatataggatctgtacactctagggagaaagcatcaaaatccgagtaccaaagcttttcaaaagatctctttcttagttgtgataagctcggctcaagtctcttgatgggcttgaaagctttactcacggcctctctgggacagtatctctcaacgacgaatcgattatcatctgcgatcgcatttaaaaagtctctcgcccgttaattcgcgatcagttgtctctgcgtatcgaaggcgttcgtagtttaatttcgctcttcacggttctctggttcgaggtcgacgcgcgtaatcgcaaagacgcgttcttattaaataagctgtgaaatttcttattaaaattggtgggaaatatcccagaagatgaaatcaacacgcaaagtagttgggatttttttggccacctgcctgctgcctttcaccgttctacaaaatgttgcggcacaaggaagtaagtaccgagctataaatatgtgattcactcagagctgactcattaattgagaccggtacttatccgtgttaagcgcaatagcttaacagaattcaatgcggttatcagacttgaacttgaacaaatttcccatgtcaatgacttaattgagcgcactcgtgtattctttcattctcctcaataaattttatgggaccactcgtcaaacaacatattacattatcaagggatttgattgatgtcaaaaaattaatcgtattttttattatcaagtagcaactcctgacaattttaaatatcgttcttaatgcttgtgttctcaaaaacgaaacataattgaaataacgtataagtgcaatttaaatgtttattaaacataaaccaaattcttaataggatttttataatttgaaattaattaagctgcaaaattaggtcactaatattgactacaattattgatagcataatcaagcgaattaaaatgtttaatgaagtcgtttttgacttaagtgttttgttttaattcaacgacgtgctgattgatagtattattgcttaatttatttaaattaaataaatatttatatttaatttaaatagctttatcagcaggttgatttccgaattcaaaatttcccaagttgccttcatgttttataccactcttaactcattttgacaggagtaactgatcttcctacttgtgtctttaattgttatgtgtaggttgtaggaatcccaaccagaaacagggacaatgtttgtccatatacgactgtcaaagtctgctttccgtgattcagcagtcttatgtcagcccggaggacagaacctttcttcgaaactcacagtgcctcgatggagtaggtcgccagccatatgtttgctgtacaagtgatcgcagctttggatcccaggaggccacctccgcagcccctcctccaacgactaccagttcaagttcacgaggtcaagacggtcaagcgggtctgggcaacctgctgccctcgccacccaagtgcgggccccactccttcagcaataaggtctataatggcaacgacactgctattgacgagttcaactggatggcactgcttgagtacgtggatagtaagtgacatcttatataaaatcatgtaactttagttaacgcatctttatccatgttgatagacaggggacggcgggaactcagttgcggtggcagtttgatcaacaatcgttacgttcttaccgccgcccattgcgtcattggtgcggtggaaacggaagtaggtcacctgtaagtatttacgtggtttgatgtttatccacgtttttaaataactaaatgagttgtgcccctatacagaactaccgttcggttgggggaatacgataccagcaaggacgtggactgcatagatgacatttgcaaccagcccatcctacaattgggcatcgaacaggccactgtacatccccaatatgatcctgccaacaagaaccgcattcacgacattgccttattgcgattagatcggcccgttgtgcttaatgagtatattcagccggtttgtttgcctttggtaagcacacgaatggcaatcaataccggggagctcttggtggtcagcgggtggggccgaaccacaacaggtgagtttggatattaaagatacttatattcattctaaagatatcaattgaagctcttgaccaagaagaatctataatttcataactaattgattcaaattcttattctatagcccgcaagagcaccataaagcagcgattggatctgccggtgaatgaccacgattactgcgcacgaaagttcgccacgaggaatatccacctgatcagttcccagctctgtgttggcggggaattctaccgcgacagctgtgatggcgactccggcggaccgctgatgcgaaggggttttgaccaggcttggtaccaggagggcgtggtctcctttggcaaccgctgcggactagagggttggccaggtgtctacactcgggtagccgactacatggactggatcgtggagaccattcgtccctgagcagcggaacgaaggccgcttttgttctgataatgttttaattaaagtcaagtcgagagtgctctttgggctgggcgcccatcctttaattaacttgcattcaatgtgattttatcagctgcacttaccacgctgcgtatacttaatgcgcttacagtctagcgccgtttgcggtaattaaaatcgctgttccccactgggatgggatggtgagagttcagtggaataactttcaagatgcgggccaacttgcccagaggcaccttcttagcgcccccagctattttctatgcaatttggcaatgaatttctattatggaagcagtgcttttcagagcttccggcgctccatccgcaaagttttcacttgtttgctggctgattgcactgaaggcgtggctaggctggaaaacgaagtagacaatggctaggctcattaattgtgtgcacgcggaaaggttaatgatgcctgcaggaaccggttagcacggacaaagggcttgggtttctttaccaaatttacagagtccacataacagctttttaatgcggatccaaatacaagcgcaagaagtaaacgaggatcgcaaaggaatttcaaacaacttaacatatatatatagttgttatagttttatataacatatatagttatagtatatccatctttccttcttaacacgatggatttaaagacggccgaataaatgaataaataaatccgagccctgataaccgaatcccatctctagttggacatacgcactgtgtaagaatatttctttattttttcttttatcttttttatattttatttttgagaaaattcattgcgtacacatggaaaaaatggatcgaaagccattcatttccttaaacctataaaaatttggattgaagacggaaagaacttatctaataaaatgttggttcttggaataattaaaaaaatctgtatgaataaaccacgaattggtgttattctgagtacaatacttttttatttcagcataattaaatacgttgattcagttatattatcatatataagtaatatatatatatatatacattacattttaaaaag

SEQ ID NO: 28433 - DNA, 1403 bp, DROSOPHILA
gcgtatcgaaggcgttcgtagtttaatttcgctcttcacggttctctggttcgaggtcgacgcgcgtaatcgcaaagacgcgttcttattaaataagctgtgaaatttcttattaaaattggtgggaaatatcccagaagatgaaatcaacacgcaaagtagttgggatttttttggccacctgcctgctgcctttcaccgttctacaaaatgttgcggcacaaggaagttgtaggaatcccaaccagaaacagggacaatgtttgtccatatacgactgtcaaagtctgctttccgtgattcagcagtcttatgtcagcccggaggacagaacctttcttcgaaactcacagtgcctcgatggagtaggtcgccagccatatgtttgctgtacaagtgatcgcagctttggatcccaggaggccacctccgcagcccctcctccaacgactaccagttcaagttcacgaggtcaagacggtcaagcgggtctgggcaacctgctgccctcgccacccaagtgcgggccccactccttcagcaataaggtctataatggcaacgacactgctattgacgagttcaactggatggcactgcttgagtacgtggataacaggggacggcgggaactcagttgcggtggcagtttgatcaacaatcgttacgttcttaccgccgcccattgcgtcattggtgcggtggaaacggaagtaggtcacctaactaccgttcggttgggggaatacgataccagcaaggacgtggactgcatagatgacatttgcaaccagcccatcctacaattgggcatcgaacaggccactgtacatccccaatatgatcctgccaacaagaaccgcattcacgacattgccttattgcgattagatcggcccgttgtgcttaatgagtatattcagccggtttgtttgcctttggtaagcacacgaatggcaatcaataccggggagctcttggtggtcagcgggtggggccgaaccacaacagcccgcaagagcaccataaagcagcgattggatctgccggtgaatgaccacgattactgcgcacgaaagttcgccacgaggaatatccacctgatcagttcccagctctgtgttggcggggaattctaccgcgacagctgtgatggcgactccggcggaccgctgatgcgaaggggttttgaccaggcttggtaccaggagggcgtggtctcctttggcaaccgctgcggactagagggttggccaggtgtctacactcgggtagccgactacatggactggatcgtggagaccattcgtccctgagcagcggaacgaaggccgcttttgttctgataatgttttaattaaagtcaagtcgagagtgctctttgggctgggcgcccatccttt

SEQ ID NO: 28434 - protein, 391 aa, DROSOPHILA; identical to SEQ ID NO: 5610

SEQ ID NO: 28435 - DNA, 5635 bp, DROSOPHILA
ataggtttgaaaagtaacaatccaatactcatttgattaaagcacgccttaggcaaacccttaattgatcagccactattcgtattagttctcttttaatttagtcctcactatcatttttatttcgctatttttagttataaataaagataaaaggattagaacctgcttccaatagaaatcggttcattgttcgactcccaagtaatgttctcagttcaagcttttcttcatgggtcacttcaatagattttatttgcttgtatttctatattgtttttgacaatgctgtcaagaaagtgttggaatttatccctagctctcccactagctgagtaacaagtatctgttagtcggggaaatcgagtataccgttctctattttgttattgttgttaatagaaaagaagacgttcattgtgcgtttcgtcacaattttttcgtcaaagtttttaatgtattgtgtttagctaaaatagttttgaaaagaatagatcaaaaacatattctttagcctcagtcactaataattgataaaactaaagattttgaattcaaaatactaaaaagtttttcaaagtttttcatttcttttgagccatatcatcttcaattgacaatcattagaaaccgtaaataccaacttttcaaattactttacttatttcccttttgattttcttacagaaccatggcctataccacactttggccgccgctgcacacaagaaaagagctcaagattttcgaattggacttttgcaagcttaaccctcaagagcagaagcgctataacaaaataatggcgaccaacttttcttagtctttaagttttaatatataaaattttataatttaaaaaaaaaatatataaaataataaaagcaacaaaagtgttgatgaaaacaatatcgttctgggaatataataattatcggaagccctcacagtatttcagtattttttatatatactttaaagtcatttagtacggcaacgttactaaaaatggcgtgattaacaaaaacgtgataagcaataaaaaaaatatatcaaacgaagttttttcagattccagattaatacacgcttccttaactttgtaaaggttgtaaaatatgatcaagttttggtaggtatgagtgcaaaaataaaatgctgtctgatcttaaccaaaagccttttgaataaaaaacatgaagactgtgcaaaaatgttaaattttgatgccacttgtaaacatgtgcgcattaaggagggtgttgaaataggaactcaaaatcacgaaggcacttaacaacgcaaatagtgaagctatttagtgaacacagactattatatgtgacataacaaccggaaattgcaggatgatatgaaaaaggtaaaatgcaacaacaaatacagataatcagtagcaagaaatcatcgaagtgtagcacggcaaaataggagttgacatgtatcttttaagaagacctaccgaaatttcaaacatcttgatccagccggccaaaaccgcatctctgtgcaataattcatcgatcgtgtcaacaaactagttagtgcctaccaatgggtcgagaagtctctactacttgcaatctgttcacgacacgaatccagcaaagatgtagctcgattcgtctcctgtgaagcgttgcagaagtacatttcaatatgggtaacgcctgttgtgacttgaggtatctcgcccttccatgaccaaaggagaaaaagaatccatgttgtgagaaatttcagaagccaaatagagtttgcaaagctacaaatctaagtggatgagtatttaggaattttacatatgaagacattgttcatcgggctggatcactgttgaggatcgacttacaaagcaaatttttgaatatttttgaatacatttcactacgtacaaaatatatacatttaaacataatattttcagagcgaggctgtttttgggtccagcaaaaaataatctaaaaatgttttgatctgtaagaagtacgtgcttagtgaggtctacctgtatataggatctgtacactctagggagaaagcatcaaaatccgagtaccaaagcttttcaaaagatctctttcttagttgtgataagctcggctcaagtctcttgatgggcttgaaagctttactcacggcctctctgggacagtatctctcaacgacgaatcgattatcatctgcgatcgcatttaaaaagtctctcgcccgttaattcgcgatcagttgtctctgcgtatcgaaggcgttcgtagtttaatttcgctcttcacggttctctggttcgaggtcgacgcgcgtaatcgcaaagacgcgttcttattaaataagctgtgaaatttcttattaaaattggtgggaaatatcccagaagatgaaatcaacacgcaaagtagttgggatttttttggccacctgcctgctgcctttcaccgttctacaaaatgttgcggcacaaggaagtaagtaccgagctataaatatgtgattcactcagagctgactcattaattgagaccggtacttatccgtgttaagcgcaatagcttaacagaattcaatgcggttatcagacttgaacttgaacaaatttcccatgtcaatgacttaattgagcgcactcgtgtattctttcattctcctcaataaattttatgggaccactcgtcaaacaacatattacattatcaagggatttgattgatgtcaaaaaattaatcgtattttttattatcaagtagcaactcctgacaattttaaatatcgttcttaatgcttgtgttctcaaaaacgaaacataattgaaataacgtataagtgcaatttaaatgtttattaaacataaaccaaattcttaataggatttttataatttgaaattaattaagctgcaaaattaggtcactaatattgactacaattattgatagcataatcaagcgaattaaaatgtttaatgaagtcgtttttgacttaagtgttttgttttaattcaacgacgtgctgattgatagtattattgcttaatttatttaaattaaataaatatttatatttaatttaaatagctttatcagcaggttgatttccgaattcaaaatttcccaagttgccttcatgttttataccactcttaactcattttgacaggagtaactgatcttcctacttgtgtctttaattgttatgtgtaggttgtaggaatcccaaccagaaacagggacaatgtttgtccatatacgactgtcaaagtctgctttccgtgattcagcagtcttatgtcagcccggaggacagaacctttcttcgaaactcacagtgcctcgatggagtaggtcgccagccatatgtttgctgtacaagtgatcgcagctttggatcccaggaggccacctccgcagcccctcctccaacgactaccagttcaagttcacgaggtcaagacggtcaagcgggtctgggcaacctgctgccctcgccacccaagtgcgggccccactccttcagcaataaggtctataatggcaacgacactgctattgacgagttcaactggatggcactgcttgagtacgtggatagtaagtgacatcttatataaaatcatgtaactttagttaacgcatctttatccatgttgatagacaggggacggcgggaactcagttgcggtggcagtttgatcaacaatcgttacgttcttaccgccgcccattgcgtcattggtgcggtggaaacggaagtaggtcacctgtaagtatttacgtggtttgatgtttatccacgtttttaaataactaaatgagttgtgcccctatacagaactaccgttcggttgggggaatacgataccagcaaggacgtggactgcatagatgacatttgcaaccagcccatcctacaattgggcatcgaacaggccactgtacatccccaatatgatcctgccaacaagaaccgcattcacgacattgccttattgcgattagatcggcccgttgtgcttaatgagtatattcagccggtttgtttgcctttggtaagcacacgaatggcaatcaataccggggagctcttggtggtcagcgggtggggccgaaccacaacaggtgagtttggatattaaagatacttatattcattctaaagatatcaattgaagctcttgaccaagaagaatctataatttcataactaattgattcaaattcttattctatagcccgcaagagcaccataaagcagcgattggatctgccggtgaatgaccacgattactgcgcacgaaagttcgccacgaggaatatccacctgatcagttcccagctctgtgttggcggggaattctaccgcgacagctgtgatggcgactccggcggaccgctgatgcgaaggggttttgaccaggcttggtaccaggagggcgtggtctcctttggcaaccgctgcggactagagggttggccaggtgtctacactcgggtagccgactacatggactggatcgtggagaccattcgtccctgagcagcggaacgaaggccgcttttgttctgataatgttttaattaaagtcaagtcgagagtgctctttgggctgggcgcccatcctttaattaacttgcattcaatgtgattttatcagctgcacttaccacgctgcgtatacttaatgcgcttacagtctagcgccgtttgcggtaattaaaatcgctgttccccactgggatgggatggtgagagttcagtggaataactttcaagatgcgggccaacttgcccagaggcaccttcttagcgcccccagctattttctatgcaatttggcaatgaatttctattatggaagcagtgcttttcagagcttccggcgctccatccgcaaagttttcacttgtttgctggctgattgcactgaaggcgtggctaggctggaaaacgaagtagacaatggctaggctcattaattgtgtgcacgcggaaaggttaatgatgcctgcaggaaccggttagcacggacaaagggcttgggtttctttaccaaatttacagagtccacataacagctttttaatgcggatccaaatacaagcgcaagaagtaaacgaggatcgcaaaggaatttcaaacaacttaacatatatatatagttgttatagttttatataacatatatagttatagtatatccatctttccttcttaacacgatggatttaaagacggccgaataaatgaataaataaatccgagccctgataaccgaatcccatctctagttggacatacgcactgtgtaagaatatttctttattttttcttttatcttttttatattttatttttgagaaaattcattgcgtacacatggaaaaaatggatcgaaagccattcatttccttaaacctataaaaatttggattgaagacggaaagaacttatctaataaaatgttggttcttggaataattaaaaaaatctgtatgaataaaccacgaattggtgttattctgagtacaatacttttttatttcagcataattaaatacgttgattcagttatattatcatatataagtaatatatatatatatatacattacattttaaaaag

SEQ ID NO: 28436 - DNA, 1307 bp, DROSOPHILA
tactaaaaatggcgtgattaacaaaaacgtgataagcaataaaaaaaatatatcaaacgaagttttttcagattccagattaatacacgcttccttaactttgtaaaggttgtaaaatatgatcaagttttggttgtaggaatcccaaccagaaacagggacaatgtttgtccatatacgactgtcaaagtctgctttccgtgattcagcagtcttatgtcagcccggaggacagaacctttcttcgaaactcacagtgcctcgatggagtaggtcgccagccatatgtttgctgtacaagtgatcgcagctttggatcccaggaggccacctccgcagcccctcctccaacgactaccagttcaagttcacgaggtcaagacggtcaagcgggtctgggcaacctgctgccctcgccacccaagtgcgggccccactccttcagcaataaggtctataatggcaacgacactgctattgacgagttcaactggatggcactgcttgagtacgtggataacaggggacggcgggaactcagttgcggtggcagtttgatcaacaatcgttacgttcttaccgccgcccattgcgtcattggtgcggtggaaacggaagtaggtcacctaactaccgttcggttgggggaatacgataccagcaaggacgtggactgcatagatgacatttgcaaccagcccatcctacaattgggcatcgaacaggccactgtacatccccaatatgatcctgccaacaagaaccgcattcacgacattgccttattgcgattagatcggcccgttgtgcttaatgagtatattcagccggtttgtttgcctttggtaagcacacgaatggcaatcaataccggggagctcttggtggtcagcgggtggggccgaaccacaacagcccgcaagagcaccataaagcagcgattggatctgccggtgaatgaccacgattactgcgcacgaaagttcgccacgaggaatatccacctgatcagttcccagctctgtgttggcggggaattctaccgcgacagctgtgatggcgactccggcggaccgctgatgcgaaggggttttgaccaggcttggtaccaggagggcgtggtctcctttggcaaccgctgcggactagagggttggccaggtgtctacactcgggtagccgactacatggactggatcgtggagaccattcgtccctgagcagcggaacgaaggccgcttttgttctgataatgttttaattaaagtcaagtcgagagtgctctttgggctgggcgcccatccttt

SEQ ID NO: 28437 - protein, 241 aa, DROSOPHILA
MALLEYVDNRGRRELSCGGSLINNRYVLTAAHCVIGAVETEVGHLTTVRLGEYDTSKDVDCIDDICNQPILQLGIEQATVHPQYDPANKNRIHDIALLRLDRPVVLNEYIQPVCLPLVSTRMAINTGELLVVSGWGRTTTARKSTIKQRLDLPVNDHDYCARKFATRNIHLISSQLCVGGEFYRDSCDGDSGGPLMRRGFDQAWYQEGVVSFGNRCGLEGWPGVYTRVADYMDWIVETIRP

SEQ ID NO: 28438 - DNA, 3657 bp, DROSOPHILA
atagcgaaatcatagatactcttcatttgaatttgtaaatgcttaaaggtgcttgatcattgtataattcttatactattcatgtttttagagccaccaaccttcgaggaggccacaaactttggtgaaaggttcatcgacatcgatcaggatgagcacaatcgcacggatgactttattccgcgttaccccatgtacaccaactttgccatgccatcggctccacctcaaccccctgaagagttcgctaccaatcaaccagtacccgttctgtcactacctcatgatcccactgccccattggtcggtcaaaacaatactgaccgtccaacacaatcgtacggttggaacactaactcataaaaaaaagaagacataatctcataaaatgattttactttgatttagctttggatgttaccaataaacatagtttaaccgtttatcgtgaaactaaatcttaggaatatatataagttatccaaccaaattttctagtttagaaagtcatcaatgaacaaaatttccttgaaaatatattttaaattcgaaattcttagcgtaacactcgcacttatgtgacgaattatccaactctatctgtaggttcaactacaatatatttgttgggcaatgggcaataaatcagattctatgcaaatcctttctaattaagtcaacaatatcgaatcacatcgctaatattctcgattccacatagaacacacttatcaatacttatcacttacttatcaatacccacacatcaatatttcttttattaaatataaacaaaatttcaaaattggtacttgaaagtgaatgcgttaaaagatcgttctaggtatatgatattgattcttaaaataaatcattcccttgatttaaaattgccaccagtaaaagtatcagttaccacttgtgataatggaataatatatatttgtgtaattttgctagtgaatgaaataaattagtaaaataaaatagtggcgtgcatttaatgagacttcacttcctccgattgagtctggtccatttcgtagtagacatagcgtggtctaaaatccaactgttcgccggacaagtaatgtttgttggtcttattcagattggtggctaccatgaactcggcttcccggaaattcgaagctagaaagaaattcgaaatataaaatgcaaacggatattctataaatcgggaatagacgtacccaaagatgtggtggaaatgctaaaattcggaatcaatgttgatgctgtttcgactggaggagttggttccggagcagtgccatcaatgggttcttgcattaggagtttgccaggacagggcggcgtcacatttccaatgatgaccggcatccgggccgcaattaagcgcttttcctgctgagttgtgaccagcacctccacctcgtagttgagctgcaggcaggcacatcctgccacagtcaatgtggccgctgtttgtggcacttgcagcatgtgaagatgctgaaaattctgcagttctccacgggggaggttgtggagctcgtggcggctgcttaggacagtttgtcgctccaccttggtctccaagcgtttgggcttattctttagatgggcaacgtaagtgctgatctgaacgagggaatacaccgcctcgcgaagtgtcaatttctccgggttatgcagctttaagtgaacagaaatacctgctcctggcgaataaccctgcctgggaatctggagctgcagatgaagtggcttcatccagaatctaaggcgaggagtctgctcatagatctggatctcacagctccgcgtctcctggctcagagagttctgcgggaaaatctgcagctggcgtacatggagcacctccagcggacgatctgcactgctgtggatgagcacttggagtgtgtaccgtatgtgtccgtggcccccctcgaaattccccggacagttcttgggcagcttcacatggaaaccgtaattgtaggtgcccgcctccattatctgtggctgtgcggcctccgagcccacaaaataatcgattttggcaaaataatccacgcgataatcaaagtccaaactctgaaccaccactggctgctcgttctttttttgattcttgtgcttttggggctgctgccaggcagtgctcgcatatccattggcctccaggcatattgctgaaataaagagcataagccaaaagaattaacgatttatgaagattattataatttataagtataccacattaatttgcacaaatatttttcaagttccgattatgaaaagttactaatcaaatttgcctggtagttgataagctcactgaaaggtattagcaatttgatttcagtgcgacaaacactatcagcaatttggaagtccataaaagaaaccagatctcgatcggtgaatcagcgccactggatggccatgttatacgggatagcccatgagtcatgctccaacctacctttgattagggcccgctccgaaagggtcagatagacgtgaccattgaccgtatcgccggccctatagaccccccgtgggttgtccaattggatctcacagcggtggctcattttcagctctctggactctgttgacggctcgactgctaaccgatgtctggcagttgttgacaacatgcccgcccattaagaacaggactggacgcggccttatcggatatactaggtgtgaatggtaccactaccatggctattatcaccagagctatatcttatcttatgccgggtgaggagtgctatcgcgtaccaaacaatttgtaatttaattaaaatacgttacatccgatggcaggtgtagcctacatatgtgcgaaaacttcgtttatatgacggattcaaggactcgcaagaccagtgatgagtacaatttctctgtaaatagccaagaaaaagttatcgacctttcattttaatacattcatcaattttgctacgtaataattttggttcacattcaaacgttttaagccactaactcaataagcaaatatttcgctaaactttcaagaattcgtttaaatatctttccatccccacgcaacacaaaatacaattcacaaactgattgtttgtatactgcaattatttattgtccacttgagaacgcattaattggtacttacaataattagtatatgtatcgagtcgattacatatttaaatcgaaaatgtttgacggatgtataaaagcggttataggtatactagaaaaaggagattatggcactcaataagttcgattcgatcaattttggatggtacgcgagtgtacaaatttgcgcaatgaaagctcactaaaactagacgacgtactaggacccggcctaaaaatcctttataagccttagtcttgaacacttatgttacttgttactggggttggcaatacgtatataagacacttttccattagaacaggtgctcgtcctgtaggacgttctcgacctccgaaaccgttgcccgttgaatcggccgatgcacctgggcagtcacatccaggttctcttctgcctcctgctcctgctcctcgacatgttcggacagtggaccacagagggatccgaaagtgtccagactccgacctgtgtgatccgtgttaagcgatccgtacgacctg

SEQ ID NO: 28439 - DNA, 1299 bp, DROSOPHILA
atgttgtcaacaactgccagacatcggttagcagtcgagccgtcaacagagtccagagagctgaaaatgagccaccgctgtgagatccaattggacaacccacggggggtctatagggccggcgatacggtcaatggtcacgtctatctgaccctttcggagcgggccctaatcaaagcaatatgcctggaggccaatggatatgcgagcactgcctggcagcagccccaaaagcacaagaatcaaaaaaagaacgagcagccagtggtggttcagagtttggactttgattatcgcgtggattattttgccaaaatcgattattttgtgggctcggaggccgcacagccacagataatggaggcgggcacctacaattacggtttccatgtgaagctgcccaagaactgtccggggaatttcgaggggggccacggacacatacggtacacactccaagtgctcatccacagcagtgcagatcgtccgctggaggtgctccatgtacgccagctgcagattttcccgcagaactctctgagccaggagacgcggagctgtgagatccagatctatgagcagactcctcgccttagattctggatgaagccacttcatctgcagctccagattcccaggcagggttattcgccaggagcaggtatttctgttcacttaaagctgcataacccggagaaattgacacttcgcgaggcggtgtattccctcgttcagatcagcacttacgttgcccatctaaagaataagcccaaacgcttggagaccaaggtggagcgacaaactgtcctaagcagccgccacgagctccacaacctcccccgtggagaactgcagaattttcagcatcttcacatgctgcaagtgccacaaacagcggccacattgactgtggcaggatgtgcctgcctgcagctcaactacgaggtggaggtgctggtcacaactcagcaggaaaagcgcttaattgcggcccggatgccggtcatcattggaaatgtgacgccgccctgtcctggcaaactcctaatgcaagaacccattgatggcactgctccggaaccaactcctccagtcgaaacagcatcaacattgattccgaattttagcatttccaccacatctttggcttcgaatttccgggaagccgagttcatggtagccaccaatctgaataagaccaacaaacattacttgtccggcgaacagttggattttagaccacgctatgtctactacgaaatggaccagactcaatcggaggaagtgaagtctcattaa

SEQ ID NO: 28440 - protein, 432 aa, DROSOPHILA
MLSTTARHRLAVEPSTESRELKMSHRCEIQLDNPRGVYRAGDTVNGHVYLTLSERALIKAICLEANGYASTAWQQPQKHKNQKKNEQPVVVQSLDFDYRVDYFAKIDYFVGSEAAQPQIMEAGTYNYGFHVKLPKNCPGNFEGGHGHIRYTLQVLIHSSADRPLEVLHVRQLQIFPQNSLSQETRSCEIQIYEQTPRLRFWMKPLHLQLQIPRQGYSPGAGISVHLKLHNPEKLTLREAVYSLVQISTYVAHLKNKPKRLETKVERQTVLSSRHELHNLPRGELQNFQHLHMLQVPQTAATLTVAGCACLQLNYEVEVLVTTQQEKRLIAARMPVIIGNVTPPCPGKLLMQEPIDGTAPEPTPPVETASTLIPNFSISTTSLASNFREAEFMVATNLNKTNKHYLSGEQLDFRPRYVYYEMDQTQSEEVKSH

SEQ ID NO: 28441 - DNA, 4178 bp, DROSOPHILA
taaatacttgaggagaatttaaatattgtcagtaaaatcaaaatattccttatataattcaaaataaattttgcgatgggcctaaccttcctcctaatcacgttattaaaataataccaaagcaaagccacttcaaagtgttatcaatcaaccgaacacattccgcgtctaagaatgtccgctaaattcagtgtcgtcataaaaatatacaatttctacatacacacacatcgttatcgagcaaatatttataatactgccgctaggaagagctaacttcaagaaattagccgaacttctgggatttgttttcaatgtagtttattaaacgtttactataattaccttgaacctccttggacctgtcacatttaagggtcgcgcatccttttaccagctgaccggcgtagaaagtaccatgtttattattatcgaagctgatctcacacgtaacaaccatttttcccaagattaaatgtccgagcgcgaaaaagctaaaaccgatgttatggggcaactcactgcgactaatttaagtacaaaacttctggactgcttgcggtgcgaccgcgtcgttagataagcgataagaaccataacttggacccgatgtcggattcggatttcaccgggaacgatacggaatcgtagtccaaactgtataagagtcgataataagttcccttgcgaactactcggacgttcacttggggttttcggtctgttatcagagttggttgtcgagaccttggcactggggaagttattgccagcattcatcgaggggttttcaagaggaaagaaaagcgtcgtgtttgaaaatcttagactacatatggtaatatatatataatttcgaataatttcaaaaatcgctccaccctgtaccagtcttggaattgtgataaaatgtttattataaagtgttaggtggaacttttgccttgtgtgcaaatgctttatcgcccttacatttctagtatagtatttattttcgttctcatagccacgttcccttgtctttgtccacatccatggccggattgacaaaggccctctctgccatataattctgcgtataatccgtcggcggcggagctgagggactgggtatgtcgaagaccggatagagtggcttataagcaccgccatccaaactgagagtattgggcggtactggttccgggtcgtctaagtcgtctgacctcgttgcagccgtgctgcgcatgtgaacagcctcctgatagttgggcggagctaaaaacaccaacaaaaaacataaattgatactgtaattagtttatggattctagtaaactcacgaatggatgcgtcgacagaccatggacttgaagagtttggagcagtggctacttcttcaacagccagctcattaacattcagctgggggacgaaaccccgaggctggattggtacgtgttgtgcaagagggacactgccaatggtcagcggaatggtgacaacctcgttgttgtggcaacccttcaccctggcctccacctccacttggtaggcgatctggatgatgccgcacaggttgaagcaggtgggcggagtggccgggactctgatctcatagctaaatagcttcttgcagttcctttgcacagcgtcccccttgaaggtgtttaccaccaacctctcggacgtggtattgggcatcgaaggtggcttactgtggtatgtcaccagcatcacaaaactaatgaggagctgctccaccggaatgtggctatcgtttgtgaccagcacgctaaggggaacattctggccaggtacaaatcctgtctgtggaacggtcagttggagggccaacggatctgatcggcaaggccagcagcagtaggtcttcgaggtttcactgtgggcgggtacctacataacatattcaattagcttaggttctaacagatatgtattcgtgtttgattttgattcgtacccttagcagtggactatcgaagttcaagtccatcacttttagcaccgtaaagcatcgggtatagctctgatcgaatttccagggcctgacgagggttacggttgccatgtaccgcaccctgccgtgtgatccctcgaaggacgaaggacattcggtgggaatcaggcacacgaagttgtaagtgtgaattcccgcttcaatggatacttggcctgcagatatgattagcaattagatggactttcttgcctaaatggagctttacgtactgctcagattggatcccaccaaaaatgttttggacgctatgtaatcctcgcggccgcagaatgtgcgacgtctcctccttctgtttgtggtcaccctttcaatccaacgcgtctctgcgtatccggttatattcaaggtgatggctgcggagaagaagttgataaggtatttcttagaaaggtattttagctcaatgtactgtaacgaattgaatttattctttaattgttttttaagtcatctaaacgatgattatggttttgacaaattaaaatcttttaatcatacagaattactgttatgcattcacatgaaatatccataaaaacttacaaaagcaatcgttgtatatatgaaaaagtcaaatatgtatccacccctatttaatattaattaatgcgaaacccattgattatttaaaaataatttaatcttatcgaacgcaaatattatcattgatgcatttgtgtatgttcgccaaacaccttcatgtagacattagatttcgcacgtgtggttctctactcactataaatatatgagtcaccggactaaatcttcgtttaaaaacattcaaccgcacttttaagttggacgataagataagaatgactcatggcatattgtcaaattccaaaggtatctcaaatcaactgcccctcaccttttaccaacttcatcttgtccagcttcaacgtaactctgccagtgagtacctcgcccccaaagtaggtgccatggggattgttatcgaaatcaatttcacaggtaacagtcataattgtaattgtaaccgcaatcgtgtatttatgggccgatcctactctgatgccgctgcaaacacgactgatttgattttaatgccaatgttcagttatttactccctaaattccgagaactccagacagagtggaaggaaccgcttttcgcgacgatagcacccacatgcccacttggctgccagaaatcaactgagaataaaacaaacattgcggttgttctatattggtagcgatggccagaaaaactttatcttatcgctgtcacaattttgaattatacattttgccaaatgcagtcgagcagcaaatagccctcatatctccggaaaaatcccaaggacttcttgacaagcaggcgtgggatgggatgtccaatggttctcaaatgtagaatagttttttcgcccgccttcatttcttttcctctttatccaaagccgcttccttgctcttttctacagttgaagtagacaaatcgaagacaggatacaacggcttgtaagacttctcttgcgcatttcccgactctgactgtttctcagagtcactatgggaatgcatggcctcggcgtagttcggtggcgctataaaaatcgtatggttacataattgatatggacatattaaaacaaggacagcttacatagtgtggatccttctgaccagggatatgggggagcagctggagcaaaagctccctctccctcaatcaaagtcaaagctctttgttctggagcctctggcccagagctctgcggcgtatattgcaccgctgacggcgatatcggaacaccacaaatagtcaccggcattatcagagttccattgatatgcatgcccttcaccttggccacaacctcgatctggtatccgatcttgataatgcggcacagatggaaacatgaaggcggagtagagggtatcatcagttggaagtcgtacattttccgggagttcctcaaaactccatctgcctttaacttggccacggacttgcgctcgcacttggaacctgaacttagatcactgtagtaggtgatcatcattgatagtccaaccttcacttcgtgcacccgaattttgctttcgttaccaatcagaacatttgcgggtaccgtctgaccaggcacaaagccagtctgcggcaaattcagctccagcg

SEQ ID NO: 28442 - DNA, 1468 bp, DROSOPHILA
tgggtgctatcgtcgcgaaaagcggttccttccactctgtctggagttctcggaatttagggagtaaataactgaacattggcattaaaatcaaatcagtcgtgtttgcagcggcatcagagtaggatcggcccataaatacacgattgcggttacaattacaattatgactgttacctgtgaaattgatttcgataacaatccccatggcacctactttgggggcgaggtactcactggcagagttacgttgaagctggacaagatgaagttggtaaaagccatcaccttgaatataaccggatacgcagagacgcgttggattgaaagggtgaccacaaacagaaggaggagacgtcgcacattctgcggccgcgaggattacatagcgtccaaaacatttttggtgggatccaatctgagcagccaagtatccattgaagcgggaattcacacttacaacttcgtgtgcctgattcccaccgaatgtccttcgtccttcgagggatcacacggcagggtgcggtacatggcaaccgtaaccctcgtcaggccctggaaattcgatcagagctatacccgatgctttacggtgctaaaagtgatggacttgaacttcgatagtccactgctaagggtacccgcccacagtgaaacctcgaagacctactgctgctggccttgccgatcagatccgttggccctccaactgaccgttccacagacaggatttgtacctggccagaatgttccccttagcgtgctggtcacaaacgatagccacattccggtggagcagctcctcattagttttgtgatgctggtgacataccacagtaagccaccttcgatgcccaataccacgtccgagaggttggtggtaaacaccttcaagggggacgctgtgcaaaggaactgcaagaagctatttagctatgagatcagagtcccggccactccgcccacctgcttcaacctgtgcggcatcatccagatcgcctaccaagtggaggtggaggccagggtgaagggttgccacaacaacgaggttgtcaccattccgctgaccattggcagtgtccctcttgcacaacacgtaccaatccagcctcggggtttcgtcccccagctgaatgttaatgagctggctgttgaagaagtagccactgctccaaactcttcaagtccatggtctgtcgacgcatccattcctccgcccaactatcaggaggctgttcacatgcgcagcacggctgcaacgaggtcagacgacttagacgacccggaaccagtaccgcccaatactctcagtttggatggcggtgcttataagccactctatccggtcttcgacatacccagtccctcagctccgccgccgacggattatacgcagaattatatggcagagagggcctttgtcaatccggccatggatgtggacaaagacaagggaacgtggctatga

SEQ ID NO: 28443 - protein, 433 aa, DROSOPHILA
MTVTCEIDFDNNPHGTYFGGEVLTGRVTLKLDKMKLVKAITLNITGYAETRWIERVTTNRRRRRRTFCGREDYIASKTFLVGSNLSSQVSIEAGIHTYNFVCLIPTECPSSFEGSHGRVRYMATVTLVRPWKFDQSYTRCFTVLKVMDLNFDSPLLRVPAHSETSKTYCCWPCRSDPLALQLTVPQTGFVPGQNVPLSVLVTNDSHIPVEQLLISFVMLVTYHSKPPSMPNTTSERLVVNTFKGDAVQRNCKKLFSYEIRVPATPPTCFNLCGIIQIAYQVEVEARVKGCHNNEVVTIPLTIGSVPLAQHVPIQPRGFVPQLNVNELAVEEVATAPNSSSPWSVDASIPPPNYQEAVHMRSTAATRSDDLDDPEPVPPNTLSLDGGAYKPLYPVFDIPSPSAPPPTDYTQNYMAERAFVNPAMDVDKDKGTWL

SEQ ID NO: 28444 - DNA, 3736 bp, DROSOPHILA
tcccctcgaacgatgagggacaattgattggaattggacaagcaaaattgtaggacctagttcccggctccaaagccatttctttgcgaatacataaaatgaaattttgaccaatttcaataacaaattatcactcaatattttaccagggctaatttcggaacccaaaagataaactttactggaaaggtatttctcaaatccattgtacgactctgaagtggacttgttattcgaatcagtcttgctttcggtccaatgggtctctgcataaccttttagcttaagtcgaattgcttaatatgtaaaatgttgcgagaattatatgaagtatcgcaatcacaactgagtacttacctttgatttgaatcgccttatcagtgctcagagtcacttgaccagcaaccatttggcccgcgtaaaaaaccccttgcgtgttgttgtgaaaaagaatttggcaaattattcccatggttttttatggttaaagcacaagttttaatgaatttaagtctgtcgttaattgttaagatgttttcccttcaattgccgcaatcaaactgaactaaaaagtttcttaccacttattttgtgcaacggagagcttttggtaatttatcttatcagtacacccataaatctatttattggtaaacccaaaaaccccctacaatttttttatacaataaatagatcattcgtaaccagctaacatgagaactgaattatcaggtccaaaaacagctgatacttatatttgtggtgtaaaaacaagtgcccccaaatgagttgaggctctcgcatctgaagatagcaatttcactcaaataaatatattaactcatcgataagatatcgcacaactcagcaaatattgctcactgaggtcgacgaaaagttcccgcagtttgcgttcaaccacagggtaattgtcatgtctgttgtatttcgattacttattaattatttacagagtgggtacattcatttttaagcccttctaaagccaagtgcttttttctacaccttcattgacatagccgccatcagtcttgggttcatttgctctcaaagtcatttcgtccacttggtttgacaaatcaaagactgcgtataagggtgaaaacacaattgtttcagctttcctctcttgtgatccttttacacctcttttctgagactttttcttcgatttcgagaacttgtgcggatccggggagatgtgtttagcctcagcataactcggcggtgctaaaataaataagtgattccttgaattatgatctttaaattcgaatatggagttttgtatgaatttccttaaagctcctattttactcaccaattgaaggatccgcagcccaaggattggggcttccgagtgcttctccattctgttcgctgccaattaaaatcaaagccttcgcatctagctgctggggtggcagaacttcaccccaagtccttggttctttttggagttgcttcgttagcgggacacttccaatagttatgggcatgtgaagggactggccgccatgacaacctttaactctggcctccgcttccacctgatagccgatctgaatgatgctgcatagattaaagcaggttggcggagttggcggcaccttaagatcgaaggtaaactgctgccggcatttggtcgacacacctccgcctgttttcaggaccatctcaaaacggtccttgttggtgtccgcggacgggggttgactgtagtaaatcaccaccatagtcagttttacggttatgtcctccacggctacaccactgtcattggagaccatcacctccaccggcacgatctgtcctggcacaaagccactctgtggaacagaaagtcgcatactgagtggcgacgagcggcagggaaaacagcagaaagttcgctgggactccacttgactaggtacctaaaatttataaaatataaaaatataaaattttatacttgaccatggtacaaccaaagacactagaattagacattattctaatgtctttggtacaacacatggtacagtggactattccatagtgtgtggagagactaagaaacataccctcagcattaggctttcggagttcaggtccatcactttgatcacagtgaagcatcgattaaagttcagatcgaacttccacggacgcacgaacctcacgttcaccagataacgtatccgacctagtgtcccctcgaaagaagagggacatgtgatgggcaactgacaggcgaatctatacgagctggtgccaggctcaataagcacctctgaaatggagctttgatttcattatctctagatttatggtgatttatcatcttcgaacatacctatgctggaactagacccgtgcagataagccctagtggccaagtagtccacatgtccgttgaatgattcaccattcgactgatcatccggatcgtgttcggtatccgcccagtgggtttcggcatatcccttgatgttaaggattacagctgaagtaaaaataaaagctattttaagcccctgcaacacttgcacttcaaatcaattaagtcttttagcaagtaacgtttgttttgagtagagcaaaatgaatcagcgccttacctttcactgacttttccttctcagttttaatgaccacctgtcctgaaatcaactggcctgcataaaaaattccttgggaattattgcagaactcaatctcacagattaccattgtgcggaataatttgtatgataatccgggagctgtttaacttttgccctgtctgtgtcgtggctcccaacaaactgaagtcacccgctgcggctatttttattttattttttgtgcagcatttatttggccaacatttttattttatcttatcaatgcgataggtatctcagtatttaaacacaaatttttaccattgctatcggagtatttacatatgtaagtgacagcaatttgagaagtacgaaattggcaggcagaactgatcgatgagggccagttttcccaaggttgagatagcgatgatagggcgttgtaccaataaagaaatagaggataatggagtccctgatttatcgcataagttgttaataaattaatgaaggaatttctctcaactggccgcgttgccaactatccagatagacaaatattgcagtgggttttgtactgagttgagccgataagataatgccagccgacggtaaaactgaaaatgagagtccaggccatgttagcaatacagttggcccagttcgtgtttagcagcgggcgcgttaggatcgctcgcaaatctaaaagctctggagaggcataagcccattacctattcgccaacatgtcgaagaactgcatgataacgttcgaccagaatgagcacggcacctacttcaccggccaggtgataaccggcaaggtgattgtcaatctgaacaagaccaagaaactgcgaggtaagtaagaccaactaggataccccaacagtacggaaactagtgggggctttcgcttatcgagcgcggcgtatcttatcgcttcggataatgtcaggtttggcaaaagcaaaagattcaacaaaccattgaaatgggtaattaagtgataactatgcggacactccaaatgtgcgataattgatgattcctggagccgaaggggagcgataacaaccttacttatagttggggatctacccaacgaattatattttctttcgagg

SEQ ID NO: 28445 - DNA, 1059 bp, DROSOPHILA
atggtaatctgtgagattgagttctgcaataattcccaaggaattttttatgcaggccagttgatttcaggacaggtggtcattaaaactgagaaggaaaagtcagtgaaagctgtaatccttaacatcaagggatatgccgaaacccactgggcggataccgaacacgatccggatgatcagtcgaatggtgaatcattcaacggacatgtggactacttggccactagggcttatctgcacgggtctagttccagcataggggacactaggtcggatacgttatctggtgaacgtgagagtggctttgtgccaggacagatcgtgccggtggaggtgatggtctccaatgacagtggtgtagccgtggaggacataaccgtaaaactgactatggtggtgatttactacagtcaacccccgtccgcggacaccaacaaggaccgttttgagatggtcctgaaaacaggcggaggtgtgtcgaccaaatgccggcagcagtttaccttcgatcttaaggtgccgccaactccgccaacctgctttaatctatgcagcatcattcagatcggctatcaggtggaagcggaggccagagttaaaggttgtcatggcggccagtcccttcacatgcccataactattggaagtgtcccgctaacgaagcaactccaaaaagaaccaaggacttggggtgaagttctgccaccccagcagctagatgcgaaggctttgattttaattggcagcgaacagaatggagaagcactcggaagccccaatccttgggctgcggatccttcaattgcaccgccgagttatgctgaggctaaacacatctccccggatccgcacaagttctcgaaatcgaagaaaaagtctcagaaaagaggtgtaaaaggatcacaagagaggaaagctgaaacaattgtgttttcacccttatacgcagtctttgatttgtcaaaccaagtggacgaaatgactttgagagcaaatgaacccaagactgatggcggctatgtcaatgaaggtgtagaaaaaagcacttggctttag

SEQ ID NO: 28446 - protein, 352 aa, DROSOPHILA
MVICEIEFCNNSQGIFYAGQLISGQVVIKTEKEKSVKAVILNIKGYAETHWADTEHDPDDQSNGESFNGHVDYLATRAYLHGSSSSIGDTRSDTLSGERESGFVPGQIVPVEVMVSNDSGVAVEDITVKLTMVVIYYSQPPSADTNKDRFEMVLKTGGGVSTKCRQQFTFDLKVPPTPPTCFNLCSIIQIGYQVEAEARVKGCHGGQSLHMPITIGSVPLTKQLQKEPRTWGEVLPPQQLDAKALILIGSEQNGEALGSPNPWAADPSIAPPSYAEAKHISPDPHKFSKSKKKSQKRGVKGSQERKAETIVFSPLYAVFDLSNQVDEMTLRANEPKTDGGYVNEGVEKSTWL

SEQ ID NO: 28447 - DNA, 3200 bp, DROSOPHILA
cattgattatttaaaaataatttaatcttatcgaacgcaaatattatcattgatgcatttgtgtatgttcgccaaacaccttcatgtagacattagatttcgcacgtgtggttctctactcactataaatatatgagtcaccggactaaatcttcgtttaaaaacattcaaccgcacttttaagttggacgataagataagaatgactcatggcatattgtcaaattccaaaggtatctcaaatcaactgcccctcaccttttaccaacttcatcttgtccagcttcaacgtaactctgccagtgagtacctcgcccccaaagtaggtgccatggggattgttatcgaaatcaatttcacaggtaacagtcataattgtaattgtaaccgcaatcgtgtatttatgggccgatcctactctgatgccgctgcaaacacgactgatttgattttaatgccaatgttcagttatttactccctaaattccgagaactccagacagagtggaaggaaccgcttttcgcgacgatagcacccacatgcccacttggctgccagaaatcaactgagaataaaacaaacattgcggttgttctatattggtagcgatggccagaaaaactttatcttatcgctgtcacaattttgaattatacattttgccaaatgcagtcgagcagcaaatagccctcatatctccggaaaaatcccaaggacttcttgacaagcaggcgtgggatgggatgtccaatggttctcaaatgtagaatagttttttcgcccgccttcatttcttttcctctttatccaaagccgcttccttgctcttttctacagttgaagtagacaaatcgaagacaggatacaacggcttgtaagacttctcttgcgcatttcccgactctgactgtttctcagagtcactatgggaatgcatggcctcggcgtagttcggtggcgctataaaaatcgtatggttacataattgatatggacatattaaaacaaggacagcttacatagtgtggatccttctgaccagggatatgggggagcagctggagcaaaagctccctctccctcaatcaaagtcaaagctctttgttctggagcctctggcccagagctctgcggcgtatattgcaccgctgacggcgatatcggaacaccacaaatagtcaccggcattatcagagttccattgatatgcatgcccttcaccttggccacaacctcgatctggtatccgatcttgataatgcggcacagatggaaacatgaaggcggagtagagggtatcatcagttggaagtcgtacattttccgggagttcctcaaaactccatctgcctttaacttggccacggacttgcgctcgcacttggaacctgaacttagatcactgtagtaggtgatcatcattgatagtccaaccttcacttcgtgcacccgaattttgctttcgttaccaatcagaacatttgcgggtaccgtctgaccaggcacaaagccagtctgcggcaaattcagctccagcgttagaggatccgatcggaagggccagaccccaaaggttttctcagtcttggcctgcacgggaaccttaaaagcgattacattgttatagcagacctccaaaatttcgtttcatgttatatttacctgtgaaacagagttataggtgtttatgtccatcacttgaataacggtgaaagctcttgagaaaatgctgtcgtacttccacggctgaatgatattgacatccaccatataacgtatacgaccatgagtcccctcgaacgatgagggacaattgattggaattggacaagcaaaattgtaggacctagttcccggctccaaagccatttctttgcgaatacataaaatgaaattttgaccaatttcaataacaaattatcactcaatattttaccagggctaatttcggaacccaaaagataaactttactggaaaggtatttctcaaatccattgtacgactctgaagtggacttgttattcgaatcagtcttgctttcggtccaatgggtctctgcataaccttttagcttaagtcgaattgcttaatatgtaaaatgttgcgagaattatatgaagtatcgcaatcacaactgagtacttacctttgatttgaatcgccttatcagtgctcagagtcacttgaccagcaaccatttggcccgcgtaaaaaaccccttgcgtgttgttgtgaaaaagaatttggcaaattattcccatggttttttatggttaaagcacaagttttaatgaatttaagtctgtcgttaattgttaagatgttttcccttcaattgccgcaatcaaactgaactaaaaagtttcttaccacttattttgtgcaacggagagcttttggtaatttatcttatcagtacacccataaatctatttattggtaaacccaaaaaccccctacaatttttttatacaataaatagatcattcgtaaccagctaacatgagaactgaattatcaggtccaaaaacagctgatacttatatttgtggtgtaaaaacaagtgcccccaaatgagttgaggctctcgcatctgaagatagcaatttcactcaaataaatatattaactcatcgataagatatcgcacaactcagcaaatattgctcactgaggtcgacgaaaagttcccgcagtttgcgttcaaccacagggtaattgtcatgtctgttgtatttcgattacttattaattatttacagagtgggtacattcatttttaagcccttctaaagccaagtgcttttttctacaccttcattgacatagccgccatcagtcttgggttcatttgctctcaaagtcatttcgtccacttggtttgacaaatcaaagactgcgtataagggtgaaaacacaattgtttcagctttcctctcttgtgatccttttacacctcttttctgagactttttcttcgatttcgagaacttgtgcggatccggggagatgtgtttagcctcagcataactcggcggtgctaaaataaataagtgattccttgaattatgatctttaaattcgaatatggagttttgtatgaatttccttaaagctcctattttactcaccaattgaaggatccgcagcccaaggattggggcttccgagtgcttctccattctgttcgctgccaat

SEQ ID NO: 28448 - DNA, 984 bp, DROSOPHILA
atggttgctggtcaagtgactctgagcactgataaggcgattcaaatcaaagagacccattggaccgaaagcaagactgattcgaataacaagtccacttcagagtcgtacaatggatttgagaaatacctttccagtaaagtttatcttttgggttccgaaattagccctgaaatggctttggagccgggaactaggtcctacaattttgcttgtccaattccaatcaattgtccctcatcgttcgaggggactcatggtcgtatacgttatatggtggatgtcaatatcattcagccgtggaagtacgacagcattttctcaagagctttcaccgttattcaagtgatggacataaacacctataactctgtttcacaggttcccgtgcaggccaagactgagaaaacctttggggtctggcccttccgatcggatcctctaacgctggagctgaatttgccgcagactggctttgtgcctggtcagacggtacccgcaaatgttctgattggtaacgaaagcaaaattcgggtgcacgaagtgaaggttggactatcaatgatgatcacctactacagtgatctaagttcaggttccaagtgcgagcgcaagtccgtggccaagttaaaggcagatggagttttgaggaactcccggaaaatgtacgacttccaactgatgataccctctactccgccttcatgtttccatctgtgccgcattatcaagatcggataccagatcgaggttgtggccaaggtgaagggcatgcatatcaatggaactctgataatgccggtgactatttgtggtgttccgatatcgccgtcagcggtgcaatatacgccgcagagctctgggccagaggctccagaacaaagagctttgactttgattgagggagagggagcttttgctccagctgctcccccatatccctggtcagaaggatccacactatgtaagctgtccttgttttaa

SEQ ID NO: 28449 - protein, 327 aa, DROSOPHILA
MVAGQVTLSTDKAIQIKETHWTESKTDSNNKSTSESYNGFEKYLSSKVYLLGSEISPEMALEPGTRSYNFACPIPINCPSSFEGTHGRIRYMVDVNIIQPWKYDSIFSRAFTVIQVMDINTYNSVSQVPVQAKTEKTFGVWPFRSDPLTLELNLPQTGFVPGQTVPANVLIGNESKIRVHEVKVGLSMMITYYSDLSSGSKCERKSVAKLKADGVLRNSRKMYDFQLMIPSTPPSCFHLCRIIKIGYQIEVVAKVKGMHINGTLIMPVTICGVPISPSAVQYTPQSSGPEAPEQRALTLIEGEGAFAPAAPPYPWSEGSTLCKLSLF

SEQ ID NO: 28450 - DNA, 4673 bp, DROSOPHILA
aagttaacagcttacatacatagtacaggatactaccaattatttcttacatcgaaatgtaagttatttgtaagttacaaaatacttcttacatagcagtaaggttacatttttcggcattttctgtataataacagcttacatacacactacaggatattatagaatgtaactttaacgttatctaccaattatttcttacctcgaaatgtaagttatttgtaagttacaaaatacttcttacatagcagtaaggttacctttttcattcattttctgtataataacagcttacatacacagtacaggatattatagaatgtaactttcacgttacctagcaattatttcttacctcgaaatgtaagttatttgtaagttacaaaatacttcttacatagcagtaaggatacattgttcggttttctttgtatattaacagcatacacagtacaggatattatagaatgtaactttcacgttatctaccaattatttcttacctcgtaatgtaagttatttgcagtaagaatacatttttcggtttcctctgtatattacatcaaaatatattacatactgaaaagtgtacttaaatgaattatttctaattcttattcctacctatttattattgtctgtaaagttagctcttgcaatatttactataacagcacaatttagaaagtaaggataatgtataaccagaagctaaatttatagttgcactgaagaatgtattgttaaaaattatattatttaatactgtactttacagtaatatttatactgtaacatacaagtttttagaatatttcgcgctgtaatgtaagatgtaaagtgagaggagggtcaaaggtatcttaagagtacaaataaattgagtactgtatggacatttaaataagtttattttttttggtttttggtctacaatgaatccaatcaagtattgccaattgaaacatcttagtgataagtttttcaaaattaaaatgctctatttgacaaaactttggttgacgaatcccgcattccgggcgtttgccgtgagcacgggcgtaggactaggtatactatacacgggataaagtggagcaaactcattgctcccgaaggcatgtagttcctcttcgttgatattgccccgctgagtgtgacgggactcctcataattggggagcgctgtaaagtagaagaataacgtggtttagtaaacataactattataaataaaatataaagtaagttatactacccatgcaagcttttcttatcgtttaaatttaaaaatatttgttaatctggaaataagtttcgcaccttttcttctactcaaagtgactatataagccgtaatacattatttattattttcttttgaacttttgttagccattttattattacctagtaatggcacttgaagcttgcgtttggcatatgttttgaaagtataggcgatgtctacaaaaacttcgtgctcagttcgttaaagaatttgataagattgcagtcaatcattacaagttcattggcacgtagactgcaaaatcatgatctcacctgaatcagcagcactggatgccaggtcgctgggcaagctctcaagtgcggtaaccatgggtagctcgtcgggaggattccttctggaatccggtccttcgtagtgggcgctccgccggggaggttgttgaaccacaatgcccgaaaccgccagaggaatggtgccaacggtaaccggcatgaccatcagctgttgttcgcgtagactcttaaccaacgcctcaacctccagttggtaggcgatctggatgaggttgctcaactccacgcaggtgggcggcgttgagggtacgggcaaatcgatggtctgggatcgggtgcactgcttcagcaccgattcccccttagctcgcgatattattaatcgctccactcgagagtgttcaggactgacgctgtagtatctcaccagcattaccagagagagtcggatttcggagacggctacggcagtgttgttgactaccacaatggtcacgggaatcttctggccaggaacgtagcctgcttgtggaaggtgcagctccagttttaaaggatccgtcttgcatggaccacagcaaaaggtgcggtaaccctcgctgtgggcagcggactgtaatggatgaatcgatacgatataattaacctaaatataatttttgtatcactataacaccgaatcatttgaattatcattatcttagtatgattactttgaatccacaagtaaaatataactatagttcattaaaagtacctaaaatgtctgtacgtcttcaacttaaaaaaagtcattttaagtgtattatgaagtattttatatttcacaaaatacatcattgctagttgcatactaacctttagctggggagtgtcaaagttgagatccagcatcttgagaaccgtgaagccctttgtgtaggcctgatcgaacttccacggtctgatcagcaggactttcactatatagcggatgcatccatggcgaccctcaaaggacgaggggcattgatagggcagctggcaggtgaagttgtagctgtgaaccccagcctcaatagtgagtctgtgagtgttgttgtgagtgttgtcttttttgggagataaaattgtttataaaagcaaacatctttgaggtttctactcactttgctcggaacccacgagataagtatttgatgatagataatcctcccggcccacgtagagttttgtcgagcccagactcttttcgctccacttggttatagaatatccgactaccttgagcagcacagctgcgatttaagagaaaataaagaaaagagttaggatatagtgttatcatggtgtctatataatctgttaataaagttgggagtgcacaatatagttaagccaattctaatctcaactgaactgttataaatacttgaggagaatttaaatattgtcagtaaaatcaaaatattccttatataattcaaaataaattttgcgatgggcctaaccttcctcctaatcacgttattaaaataataccaaagcaaagccacttcaaagtgttatcaatcaaccgaacacattccgcgtctaagaatgtccgctaaattcagtgtcgtcataaaaatatacaatttctacatacacacacatcgttatcgagcaaatatttataatactgccgctaggaagagctaacttcaagaaattagccgaacttctgggatttgttttcaatgtagtttattaaacgtttactataattaccttgaacctccttggacctgtcacatttaagggtcgcgcatccttttaccagctgaccggcgtagaaagtaccatgtttattattatcgaagctgatctcacacgtaacaaccatttttcccaagattaaatgtccgagcgcgaaaaagctaaaaccgatgttatggggcaactcactgcgactaatttaagtacaaaacttctggactgcttgcggtgcgaccgcgtcgttagataagcgataagaaccataacttggacccgatgtcggattcggatttcaccgggaacgatacggaatcgtagtccaaactgtataagagtcgataataagttcccttgcgaactactcggacgttcacttggggttttcggtctgttatcagagttggttgtcgagaccttggcactggggaagttattgccagcattcatcgaggggttttcaagaggaaagaaaagcgtcgtgtttgaaaatcttagactacatatggtaatatatatataatttcgaataatttcaaaaatcgctccaccctgtaccagtcttggaattgtgataaaatgtttattataaagtgttaggtggaacttttgccttgtgtgcaaatgctttatcgcccttacatttctagtatagtatttattttcgttctcatagccacgttcccttgtctttgtccacatccatggccggattgacaaaggccctctctgccatataattctgcgtataatccgtcggcggcggagctgagggactgggtatgtcgaagaccggatagagtggcttataagcaccgccatccaaactgagagtattgggcggtactggttccgggtcgtctaagtcgtctgacctcgttgcagccgtgctgcgcatgtgaacagcctcctgatagttgggcggagctaaaaacaccaacaaaaaacataaattgatactgtaattagtttatggattctagtaaactcacgaatggatgcgtcgacagaccatggacttgaagagtttggagcagtggctacttcttcaacagccagctcattaacattcagctgggggacgaaaccccgaggctggattggtacgtgttgtgcaagagggacactgccaatggtcagcggaatggtgacaacctcgttgttgtggcaacccttcaccctggcctccacctccacttggtaggcgatctggatgatgccgcacaggttgaagcaggtgggcggagtggccgggactctgatctcatagctaaatagcttcttgcagttcctttgcacagcgtcccccttgaaggtgtttaccaccaacctctcggacgtggtattgggcatcgaaggtggcttactgtggtatgtcaccagcatcacaa

SEQ ID NO: 28451 - DNA, 1393 bp, DROSOPHILA
accgaaaaccccaagtgaacgtccgagtagttcgcaagggaacttattatcgactcttatacagtttggactacgattccgtatcgttcccggtgaaatccgaatccgacatcgggtccaagttatggttcttatcgcttatctaacgacgcggtcgcaccgcaagcagtccagaagttttgtacttaaattagtcgcactggtaaaaggatgcgcgacccttaaatgtgacaggtccaaggaggttcaagctgtgctgctcaaggtagtcggatattctataaccaagtggagcgaaaagagtctgggctcgacaaaactctacgtgggccgggaggattatctatcatcaaatacttatctcgtgggttccgagcaaaacaacactcacaacaacactcacagactcactattgaggctggggttcacagctacaacttcacctgccagctgccctatcaatgcccctcgtcctttgagggtcgccatggatgcatccgctatatagtgaaagtcctgctgatcagaccgtggaagttcgatcaggcctacacaaagggcttcacggttctcaagatgctggatctcaactttgacactccccagctaaagtccgctgcccacagcgagggttaccgcaccttttgctgtggtccatgcaagacggatcctttaaaactggagctgcaccttccacaagcaggctacgttcctggccagaagattcccgtgaccattgtggtagtcaacaacactgccgtagccgtctccgaaatccgactctctctggtaatgctggtgagatactacagcgtcagtcctgaacactctcgagtggagcgattaataatatcgcgagctaagggggaatcggtgctgaagcagtgcacccgatcccagaccatcgatttgcccgtaccctcaacgccgcccacctgcgtggagttgagcaacctcatccagatcgcctaccaactggaggttgaggcgttggttaagagtctacgcgaacaacagctgatggtcatgccggttaccgttggcaccattcctctggcggtttcgggcattgtggttcaacaacctccccggcggagcgcccactacgaaggaccggattccagaaggaatcctcccgacgagctacccatggttaccgcacttgagagcttgcccagcgacctggcatccagtgctgctgattcagcgctccccaattatgaggagtcccgtcacactcagcggggcaatatcaacgaagaggaactacatgccttcgggagcaatgagtttgctccactttatcccgtgtatagtatacctagtcctacgcccgtgctcacggcaaacgcccggaatgcgggattcgtcaaccaaagttttgtcaaatag

SEQ ID NO: 28452 - protein, 422 aa, DROSOPHILA
MVLIAYLTTRSHRKQSRSFVLKLVALVKGCATLKCDRSKEVQAVLLKVVGYSITKWSEKSLGSTKLYVGREDYLSSNTYLVGSEQNNTHNNTHRLTIEAGVHSYNFTCQLPYQCPSSFEGRHGCIRYIVKVLLIRPWKFDQAYTKGFTVLKMLDLNFDTPQLKSAAHSEGYRTFCCGPCKTDPLKLELHLPQAGYVPGQKIPVTIVVVNNTAVAVSEIRLSLVMLVRYYSVSPEHSRVERLIISRAKGESVLKQCTRSQTIDLPVPSTPPTCVELSNLIQIAYQLEVEALVKSLREQQLMVMPVTVGTIPLAVSGIVVQQPPRRSAHYEGPDSRRNPPDELPMVTALESLPSDLASSAADSALPNYEESRHTQRGNINEEELHAFGSNEFAPLYPVYSIPSPTPVLTANARNAGFVNQSFVK

SEQ ID NO: 28453 - DNA, 4334 bp, DROSOPHILA
ggaaatgtaatttcaagttcattgggatggtagcagaactgcaagaacttacacagattgtacttcttgtggaccagcgagtgccatataattcgcaaattggttaccatcaggcgaccagtgtcccccggatttcctttgctgtcttcgatgtggtaaatgtagtcgagcactcgttctccgctccgcaggttcttgtgcctgaaacgaatctctccaattgagggtccaaaaaccaattaaattagcgtctacttacagttgaggcacatcaaatttgacctccttgtcctcccagagcaactgcagcacgggctgttggtttccttcgatcggagctagcgactttaacatttttccgagacaactaacgtctttgttggggtgcaaatccactggttaaacggttgctaggcaacctttagtccaggaaccaattccaaaaccaagaaaacataaattcccaggccgaatgcgaaatgcttaaaccaaaactcaaacagccaattaaaaatcgatgtacagatgtttagattattgagaaagtaaaattccaaagaacaacttgaacttaatatgaaatcaaatcatgaaattaggaaatacacaacattttaaatcccaccatcggaagaggcccaataataaaagcccaatcttttaattttttaaatacgtatgtaatatatttgactaacgtatagaattttaggagtataactaatgcttcgcttatcaaagtacaaaaacgttcaactaacgcgattaagcttaaactataagtcagtttttcccccttcgccagggaaggagaaagagctggcgtttataaatagttagcaacgctaactgctggaaatgttattcttttttttcatagtgtcaatattgcaaatcgtaggtgagagcagttcagcaaaaggcacctttatagaataccgaaacggcggaactgaacaaaaatagattgtatttacaatttatgatttgggccaccgcctcacataatgatctgcggttctgggacactggccgcaatgcttttatggggcaagacctggcctccattaatgtagagctcatccttcacgattacatcctcgcctagcacggtgatgccttcgatgcgaacccaacggccaactgtagaacgccaaccgacaatgcaggagtccagccatgagtgtgagcgaacgatggcgcctttgaggatggtcgagcgcttaatgcacacgccatcctcgatgaccacgtccggtccaatggttacattaggccctatgcgacaaccctcgccgattttggccgtgggatccaccaacacgttgcccaccactccagggcctgtgtacagcttgggggattgcttctggcgcagcgagcttagatacagacacatgcctgaaaaggaataaaatggtgcaataagtaaagcgataaagtcgatgtgttcaagcccattcaatagccttcacttttaacgttcaatggtgaccaaaaaacatttaagaaactgactattgccagtgtacttcgcatatttgatgagcgttacttagatcctatgcagttaagtaagtaagtaagtaagtaagacagcaatgtatcgtcccagtacatgtattcataagtcgtgaatcgcatccacatgaacccaacaaacaatttactcttctacttggtttctcccatcgcccactatcggcctaatgagcctcacttcatttaaaaagaaatcgttctatcaaacattagctatagttccaggaatgtcaataatagataaagccgaaagccgggtgggtaaaaaggcacagcacaattaacaacgacatccacatttgctttcaaagcgataagaccaattaggcaatcaagattgagcgagcaaacgagtgattctgtctgtcgtaccggttaggaagtcttttggctgtccgatgtccatccagaatccagttaaatccattgcatacaactcctgttgctgcgtcatttcagggaacacctccttctctattgatgtgggcttaacttcgatccggtcaagcacggagggattaaagatgtaaatgccggcattgatcttattgctaacgaactcttgtggcttttcaataaagttttttatacagccgttctcatcgtacagcacaactccgtatttggatggttcttcgacctttgtgacaacaattgtgccttcttttccgtgattacaatggaattgcactagttgtttaaatggaaaatcgcatataacgtccgaattgagcacgaaaaatggctctgagctggctgctaaaatcgtttttgctagggccagaggtccagctgttcccaggggttccgtctcgtgtgagaagatcaattccacgcccagtttcttggcttcgactttaagctccttttccatttgctcggctcgatagctgacggctaaaataacctgcgagaaagaagtatgcattattttagaaatataaaacaaaagaataatctcttttagaggaagttgatttgattcttagcgtgttatgtaaccgtcttccctaaatttggcaacggcaaccaatatggaacaagatcaactgttttctaaacatccaaaggtgtttaaaaaaccttgttttaagaatgatgtgccatatttccattctcctaagcaatggggcagtttgggcgtcattagtctaaaaaactggatatacctgacgacatcccgcatcgacgagtgcctccagttggtggagaagaatcggcttattggcaaactccaccagtggcttgggcgtgctgagggtcaggggtcgcagccgggtcccataaccaccgaccagaatcaacgccctcgtcccgtttcccacagctggatttccacacatcacttctccgcttccgcttccgcctcctttccgttctccggtttctatagtccgtaagcgagcgacacgtcacaccttaaagttctcgagactttctccgtacaacgagattccgtttcagcggtcaaacaactgcaatcgacgaaggcaagtgagtgactcagttggttgtctttagtttattgtttactcaccttgttgcgctatctatttccttgttgttgtttttggaattgtcttttttcgtgataagaacctttgtgcttctggttggatgcacttgcctgtcccaaaacaataatagtttctattagttttagatggacgttttcaaggcttaggaatatcgatcttgtcattgaacattcaatatggtctttgtgtattttattatcatttgttttatgagtaaactcgccgcacaggaaagtaaataaaaaccgagctggcaaagttgggataacactatcggaagatggcgatgattgcgcttcgtcccactcgcagcagcgctgatagccggattccaccgaacattttacgctaaattaataaaatttattaaaattcatttcttgttaaattgaagaatcttaaaaaatacttttcagtttaatttaaattaaataacctatctaaagaccacaatcaggcatgttccggtaatagtaatattttttcgattacgatttggcaaaatctttcgacttcgtttttaggtgctcgggttttcgcggaatttttgcgatcggaatgttttgtaaacaggaaacagatgtctaagctgtattccagacaatggagcgaccaattttttcacagttttagttccgatgttcgcactgcactttgtccatttaagtaattaaattaaatagtattatttacgaacagtactttcgaccctcctttaaattaattacgaattttttttcattacatcttatatgcatttatactgtttatactgtattgtttcaccaatagtatagcagtcttcctgatagcttttgtcgacataattatgaacacttgccaaatcgaaactttttgttgccaactgcaaaattttgtttgtcaaatttcaggtggggtcagaaattacttttgtttaatataactaagtctaaaaatgatcttatggtgatgtggaacataaacatcaattaataaatatcaatagaccagcaaactattttttccccttagttaataagatctgatttgatataaaaaaggcatttactttttaaaaggccgttttacaaattaaaattttcttacgaattcgattaccggagcattcccgaataatattgtagagagcaaaacgggttgatggtttctaaggtttcaacggcattactgttttgactattccctacatttcaaaatatatcaaaaagaaaatcctaaaatgtacagtagaaattcagctttttatagctt

SEQ ID NO: 28454 - DNA, 1358 bp, DROSOPHILA
ccagctcggtttttatttactttcctgcaagtgcatccaaccagaagcacaaaggttcttatcacgaaaaaagacaattccaaaaacaacaacaaggaaatagatagcgcaacaagttgtttgaccgctgaaacggaatctcgttgtacggagaaagtctcgagaactttaaggtgtgacgtgtcgctcgcttacggactatagaaaccggagaacggaaaggaggcggaagcggaagcggagaagtgatgtgtggaaatccagctgtgggaaacgggacgagggcgttgattctggtcggtggttatgggacccggctgcgacccctgaccctcagcacgcccaagccactggtggagtttgccaataagccgattcttctccaccaactggaggcactcgtcgatgcgggatgtcgtcaggttattttagccgtcagctatcgagccgagcaaatggaaaaggagcttaaagtcgaagccaagaaactgggcgtggaattgatcttctcacacgagacggaacccctgggaacagctggacctctggccctagcaaaaacgattttagcagccagctcagagccatttttcgtgctcaattcggacgttatatgcgattttccatttaaacaactagtgcaattccattgtaatcacggaaaagaaggcacaattgttgtcacaaaggtcgaagaaccatccaaatacggagttgtgctgtacgatgagaacggctgtataaaaaactttattgaaaagccacaagagttcgttagcaataagatcaatgccggcatttacatctttaatccctccgtgcttgaccggatcgaagttaagcccacatcaatagagaaggaggtgttccctgaaatgacgcagcaacaggagttgtatgcaatggatttaactggattctggatggacatcggacagccaaaagacttcctaaccggcatgtgtctgtatctaagctcgctgcgccagaagcaatcccccaagctgtacacaggccctggagtggtgggcaacgtgttggtggatcccacggccaaaatcggcgagggttgtcgcatagggcctaatgtaaccattggaccggacgtggtcatcgaggatggcgtgtgcattaagcgctcgaccatcctcaaaggcgccatcgttcgctcacactcatggctggactcctgcattgtcggttggcgttctacagttggccgttgggttcgcatcgaaggcatcaccgtgctaggcgaggatgtaatcgtgaaggatgagctctacattaatggaggccaggtcttgccccataaaagcattgcggccagtgtcccagaaccgcagatcattatgtga

SEQ ID NO: 28455 - protein, 369 aa, DROSOPHILA; identical to SEQ ID NO: 399

SEQ ID NO: 28456 - DNA, 12438 bp, DROSOPHILA
ccaattcgaccctcgctcttacaaaacatatttatgccaaatgatgtgcttaagtgctacaacagcatgatccgaaaccttccggacgaggaaggtgatatgaagagcccacttttgccacccaactggtcaactatgatggggtttcgagccttatgcattctttccggagattgtcgcaaggatacggaaacacgtagcttcgaatacaatgaatctttaccacccatccagcttttccgcaagcggttgcaagctcttttctatcgtaccactcttctcagccgcttggaatcacaactctttacggacttaccatcagcattagtttctttaccacgccccaaacacgattatgcaaaaatgggtacacatgttgaattaatcgatccagagccggcaccacagaatgatctaaaatccgagccgcttagcgagaatgaagtgattaatacagtcaagcaggaattggaaatggaatatacagttccataggaactaataagtaaatatgtaatattgattaatttaagctttaaaagtttatattttttacttcatatcgcgttatataatagttcattacaatggctaacaaataatttataaacttgtaggtacttttaacgtatttcacatacagcaaaatcaaatgccggaccgatgtgcattagggtggctcatttttctgattgtagtttaaaaatattgcttaggtttgaaaaaaggtatatttatagcaaaacgccctgcaaaacgaaacaatttaatacacaagcagtcaaaaaaactaatgtatattttagttgccgttttacaatcctttcaaaacttttatcccggatatttagttattagagcaaaattgtctaaaccttattttcaatataaaaagaaccgatccatcctattgttcatgcggtaacaatgtattacaaagcatttttatgatagcactagcagcttgagaactattttgttcgattcccgggggaggcgctcattggaagttactgaaatccgtcttcagcttgatcgtaggcttctgcggcttggccagcaggttcctctgcgcctcgcttgctttttgggcaatgttaatcgactgctgttggctgcgaatggccgcttctagtttttgtcgcagttccggtgtttgacccatcagggccttaaactcctgcggatatttcggaccgatcttcagtagccactgcagcgcctggtcgtgcagctgccgttgatactttggcagcgtccggagtcgactgggttccgctaggaagccaatgagcacagggaccaacagagtcagcatctgaatatctgtgaagtgtggacaaggaacaattaatattataatcctaagtttaagggcttgctaaacggaacatcaattcacagagatggacaagtcgcttcatcccgtacttttacttcatacgtgcaacatttaaagcgtaattttaattgacaacaagaactaggaactatgctatggattggtgcattgaaaaacattgagtgtgcaataaacgttgcaattcatgactataaggcagttaagataacataaataaaaaaacgaatagaatgttcatatttaatggtaggaaaataatttcatttccatttagcagaccgatgaaaaaggagtaaatttacaacgcgtgtgtaagtgtgaacagttatgccttatatttctgaaacgcttttttgacatgaaacgtgtgagtttatgatcgagctcttctatttaccttgtagcaagttcatgtttcctaacgtttttttttaaatattattttttttaatgttttgtaaatgatttgtgatttgataaaaagagaagacagagaaaagagcaaatatataataacttatttcgttttcccttcccatcgtgtgaagtttaaaatgaatgtacttaaaccaatactttggctgcgttcgaagatatatttgaagaaaacagatcgatacgacagaacagcctaattatgttggaaaggggagtgtgttaactattaaggcgggtaagggggaactgctagaactatattctaaaatggggtactcctgcaccaaatgaaagttatgtcgaattttatcctttctagtcacaatttaacattattcgaagaagtccttataatcaatcaatgatcaatttttattagttagcaatcatttaattatgatatagtcgagttcctggactatttaatatccgttagacacgtatggacacggccaagtagatttgccttctgatactgaaaaaaaatgtatacactttatagggtcgaaaacgctttcttccacctctttcatacttttcactattttccatgaattataattccaaatatatccctcctaaatccaaaggtataattatttaatctagttatataacataaacaaaaacacgttcttaaggttaagtattctttctcaaacaggagtaccccgagatttaaagaaggaccaagcttaatgattttcaaatacaaccagttacttacggttctgcggctccgacaagtctataagctgctccacggtaacgatgctctccagggtgacctgtagctccagttcgcttgtgggcaccttgctggactccgcatacaacgattcgattatcctaggcgcaagtgcgtggatgtagggtgttgccgtcttcaattcggcccgagcgaagatcgatcgcgtggtctcgatgcagcgcagcttcaccgagaggttctccgactgcaggcactgccggaagtgattaatgcatggatattgcaatgaaggtgtagccacaacggaggcgggagtatgtagaataaaaacagtgatggccagcagcatagtgacctcgtcgactttcctttcctcgttatcgccagccgttttggtgagatccacaatggtggccagtgcactttgcagtaactgttgccattcctcggttgtctcctctactttagcccacttgtggacacaaacggatcgcaagcactgcagggcagacttcacagcacacgtatttgccaagatagtactatctatggccgacttgttggcgatttctttaacgatactggttgtcatatacaggacggtgggcaggattgcaagggcacctttgggagtacacaaatccatcaactgttcgacgcactgcagtccgctggatactagcaggccgttttcatcgccgagcaccgagaagaatgacgagccagtggccattttggcataggcaaagtccagctgtaagccggagccaccagctccctgcctcgtgggattcatcgtaggtatttggcgaacaaataggcaaagacaaacctccagaacggcgtagacatgcgagcttcctggctgcatagaatcatcttctccatgtcgctctccaccctttccgtcctcagaattggcattatcgtcccgttttctttctaagtcttccctagcagcgcggattgtttgctttaaaatttctacgcacagaagttgtacgagtaattcatctctcgtcagtatctgacgatgtagaacatgacagagttcaatggttaaagcccgatccttgaccaactgcctcctagcccaatcagaatcaaagatgctgtgcagtgagcgaaggcagctcacaatgtttctcggcctttcagagcttctcatgctgcagagcgcctccatgcagatgccgaagatcatatggaagcgatccgctgacaaagatccatgagtgatctgattattgttggactcagctgcggcttcacttgtgtctagatgacgggcgaacccttcatcccttaaccatagtgcggaggcatagaggattgggggccaactggtcatgtaatgtggttttgacgaattaatggtgtccgtggtgtaaaaggctcctccgtcgtgcggtagttgggattggaactccgcaggtagaagcagcaaggcgtgatccttcatagcactcagccagtgtgttgaaagattgtggagctcaggttgcactaatcctaaaagactttcacccctactgtcaggaacatccgagtccgtttccagattggttaaggattgaaagccggattgttgggattggagattcagtagggaagccggagcctttccatttcctatcatggccacaatataaacctctgcccacgcctttaaaatgcttagcttctccaaagtagccatggattcgttatataactgagtgctgttggtttttgaggaaagcttatcaagggaactgactaacagctggtgaactctttttagatctcctatgtcgcgagccactccagatccaatccacgctgagcaaacttcacaagcagcagctgtcacatgggagggggtatccggcgcgaaagcagggcgcaaggcagctcccacctgagcctggaactgctccaagagtaggtgaccagggaactccggttccggaacgttagcaaatcgatcgattatttcctgcagggtgcgcaatccttctaatctcaattgatccgagtccgaggtggcagccataaaggacattcgaataagttccgctaaatggaggatgaggtaatctccgcgagaacgaataagttgctgttccttagcctgcaggagatcaaagtgcactgaactggcagcctcacagctggctatgatccgccgcacgcactgggcggcgaaaacacgagtgggccaccttggctgcactgctggatgggtggatgtgttctcctctgctcggtattctgttacatcatcagcatactcttcctcctcgtcctcttcatcatcttctccaccagcctccttgctcttgctttgttccccagcagcgggatcatcatttagtcctccttccacagcaacggttaacacattcttgcaaagactcaaccaggagctgagattatctgcagccagcatttggagcattgatgtgagtgtatcgtgaatgtttctcagcatctcggcatccgtttctgtgtcgagcagtgagaaaagcagccctggaagtccatactccgtaattaccaaatccggaagttgttcggcgttaatagttaaagctaattcacacacttccttagcttctcgatgggccaactgacggaggcaggaaacggaggccttgcgaagtatgaaatagttacaggctagcattccaaccagcgtgggtaccaactcctctagttgcagagatttactggcaaaaagatgtagctgctgcaggcagccaatagcctcagcttgtacaagaggatccgaatgtgattgaagaagagctgctgagcagaggaatgatcctctcatggtggccactgcgcctcctcctccttgcaactccggtcccacggtggtgatcaacgcattgactacacggcccacacactgatgtacatcaacatgagcgtggggtacggtaagtaaaagtttcagacacagcgtcaaagttgcctccacgtagccgcggaacattggtcctccagagtcggcaatctgcgctagagcataaagcgaccaagcctgtaccactggcgatgcactatcttgacccaaggccaaaaggatagatacactggtgctcagatgctgcgacgagcccatgccacccacatagcgatgcaggcagcccagggcatgtgaatgtcccgtcctcgtgaccacatctctggcagactttagtttatcaaaactattttgagccaactccgcggtaaaatgagaatctcccacgacctgggccaatcgacccaaggcctctccagccgcacaccgtatggtagagttggcactcgtcagcgaagcaactatcaatgccgtggcactctttcgaacatcctcctgtcctaggcttgtcttgctatctgtcagattttttagagcgcatagcagagccgtaaagatattcatttgaacggcttcttggcgactgctcttggcctggcgaatgcactcagtaaagtgctccagcatttgcagcctatgcttgtttgccactttgggaaaaatggttccatacagagtcactgccatatcgatcactgctaccccgagtggcaatggtcctggacactgttgggccttgctgatctgctgaatgttgcttcctccaccgccgttgcttccaccagtagatgttgctgatgaaccattcgagctggatccattgccttgggcagacctgggacggtacaaacagcatggatcgtgctctaaggcgccagatcccgcggcgctattgggttgcagctaaaaaaaacaataaagttttaattagtaatgctaccaattaatatgtagtaccaaagacattattctagtgtctttggtagtaccttagtaacaaggtatgacaaaaagaatgcaattcaaattaactattcaaaatgtatgcatgcagaaaaaagcaaaatcgatatggcttattgctaaaatgattttctcaaaaaatcaaaggctattgttgaaaaattaacaacaaatacgcttactgaaagcatatcgaagcttaacaaccgatatcggaattttaaaataaaatttgctctttacaaaagcatctattttatttattgtatgtacacgtatttgaacagattaaaatctcacacttggaagcttatccaattttcgacatttgaattcatgctcaaataagtatcaaaatcaatcgcaaaatgttgagtaattaatataatgtaagatataacgacttaatagaactcgaaacaaacactggtattgcactccacttacatgctcgccatcgactttgcgattgggctccatcttaggatatgcacaattatagagagaagggtggaaaaaaagtgaattcgggttcacggatagacagttggttgagcgtacacacacatgaacaggaagatatacgtaaactcccaaattaaacccacctgatcctcaatggtgcgatgattagtttcttgcagccaggtgcccagtatgatcgaatcatcaccatgacaaagcgtccgcaacaatgagtttgtagtgttggccgcgttatccgaaagagtaaactccgagacgagcatgcgaagaagatgggtataggaggcctctagcgcattagcaggcagcagcgtcagcgtttcaaagagacgaagccgcaccatagctgccggtgcctttagctgggttccatagctctttaggacagatgccaagctggaaaagaaaggattcaattagcatgacagataagctgaatattaaagatgaatctcacttgaccaacatggccagggcgctttcgatgggggtgagtagtcgtctggttatgtcttcgttcaggagatccgggcaattaagcaggaagctgtgcattacagaaagagctccagctctgccctctagggtcacctgccaggtaaaggcatcgccgcgcgccttttccgattcaagctctttgttggaccgcgggaaagagttccgccacagtagcagcattcgcggcagcaagcccttgactaccggcgatcccaaagtcattatagctccaattaatagccagccggcctgggtacggtgcagcgacatgcggctattctgggaagcagatcgcagcagttcctccgcacagttgaacacgacctttccctttgtgtggggtatgcccaatggcgagtaccgaacgcttcccaaaattgccgccaaagcgcagctatatccggccattgcttctggcgaggatcgcatctgctcgatggcctccacaaagcgatcaattagtggcgtgatttgcccaggaaccgccacacaagcgcatcgtaagcaccaagcggcagccaaacgggcagcggcgcagggatgtaccaatacggcacaggtagcatcgatcgcttgcagggattgatctcccaacaagttctgggccgtggttcctaatccaataagtagagaactcaattcctggagggcacacaccagcaggtgctgactgaacagtgtttcttgattagaatccttggcgttctcgggattgaagtcaattgagttcatctgtttggctaccagatggaccagttccttgcaggcagcgctctgcgccttctcgcctagcatctttccaatcgttgatcggagtataaagctaatgcatttccgtgaatacactgcatctacgtgggagcacgctgcctttggattggccacgagatccaaaacgtgtgccagaaatgtgcttaactgtcgttccaaccaaacgctgcccatgaattgcacgaaaaccacgtatgcatgcgttacacccactcgcacctcacggttgacacctgagctgcctttgataatctctccggtacccttgagaaaagatgcgccaccacgaaggaaacctgacatgagaatgcccagagcttcatccagggaaaccaagcgttgggtagctcccttgcccgcttgaatagccaccgcttgtccctgtttctttttgcttgttgccgcttctgccagttgttgagtataggctagaagtgttcccagcagctgagctaccgcacatcgcacttcatagttgctgccgtcgaaggctcggaaacacaatgttcccaagctttccagctccgtttggtacaggaatggtgcactgtatatcattttaaggatgcagcgggctgcagccactcgaacagccataactcggtccaacaggcaatgcttggccgccttgtaaatatccttgtgcacgttggcaatggctgtgcccatgccagcgctcaccttctccagcgtgtgcatgatctcaatccgcgcctgcgactcagcgttgcgaagcgttcgaataaggatctgcaccgtatcctcgtaggtgcggcccatcatcctgcccagcttctcatacatagagcccagcacacaaatggcggcactagggataaaagagactcagtttcgatttttatatttttataaatgcaatttactcacagctttgtgggcaagtagctgggcgagtcgtccttgttcttcaggatgtcattgcaggcgttgacggtgtcgaagagcatgaaggtgtcaccaacggagaatagcgtggccaacgcgctagcaatgagcttacgaatgggcggacctggtgcgccctggattctttcagagagctgctgcaccagcttcttctggctcgccttgatctccgctttggacaccagtggcagggccttctccaagtagcgcagccattccaactcgaacacaggccgcttgtgttcgggcaactgcttgagagcatcctcattaaggatcaaagtgtgggccagctccatttcggatatagcctcctcctcagtttccgagcgtccccttgtcgatgaggcggaaaaatggtcgctgtttataaacgatctgcagagcaagcgagaaaaaaaaacaatataaattgcggaatgtttcatcaattaaacgcaacatatggttgatgattgtgttcgctacgaatcggtcggcctttgaccttgccatttgagtctactagtacggacagctgcattatcgattacaatttgttgatcacatttcaaaatttgttatttttttactatttaagtggtatactaaacttttatatccattaaatttatagatcaatgtctaacaaatatataatgtatatacgtgcgtaagtatgccacttgaaaaaaaaaaaaacattggttttgccaatccatatttataaagttgtaaaatagataaaaaattgtcaagaaaacgacttcattaaatataactattaagaagatgacctttttttatttataacagaaacgttggaaattgtgtccgcttaacaaagcaaatatgtcttaaaagcttgccactaataagtagagcaatcaatttacggaatacacatttatgtggataaggggcccagcgcggctcttcccagtggtattgtgtggaaaagtatgcatcactcaatctatatatacggcgatgatgacggtgatgaagtcaacccagaaacatattcaaatgtatcgatgcgccgccacgcttcgaacggaaactgcactggtagcgactaggaagtccacacacccacaaccgctctattttcttgttttatccacacacccactcccactgtcacccagctttgataagtgcggcaaagagctgtcgccttgggctcgatagcagcgcccattgacacagatggcggcaaagtcaagaggagccaaattattaaatcgaaacaaagaccttttcttcggaaaatcaaaggggtccgaagcggcggcggcggctcttgtcctcgtcatttgtgtgctatgtgcgaaatgatgtccgccggctatgggtaatagggtaagaaaagacaatgggaaggatgttcgagggtgcgctgcaattttaatggtggggcgttggagcaccatggtgctggggaaggtcgtttgcagtaattgctttactggaaacatccagccatgtaaaagtgcccttattcgaaaaagtttcacatattaattcttagttgactgtacagtaaaaggaatatatattgtcaactctaagctagttagttacgcaacattttttcaccacctatagctattgtgaatcattacaaaaagagttatttagtcttcagccaaatacagactgatttcatacatacatacattcaatgagtatttcagtgctattattttgaccaccgctgtgcgtacatacaaggcgaaataatcctcaggcgtgaggacaccgaaccattgacgtctgcaggctcgagttacataagacgccgttgggctgctgcaccgcctcctttggcgaccactttcccgcccacaaaaggaaaacaagtaaaacctgtaaggtgcagcccagctatggaaatgaaaccaagaagcagccacgaactgaaatcccggctagacttgtcctgtgcactacgggaacatcagggtgactcgttcgccggtgagtggtgaattcttttgggtggtggtggttgacttttccactttccacacacacccccccccccccctccctcgattaacccaccctccagctttgtttttgtttttttcccgaaattacctgcgcgcctcggagataactttgcgcagaaattgcggcgtgcgtgcaaagtttaagttttccattgttgtgatttgctgtgtcttcacatttccagaaaactttcttcgccgtttctctcgccaatctgcagcagcctgcaactttcacacaaatcgataacacttccacaaaagcacttttagcacacgtttttaactgctccaatggattttgtttaatattactgttttgctttcaattacactaggtcaattcattcttgtcactcgatgtagcataagttgcgaaaaaataaaaccgaattagagcggattacaggcgcaactctggaaaagatgcaggtccagaccagatccgcttacacttgcttcgcgcaccgagtacaaaaacaaaatgaaatgaaagagcgctggcgagcacaaacccaccaagtaaaaagtgttctctctctcttcatacactttttaaggatagcatcggtcttgccaaatgttatccaacgccttcgttcgtgtttcttcatttattttttccaacgaatagaatggaattttcttttaaaaatgagttttttttttaataataagttaatttttattttattaatttatttattattatttaatatcaaaataacgtttggtaaattagtgtgttcctccttgcaaatatttgcataatatatgtcttgaaaaaaggcctttaaaagtgtatacacaagtcgagtgtacgaatgtacgaactttaaagtgagagagcgccaaaacaaaataaaatcaaagagcggcgcaaagaacacgggaaaaacacccgctgtggggcacgttcgagaagagtacaagtgggtggcaagtgctgccggaagagagcggcttgtgagagagcgggcgatgacgtcgcacgctagaatcgcagctgatttagcaacaatttgcagccagcactgttatagacttttgggcacattaacaccgatgtccgcacacacccgcattggcgtgaactatgtcaatgtgtcagttaagtcgtttcgctgattcggcgctcgggtgaagggaagcccaggtgcagtgtcctgcgacaattgtcccgcttgctttgtcctaagagaacacgtttggcggcacttccggccgtaaagggtctaccgaatgatttagaatcggtcccaaatccaaattcattcagaaaaaagttctatacttaatttgcttaaaagcagatactgaaaaaaggttatttaggtttttaaagaccagagaaaataatacataaggcgaataattaaccctacctcgccagttgcaagtcaaattatatttcagaccgcgactcact

SEQ ID NO: 28457 - DNA, 6774 bp, DROSOPHILA
catcttttccagagttgcgcctgtaatccgctctaattcggttttattttttcgcaacttatgctacatcgagtgacaagaatgaattgacctagtgtaattgaaagcaaaacagtaatattaaacaaaatccattggagcagttaaaaacgtgtgctaaaagtgcttttgtggaagtgttatcgatttgtgtgaaagttgcaggctgctgcagattggcgagagaaacggcgaagaaagttttctggaaatgtgaagacacagcaaatcacaacaatggaaaacttaaactttgcacgcacgccgcaatttctgcgcaaagttatctccgaggcgcgcagatcgtttataaacagcgaccatttttccgcctcatcgacaaggggacgctcggaaactgaggaggaggctatatccgaaatggagctggcccacactttgatccttaatgaggatgctctcaagcagttgcccgaacacaagcggcctgtgttcgagttggaatggctgcgctacttggagaaggccctgccactggtgtccaaagcggagatcaaggcgagccagaagaagctggtgcagcagctctctgaaagaatccagggcgcaccaggtccgcccattcgtaagctcattgctagcgcgttggccacgctattctccgttggtgacaccttcatgctcttcgacaccgtcaacgcctgcaatgacatcctgaagaacaaggacgactcgcccagctacttgcccacaaagcttgccgccatttgtgtgctgggctctatgtatgagaagctgggcaggatgatgggccgcacctacgaggatacggtgcagatccttattcgaacgcttcgcaacgctgagtcgcaggcgcggattgagatcatgcacacgctggagaaggtgagcgctggcatgggcacagccattgccaacgtgcacaaggatatttacaaggcggccaagcattgcctgttggaccgagttatggctgttcgagtggctgcagcccgctgcatccttaaaatgatatacagtgcaccattcctgtaccaaacggagctggaaagcttgggaacattgtgtttccgagccttcgacggcagcaactatgaagtgcgatgtgcggtagctcagctgctgggaacacttctagcctatactcaacaactggcagaagcggcaacaagcaaaaagaaacagggacaagcggtggctattcaagcgggcaagggagctacccaacgcttggtttccctggatgaagctctgggcattctcatgtcaggtttccttcgtggtggcgcatcttttctcaagggtaccggagagattatcaaaggcagctcaggtgtcaaccgtgaggtgcgagtgggtgtaacgcatgcatacgtggttttcgtgcaattcatgggcagcgtttggttggaacgacagttaagcacatttctggcacacgttttggatctcgtggccaatccaaaggcagcgtgctcccacgtagatgcagtgtattcacggaaatgcattagctttatactccgatcaacgattggaaagatgctaggcgagaaggcgcagagcgctgcctgcaaggaactggtccatctggtagccaaacagatgaactcaattgacttcaatcccgagaacgccaaggattctaatcaagaaacactgttcagtcagcacctgctggtgtgtgccctccaggaattgagttctctacttattggattaggaaccacggcccagaacttgttgggagatcaatccctgcaagcgatcgatgctacctgtgccgtattggtacatccctgcgccgctgcccgtttggctgccgcttggtgcttacgatgcgcttgtgtggcggttcctgggcaaatcacgccactaattgatcgctttgtggaggccatcgagcagatgcgatcctcgccagaagcaatggccggatatagctgcgctttggcggcaattttgggaagcgttcggtactcgccattgggcataccccacacaaagggaaaggtcgtgttcaactgtgcggaggaactgctgcgatctgcttcccagaatagccgcatgtcgctgcaccgtacccaggccggctggctattaattggagctataatgactttgggatcgccggtagtcaagggcttgctgccgcgaatgctgctactgtggcggaactctttcccgcggtccaacaaagagcttgaatcggaaaaggcgcgcggcgatgcctttacctggcaggtgaccctagagggcagagctggagctctttctgtaatgcacagcttcctgcttaattgcccggatctcctgaacgaagacataaccagacgactactcacccccatcgaaagcgccctggccatgttggtcaacttggcatctgtcctaaagagctatggaacccagctaaaggcaccggcagctatggtgcggcttcgtctctttgaaacgctgacgctgctgcctgctaatgcgctagaggcctcctatacccatcttcttcgcatgctcgtctcggagtttactctttcggataacgcggccaacactacaaactcattgttgcggacgctttgtcatggtgatgattcgatcatactgggcacctggctgcaagaaactaatcatcgcaccattgaggatcagatggagcccaatcgcaaagtcgatggcgagcatctgcaacccaatagcgccgcgggatctggcgccttagagcacgatccatgctgtttgtaccgtcccaggtctgcccaaggcaatggatccagctcgaatggttcatcagcaacatctactggtggaagcaacggcggtggaggaagcaacattcagcagatcagcaaggcccaacagtgtccaggaccattgccactcggggtagcagtgatcgatatggcagtgactctgtatggaaccatttttcccaaagtggcaaacaagcataggctgcaaatgctggagcactttactgagtgcattcgccaggccaagagcagtcgccaagaagccgttcaaatgaatatctttacggctctgctatgcgctctaaaaaatctgacagatagcaagacaagcctaggacaggaggatgttcgaaagagtgccacggcattgatagttgcttcgctgacgagtgccaactctaccatacggtgtgcggctggagaggccttgggtcgattggcccaggtcgtgggagattctcattttaccgcggagttggctcaaaatagttttgataaactaaagtctgccagagatgtggtcacgaggacgggacattcacatgccctgggctgcctgcatcgctatgtgggtggcatgggctcgtcgcagcatctgagcaccagtgtatctatccttttggccttgggtcaagatagtgcatcgccagtggtacaggcttggtcgctttatgctctagcgcagattgccgactctggaggaccaatgttccgcggctacgtggaggcaactttgacgctgtgtctgaaacttttacttaccgtaccccacgctcatgttgatgtacatcagtgtgtgggccgtgtagtcaatgcgttgatcaccaccgtgggaccggagttgcaaggaggaggaggcgcagtggccaccatgagaggatcattcctctgctcagcagctcttcttcaatcacattcggatcctcttgtacaagctgaggctattggctgcctgcagcagctacatctttttgccagtaaatctctgcaactagaggagttggtacccacgctggttggaatgctagcctgtaactatttcatacttcgcaaggcctccgtttcctgcctccgtcagttggcccatcgagaagctaaggaagtgtgtgaattagctttaactattaacgccgaacaacttccggatttggtaattacggagtatggacttccagggctgcttttctcactgctcgacacagaaacggatgccgagatgctgagaaacattcacgatacactcacatcaatgctccaaatgctggctgcagataatctcagctcctggttgagtctttgcaagaatgtgttaaccgttgctgtggaaggaggactaaatgatgatcccgctgctggggaacaaagcaagagcaaggaggctggtggagaagatgatgaagaggacgaggaggaagagtatgctgatgatgtaacagaataccgagcagaggagaacacatccacccatccagcagtgcagccaaggtggcccactcgtgttttcgccgcccagtgcgtgcggcggatcatagccagctgtgaggctgccagttcagtgcactttgatctcctgcaggctaaggaacagcaacttattcgttctcgcggagattacctcatcctccatttagcggaacttattcgaatgtcctttatggctgccacctcggactcggatcaattgagattagaaggattgcgcaccctgcaggaaataatcgatcgatttgctaacgttccggaaccggagttccctggtcacctactcttggagcagttccaggctcaggtgggagctgccttgcgccctgctttcgcgccggataccccctcccatgtgacagctgctgcttgtgaagtttgctcagcgtggattggatctggagtggctcgcgacataggagatctaaaaagagttcaccagctgttagtcagttcccttgataagctttcctcaaaaaccaacagcactcagttatataacgaatccatggctactttggagaagctaagcattttaaaggcgtgggcagaggtttatattgtggccatgataggaaatggaaaggctccggcttccctactgaatctccaatcccaacaatccggctttcaatccttaaccaatctggaaacggactcggatgttcctgacagtaggggtgaaagtcttttaggattagtgcaacctgagctccacaatctttcaacacactggctgagtgctatgaaggatcacgccttgctgcttctacctgcggagttccaatcccaactaccgcacgacggaggagccttttacaccacggacaccattaattcgtcaaaaccacattacatgaccagttggcccccaatcctctatgcctccgcactatggttaagggatgaagggttcgcccgtcatctagacacaagtgaagccgcagctgagtccaacaataatcagatcactcatggatctttgtcagcggatcgcttccatatgatcttcggcatctgcatggaggcgctctgcagcatgagaagctctgaaaggccgagaaacattgtgagctgccttcgctcactgcacagcatctttgattctgattgggctaggaggcagttggtcaaggatcgggctttaaccattgaactctgtcatgttctacatcgtcagatactgacgagagatgaattactcgtacaacttctgtgcgtagaaattttaaagcaaacaatccgcgctgctagggaagacttagaaagaaaacgggacgataatgccaattctgaggacggaaagggtggagagcgacatggagaagatgattctatgcagccaggaagctcgcatgtctacgccgttctggaggtttgtctttgcctatttgttcgccaaatacctacgatgaatcccacgaggcagggagctggtggctccggcttacagctggactttgcctatgccaaaatggccactggctcgtcattcttctcggtgctcggcgatgaaaacggcctgctagtatccagcggactgcagtgcgtcgaacagttgatggatttgtgtactcccaaaggtgcccttgcaatcctgcccaccgtcctgtatatgacaaccagtatcgttaaagaaatcgccaacaagtcggccatagatagtactatcttggcaaatacgtgtgctgtgaagtctgccctgcagtgcttgcgatccgtttgtgtccacaagtgggctaaagtagaggagacaaccgaggaatggcaacagttactgcaaagtgcactggccaccattgtggatctcaccaaaacggctggcgataacgaggaaaggaaagtcgacgaggtcactatgctgctggccatcactgtttttattctacatactcccgcctccgttgtggctacaccttcattgcaatatccatgcattaatcacttccggcagtgcctgcagtcggagaacctctcggtgaagctgcgctgcatcgagaccacgcgatcgatcttcgctcgggccgaattgaagacggcaacaccctacatccacgcacttgcgcctaggataatcgaatcgttgtatgcggagtccagcaaggtgcccacaagcgaactggagctacaggtcaccctggagagcatcgttaccgtggagcagcttatagacttgtcggagccgcagaaccatattcagatgctgactctgttggtccctgtgctcattggcttcctagcggaacccagtcgactccggacgctgccaaagtatcaacggcagctgcacgaccaggcgctgcagtggctactgaagatcggtccgaaatatccgcaggagtttaaggccctgatgggtcaaacaccggaactgcgacaaaaactagaagcggccattcgcagccaacagcagtcgattaacattgcccaaaaagcaagcgaggcgcagaggaacctgctggccaagccgcagaagcctacgatcaagctgaagacggatttcagtaacttccaatga

SEQ ID NO: 28458 - protein, 2117 aa, DROSOPHILA; identical to SEQ ID NO: 4929

SEQ ID NO: 28459 - DNA, 3768 bp, DROSOPHILA
actcttttccttggacgaatccaagaaaaatgcgaatgacctgccggactcatttttcgacttgaccgtcaacgatttgaagatggtactccgtgatttaaagcgtacgtcgagcggagatgacgacgctcccttgctgacagcaaagctaagggaattggagcgccaaaaggccatgctggctaagcttaaccagtacaaggactgtgtgctgcgcattcagtttcccgatcgcttcgtgctccagggcatgtttaagccgcacgagcccctttccaaggtggaggattttgttcgggagtttttggttcagccaggtgagcaattccatctcttcaccattccaccgaagaaggtgctgccctccggtgagacgctcctggagctgaattttgttccaaatgccatcgtgcattttggctttatcaaggactcgctcaatgcggtgagcaatcgattcgtgaaggaggagtacgtggatcagttgacctccgaggagggagcgcactacgcagtgcaaaagtaccgccttacccgtgcaacggcctcagggtctagttaatagatacatacatacagtctgtgtgatattaaatgaatccgctttatttctatatatttttttatttgacacattttatataaaatgagaattgtcgttatattctttatcaaatgaaactggaaaactgacagtaatacgctgagccaggctttaacatgttctttttttttttaaacatgtgttagacaaaaatccactatcgcataacaatcatgagctggcagtgataaagcattgctaatttaattagaccgcgacaaatttcttattgtcaatgttatcattaccatgttgtaaattcatttgccaatacatctcaaaagtgaaatgtacatcttaaaaaaattaacgtttattggctttctgagtgcttgttttattaactgccaaggatttgtcaattcgaacccaaagaaatcttatgctgcctcaacaatggaactgatgaaactcctagaggtggaggatgaactggtagacaatttaaagggctatgtgaaaacactgaaaatgaaattcaatttaatggaaaggtaggactaaggtgctattcctccatgaataattctatattcacgtgtttcatcaagatccctaatagatatgagtagagagaacatggaaatgaagagtgattatgaatcgtacttgggaaatccgttgaacagctttcgactaatacatcgcctacacacgagttggagaaaatggtatcaatatgccattaaggtcgagaataatgctttaggtactgtcaatatctagttaagttaaagaataagctttaaataattgtttgtagggcacattgaaaatgcccgactgatgagaaagatgctaccaacctcgtcggatttgcagcaggcgtgtcgcggaatccatgacttgatgtacttttacgatttgaagccagaagaactggcagctggtaacttagcagggtactcgcagccagggtaagttaggagatccatcctaaagtataccatgattgctgaccatgattgctgacttccagaacaggactgacagcttacgattgtttagcccttggcgagtttggcgtccaaaatcaaaaggatgatcttgccgaggcttggtataacctttctttgactcgttttgataatataatcgaaaaataccaagtgcacaaggcatgggcacttctcctggcgaagaataagcaacttactgaagcctttcaacatttcgagaacaagcctgagggaatagtcgccagtaatgaagttatacactttgagggtgtgttggcgactacgcaaaactgcactgctgtggtccaaaaaccaagtaaaaaactccactgtcgctacaacacctccacgactcccttcacgcggattgcccctctaaaaatggaggagctgggcttagatccgtacatggtggtctttcacgatgtgatttacgacaccgaaattgatgggatgctaaactcgagtgattttggattatccgagtctgtttctggtctgaagtctgaggtgagaacgtccaaggactcacatatagtagatgctaaaacactcaatgagcgcgtaaccgatatgaccggactcagtatggagatgagcgatccattttcgctgattaattacggcttaggtgggcacttcatattgcaccatgactttcatgaatatacgaatacggtattatttttggactaaactattacttttagaagtattattgccattcattttcagaccaggcttaagcaaggggatcgtatagctactgttttgttctacgtaagtcagtccagtttgtcgcagaatccttggtattagcttgaaccctttccagctgagagaagttgactcgggtggcgccacagttttcccgatgcttaatattacggttatgcccaagaagggatcagcggttttctggtacaatcttcacaactcaggagctgtaaattcgaaaactttgcacacagcttgtccagtgataagcggttcgaaatacggtgagctttagagtgtaatggttttgtataaagtaccacctggatcttcttttatagtgctcacgaagtggataaacgaactgccgcaaatgtttgtcacaccatgtatgaaagactcgaacctacgcccaccccaaaaagaataattctgtaatctgtaatggaattaaatttaaattaaatttgttttcccttttctggatgatatccacgttttatgagcaatggaaaaacttatcttcagtgagttgtgccatggaggcgttgaaatcattatgatcttttacctatttcttaagcagaactcgatgctatggagaataacaatcctgagctgatagtgctggtctgaaagtctgaaaggcttatttcactgatgttatttttcttcattaacttacgctggatttaaggaaccttcctagataccagctgctagttgttttggttttaggtcattaattaatatcaggctaataattttacgataagcgggtatggtgtaacataattagtcaagcttgatatagggcatacaaaggaagtagaaatttaacccattttctatgaaaattttttcagtttagtgcgttttaataaagttaccgtttttctatctcctatctatctatctacctatttatctatcgtcctttaatattttggctttattagattttctgaatgcgtacagagatatagcattgctaatttaattaggccgcgacaaatttcttattttcaatgttatcattaccaagttgtaaagtcatttgccaatacgtcccacaagcgaaatgtacatcttaaaaaacttaacgcttattggctttctgagtgcttgttttattaactgccaaggatttgtcaaatcgaacccaaagaaatcctatgctgcctcaacaatggaactgatgaaactcctagaggtggaggatgaactggtagacaatttaaagggctatgtgaaaacactgaaaatgaaattcaatttaatggaaaggtaggactaaggtgctattcctccatgaataattctatattcacgtgtttcatcaagatccctaatagatatgagtagagagaacatggaaatgaagagtgattatgaatcgtacttgggaaatccattgaacagctttcgactaatacatcgcctacacacgagttggagaaaatggtatcaatatgccattaaggtcga

SEQ ID NO: 28460 - DNA, 1426 bp, DROSOPHILA
atggaactgatgaaactcctagaggtggaggatgaactggtagacaatttaaagggctatgtgaaaacactgaaaatgaaattcaatttaatggaaagatccctaatagatatgagtagagagaacatggaaatgaagagtgattatgaatcgtacttgggaaatccgttgaacagctttcgactaatacatcgcctacacacgagttggagaaaatggtatcaatatgccattaaggtcgagaataatgctttagggcacattgaaaatgcccgactgatgagaaagatgctaccaacctcgtcggatttgcagcaggcgtgtcgcggaatccatgacttgatgtacttttacgatttgaagccagaagaactggcagctggtaacttagcagggtactcgcagccaggaacaggactgacagcttacgattgtttagcccttggcgagtttggcgtccaaaatcaaaaggatgatcttgccgaggcttggtataacctttctttgactcgttttgataatataatcgaaaaataccaagtgcacaaggcatgggcacttctcctggcgaagaataagcaacttactgaagcctttcaacatttcgagaacaagcctgagggaatagtcgccagtaatgaagttatacactttgagggtgtgttggcgactacgcaaaactgcactgctgtggtccaaaaaccaagtaaaaaactccactgtcgctacaacacctccacgactcccttcacgcggattgcccctctaaaaatggaggagctgggcttagatccgtacatggtggtctttcacgatgtgatttacgacaccgaaattgatgggatgctaaactcgagtgattttggattatccgagtctgtttctggtctgaagtctgaggtgagaacgtccaaggactcacatatagtagatgctaaaacactcaatgagcgcgtaaccgatatgaccggactcagtatggagatgagcgatccattttcgctgattaattacggcttaggtgggcacttcatattgcaccatgactttcatgaatatacgaatacgaccaggcttaagcaaggggatcgtatagctactgttttgttctacctgagagaagttgactcgggtggcgccacagttttcccgatgcttaatattacggttatgcccaagaagggatcagcggttttctggtacaatcttcacaactcaggagctgtaaattcgaaaactttgcacacagcttgtccagtgataagcggttcgaaatacgtgctcacgaagtggataaacgaactgccgcaaatgtttgtcacaccatgtatgaaagactcgaacctacgcccaccccaaaaagaataattctgtaatctgtaatggaattaaatttaaattaaatttgttttcccttttctggatg

SEQ ID NO: 28461 - protein, 455 aa, DROSOPHILA
MELMKLLEVEDELVDNLKGYVKTLKMKFNLMERSLIDMSRENMEMKSDYESYLGNPLNSFRLIHRLHTSWRKWYQYAIKVENNALGHIENARLMRKMLPTSSDLQQACRGIHDLMYFYDLKPEELAAGNLAGYSQPGTGLTAYDCLALGEFGVQNQKDDLAEAWYNLSLTRFDNIIEKYQVHKAWALLLAKNKQLTEAFQHFENKPEGIVASNEVIHFEGVLATTQNCTAVVQKPSKKLHCRYNTSTTPFTRIAPLKMEELGLDPYMVVFHDVIYDTEIDGMLNSSDFGLSESVSGLKSEVRTSKDSHIVDAKTLNERVTDMTGLSMEMSDPFSLINYGLGGHFILHHDFHEYTNTTRLKQGDRIATVLFYLREVDSGGATVFPMLNITVMPKKGSAVFWYNLHNSGAVNSKTLHTACPVISGSKYVLTKWINELPQMFVTPCMKDSNLRPPQKE

SEQ ID NO: 28462 - DNA, 11635 bp, DROSOPHILA
cgtgatgcagtgcgttgctctccaagcaatctataaatacgtatactctagatctacttagttttatggcttcacacttaagtacctacagtgctagaaaagactggacgaggacaagagatcggcaacattgccgtggtcacatcacaaggttggaatttcacttttctatggcaaagtaaaaataaatttcgcattagtgctaggtaaatgaggcgtctctcttctttccaactggtgttatctggtcttcggattgtgcgaggtggtcatagtcatgtgagtggcgaatgctaaaagcatttccatcacttctcacctctgacgtcggcggatggtggagttgagcaaagtcggaggcccggctggagccccttgaggtgcaatgaaaatctgctctggtcgtagcattttatattaactaagtttttaattttctcattttcagtttgtttgttgttgtttgcttgcttggttggttggttggttggttggttgtgtgtgtgtggttttgcattataactgtagtacatggggatcttaggtggtaatagatgatatatattttaatattaatagataatgtgtaatataaatataagtttaaacttgtacacaaaaattaaaatgtcgaacgtctcgtcgtctctcagatcagtttagaagagtccttcccccccacgcttcgcttcatgcaacttcctcctctctgcctcatcatcatcatgactgttcgtacaaataagctagaagattcgagagaagaacgaagcgaggcacgtcatctatctgcggggcggggaccttttcaaaatgtatatacatactgcaacacacatttggatactcgtagttctcgtataaatagtttagtttttaactaatttacatagtcatcatgctgacgatgcgctctggcggcttcttcataatatgctttaaatatagttaaatatatatgtatgtatgtggtatattttagtagtagctacaacttcaacttatgtgcacactccaaaacgtatgtaactaaaatccgtaactagtatctctagtgaatctatgccgttagcgttatgtgtatcgcgtatcctgtagccgcagcaagtgacgctggcttgtccctcgttttatcaggtcaggtggtcaacggcttcaacggcgacggcttttgccactctgcttttccctcaccatccgccccaatttctgattattttcttgttctgcataccgacatccgacttacagaagtaaaggagcgggaccgtgaggcgccaatgtcgcgttcggcttaaaaacgaaactaatgttaaagcgctgtcaatgctgcaaacgttgcgagattaggtttttggttgatccaacatgctctttaatctgcaaagacaaaaacaaattattaaaatattatcataatgttactctaaacattttcaatccattgatctggaaaatcacgtacctatgacatgactctccatatttgtgatgcgtggcttcgatgcgggctgtggtatgatggtgatctcatcgttgatcttaagcggcttcaacagagagtcattggccgctcccagcgaactgcgcgacatccctgccccagatcccgacccgctggactgcgcactgttcttcttgctgtccatcgcttttctggccacggtactgtgggcggtgtaaacgtgcgtctcaaactgtttgtacatgccgaaggtcgccgtgcaaacggtacacttgtaggacaggtgagcgggcttcagggtcatatgatgatcgcgcgacacgtgattcagcagcttccattggtacatctaaagggagagcggcgattttagacattgttttcatcgtccatttatacgaaaaactcacccttccacagaccggacagcgaccagcatccttgcccttgttggcagcctcctgcatggaacttgtgaccaagccatgtgagcccagcaagtgtcgctccaatccctgatccgtaaagaaccggaactggcacttttggcaattcaaaggcggcctattgtagatcatcttggggtgaatctgttgcaaaacaaagcatttgttagcaaaggggaaaatcggggaaaatggaaactcagctctaccttcactttgtgcatccactgcatgtggttgcgcagctgctccagatccttgatgtagccatcgcagatctcgcaaataacaaattgcgccttattgttaccgctgggactctggccgggcttcattcctgctgccgcttggggcgctttgctggacgaggcacccgcaccggcgcccaccgagctctgacgaggtaatggcgttatcgagatgctgggctgtccggccatcggcttcttggatgcctgtataaatagatcgatattcgattaaaaccggtttttaatgggagagtctattttggtacagctaaacatgctacacatataccctttaaaacccaattccaatgtttaaataatttaatgtagattatagagcgtataaatgtagtttacctggacaagctgtccggctgccagctgatagctgttgggtaacgagagtcccgcattcatcgcgttgcctccgcgcacaggcgccggatttcgcactatgttctgtttgggtggctgcggggctcgctgacgcatcttggccgcattctgggcagctaacgcggctgcctggaggttattcctcgcctgcgccgccgcttgctgctgctggatgttggccaaagcggccttttgtgccgccgcctgtgctgccatagcctggaagggattaaaccgattataaacttattgcaaaagacttaggtgtagatattcctacctgataggcggtggcagtgcccacaagaccatgacgaggcttaatgcgcggtatcttagccggtgcctcccagtcgtttggcggcgccaggttaagctccggccggaacttcttagcgcagacgggctgatgtcgggccagctttgccttgccattatcctcaaagccgcagttgggacactggtggtagggcagtggctttataaggcgcgcctttatgttgtgcacagcctccatgtggtagacaatctccgtggcgttccgtatctcaaacgtgcagaagttacacttgtacagcactccgttcatgtgcggcgtctcgtagtgattagccatcgccatggcagactccgacttaaagttgcagaactcgcatcgcttcatccggaacttgaagggcgcgtttttcgtcttggatgcctgcaggttgccagagagcgcattgatggccatttcaaactccttggaattttgcacctgcgccttgcgcatcttgcgcttctgcagacgcagcagatccgactgcacgtactcctgcaccagacccacgccaatgtccatgaagaacttgcccaacggactctcaaagtagttctcctgtcctggcttgttgccgcccggattgtttaccgacactccgcccgctgttgccaaggcagcggcgggcttgatggccaccttcaaggcgctcaggtcatcgtttgcctccttgatcagcaccttagtccgtacgcccgactccgagtcgtcgtcgtcgtcttcgtcgtcatcatcgtcagactgctccgaccaggactcgtcgtcacctcgctttttctttttctttttgccgctttcatcggcctgatccgctggcttgtcctctttgttttgctcggtcatcatgtcgaactcgtcgcccttgtctgcctcggccaaatcctcagccgacagcgcatacttggtctcaattgctttgacgacctcgcagatgttttcgcgtggtggcttttcatagatgtagggtacaatgaaggagggcgcttccaggacaaacatgtcgtcagtgagaccgggcagcaggttggcgttgttggtcatgctgggcagcccggtaagcgataacgttggcggattcagctgcactggactggcgctcatgccgcccgccatgggaactagcttaggcggcacaacacccagattggtggccgctcccgtcacagcattcgttatggtcaccgggtagatagaatctcggggacccgacacagagctcggactgccatcgagaggcatcaacgagcgggcatccttaatggtcagctggcccattcccgagggcgtcgaacttcgctgtctcttgtggctgggctgttgcagctgcaggtcatctaggtcgctcttgcgcttgccgctgggcgaaatacttagcggtgtgtcatcttcaatcacgacgcagtcgtcgtcatcatcatcatcctcatcatcctgcacgggcgggggcgggatggccttgacaactggcgggagcttctttactggcggcggtggagctgcggattccgtatccgaatcggaggctatcagaacagcatcgtcggaggattcaccaccactagaggaagccggtttggctgccttttcggtgggcttggccggctccttgtgctccgtaatatcctccatttcctcgtcactatcctcatccaggttaaccacaccaccatcggagggagctattgccgccctggcctctgctatgctggcttggccgttctccttctggttgggactggccccaaacccattctcctgctttgctgggggctcttcctcgacgaccccttcgctagctacgctctcctcgccatctaggtgcgctttcttcccgctggccagttcatcgtcaggaactgtgactgctcccaggggatcttcggcctcgcagctgttttccgctgtgctaccgatcttttgggcatcgtcttcgtcctctggctcgtgatctccatctccgtttgtggtagcctcctcgtcttcttcatccagttttggctccttcgagctgctgctggtaatctgtgagtcttcgtcgtcgttctccacttcgttttcctccacgtcttcggtcccgtccacctccattatctcgtcggccactggagcttgtggagatgcctgggcaacatcctctttactgatatccttgccgcccgcggaaagcagctcgagcttttcattggagggggcctccggcaagtgcacatcttcctcctgctgctcctcgaccacctgctcttcatcgtcctccacagttgtgacctgctgctcaacatcatctgctgatggtttactctgttttggggaacttgatgcgctggcaagctttgtcgtgggctcggccacgccctccggcaaaacgacatcaacttcagtcatttgaggtccgttctctgctccgtggaatgtgcccaagtcggtttttcttccagctgtttgtgtttctgcaagagacacaataaaattgaagaattatcaaaactgagttgggaatttaaatttttacttaattttacttaatggcagcttcttcttaagaccaaccggaaaaattggcacgtaaaagaaaactaaagtatcaaaaagcaacgaatgagcagcacaaagcgcagcgggcgaagagtaaaaataaaaagagctaaaactgcagaaagaggacggcgaaggggcgaggcgaggcgaaaaattaacaatcaccgaaaaatatttgaaaatctaggtgaattaagaaggtgaactcaagaaaaggcggaccaaaaacagggcagcagcggtagggcaaggggagcgggggaagttgaaagaatggtttgatacaaaatggctgccatattggattaaaactaaaatacaatttaatatgtaatgtaagtatgtaaatggctttacactgcaagaaaaaagagaatgcagaaacgggggggggagttatggtttggcgatatatgcaatttatatactttggtattaacacacttgcctataaatatatattaaacatatatttatatatgtttatgtgaaatgtttgtatgtacaaacgaacagttaccgagcagagccaacaaaacgattgacatacatacagacacaaacgcacacacaccgcctgcacacacaaatatacaatctatatatacggcacatatatatttgtacgcttgtaagcacagggggagggacgcagggcggggggcggcacggatgacgacgtttggctttagctttattttttgtagttgtttttgttgctcggctggcggcgtggtggagtatactaccgctgttgttgctggtgttgttgttgtactttttggtacaggagcgtgtttttgcgctagtgtttgtccctgtgtgcgtgtgtgtgccgcgcttgcttgcgtatgtgtgtgtgttttttctgctgctatgttggatctcaccttacttttcaatattctaggtttctttcaaactaaagacgattttcagcggcatttagcattgtttttgttacttggcggcacttacattcacattttcccctcacaatcggcaggttgttgttttgtttcgcctcccttttggtcccttgatcacaataaacaaaaaacagagctgccaataaatgaaagatcgttttctttacgaaataaccagggaaaatccgaaaattttgcgtggggtttttttaattggagaaaaaaaactgagcagaaagaacgccgaaggcggagacacaagagacgaggaacgaacaagcaggcaaggcaaactggaaatgtgtgaggcggaaaaagcaaaaacagagttgcaacgaacagcagggcgcgcgcagggttgcacggcttatcggttatcgattaccggccatcgatagtgagccacccaaaggtgccaattgctgatttcgcaattaatttttaatttaattcatattttcgctcattttccttctctagtaacggtaatagcttttacattgccggctatggagagggctctctttcacttgaacgcctctcaaaaatagcgaataagcgtgtgaagcgcatggcccgcacacatgggcctttgtgcatgtgtgtgtgtgtgcatgaatggaatggcgtggaatgggagggaaaacaaatttgacaattgtacgcgcgccacgaacgaaatgaacaaaacaaaactgaaacggcattgcttgtcgccggttttactttgatggatttatgcgaatcggcatgtgcggaaattcaaacagagcgcgcgaaaaagtctagatggctttaaatatcgcagataaatatggcaaattgcaactcccccgccgccgcacccctctcaccaacacactcactcatactagcacacacactagcgtcttaaactgtatactcatcacgatacttttgctgatgcttcttctttctcctccaacttatttcagattacgctgtccctctctttcgcacccacggccccggggtatatacaatcgtacatatctatctatatgtatacatacaactaaatatgtatgtccgtatgtaagtcgccctatgcatgtgtgcgtgtgtgtgtgactgtgcgatttggtctatatgcaagtacaaaatttgaaagtaacccgcttctggcgcattttccatccccgtcccctgacctctgcccaccccctcccccatgatcgacaacttggtagaggtcgaagggcatccggagcaaggagcaagccacctaaccaatcgccatcatcattaaagaccccgaactcaaacccaaaccccaactttatgttatacatacacgtgacccttttcgatatcgagtaaattagccaattcatattttccagtgcaaatttacaaagttaagcggaaattactgtggcagttgggtcttaatatcttagaggtgaagtcaattgaatcgaaagtaaagatacaagatactaatttaagagattgatcgcatgtatcaaaaaggactttaccacatttcttctaatcaagtgattaaattataagatattaggtatcagagtttagataatcctgttgtccgaggactttctctagcagatttcggactttgatcaagatttaagatcaatctgtattgggattgaatatcaaacccaactaagaactcacaattgaaatggaaaaatgtaacattagatacattaaaaaaaagaagaaaataacataaaatttcaccacaaatattcggttttgagtcactaatatttttccaagtagtatgattcacgtaaagtacattacgtgataataataaatataattagtatgctaataatttacttaaaacgtgtaacacttatttaaaaaacataaatttggaaaagctttaggaaaaaatcatgttgtaggaatctaagggatctttaaagaattctataattatttttacgatcgacgtgtcaaaaccatgatctaatctcaatgattcatttctaaataacaataaatcagcaatacatgcatatgtttaatgcaaaaactcaaatatatactatatcatatcaacttgagtatacagtttagttctttggtgaaaaatctacaatctatgatgacagcgtcattgcgagttggattttaacacatacatatggaaaccccattattaaactcataaattcacatggcaacaaagaaatacaaagcatagttaacaatcatttgctgtttttgacctgaatttctcaccttaatcattcgctgcaggttaacttggttggttcaacttatagccagataactaaggtgtgatcttcaatcctcggcagtctcgtcctcctcgtcctcgttgaaggacagcttactactggcggccttggacttcttgctcttggatgtgctggatttttcggacttcttgttggtttcagattgggactcttttttctcgatgttgggctgcttgacacagtgtttgaagactattggctgcgtcagatccgctcgcttttcggctaattctggaagattgaaaatgggagttagttatgggtcagcaatcatctgtacttattatgatcgtagtaaagcgtgtaagtaaacacctatttacaagttaaatggagtatttaagttatataaactatcttagaatgaaaaatattttggggaaagtagtatgcacaaatttagggagaaaaatgccaatacatatatcaaagctgatataaataaaataaatttaaaaattgcattaactaaaaggaatacaagaaagtttttgaaaattgatctgcttataaaattgccaggaaggtgactaatatgccagcaattcattattggattggaaaatgtatctgggttttaaaaactgcagcatgacaaatggggaggagggaggtgtaaatcagaacaagccacccaccgaccccccccttttccaagcagcacccacaagatgtttttctcggccctgggaagccccttctcgcccgacgctcccgcttcactccccctcccgctccacccactgattcgcaacccgcccccgctgttccgccagccccttcttcaacgcctaccccctccccgcagcgcctttgccaccgccaccacgtcgtcaagccactttggcccgctcttttcctctttgctcgcctgcttcgttcatcattgtctctccgctttgcccgcctccttcatccgttcgttcttgcacacgttgttttcacccgattttctgcgctcttccaagtggggctgaaaggggcaggggggcgagcggaagaggcggacaaagcgagcggcggcagctgctgttgttaacttctttgccggctgctttatcgccgcgcccgctttgccaacgattttcatcacatgctctgctttggcggagcccccaatgaaaatgtcagtgtgtatgcctcgtcggctagctgctgcgggtgtgtgtgtctgtgtgaggggtgctccgctgggcaaaaaagggaatctttaggacggaaatgaccaagattgccatggcaacatagggctttaaaaagattgaaaaaccgaaggtgcttttcgaaaaaaaaaacacatacttcttgcaacaaactgctgttttcgcactaccgttagattttcatttggcaaaaatgcacaagcacacgcgcgcactcatacataagcaacggtatatacgcagttatgtatatatacatatatgatttagatatatgtaacgccgggcagaagaagacaaccgctcgattctgactgaaaagttaaactgaaagacaaactacaacatcctacctacgcacacacgtgcaactgccgccgccgccaccgtgggctatatgcatgtgtgtgtgcgtgtgcgagcgtgtaagtatgtatgtactacagcgatatgtatgtatgtatgcttgtacatatgtaccgacctttggaggccaacagtttctccgttttggcctcttcggcggatagatctcccggcctaaggacgaccacctgcggctgttcgtcctcccgtgaatcttcctcagaatcgtagtcctcctggtcctgcggatccaatcgctgacgctaaccaatggttatatatccgcattagaatgctgcagaggccttccccgtagaactcaccttggtctctacggtgggtccctccttgtagccaatttcagccttcaacttggccagaaaactaggttcttgcggctttacgtacgttatgttgcgcttggacatatcagatatggcggctatatcattgcacttcttgaccgatttagcagcggtttttgcactttttatttaccacaaatgtcgataagaaaaacatatgcttatcgagcagtgtgggaaagcgcgcgttgacaatactaaatcgatttcaactgctatactttaaagtaacgtaagacaattgtaaatccagttttaatagttataatgttaaagtttaagcttgctcttttaatattattagtcccaatttttgagtccttgatatttatcgatagcaccgataagtaacagctgtactgccgtgtgcatagtgctgcctgaaaaccaattgtagatgggcagcactgttaggcaaaagcggttactttttgaaaatgcttactgttgataaagagttaatatttcttaaaaatttctataaatatataatatttatcctattatttttgatgcatttctttaagtatcttaagttcccatttccaactggcatttccgctgagaaaaccgattgccccgagacgtgccatcaatttgcgaatcctcgctgccaatcaaaaaatgggcgcataaaactgtcgcataacttgcaaattttccgcttcacctggaattccgtgctccaaaacagaaatttgatcgcttctgacagcaaaacaatacacagcggcattcatcaacgtcagtggcttccatttgcaatgtcgtatgcacagactcctcctcgattgaagccccctattcgttcctgggaacataataaatcatctgcaaattgatttcaaaacttcgacagctaaccaaaaaagagctgccgaaaaaaaaaggcaaatgaaaactgcagcaaagcggagaaattttatgagctgcagcatatgttggcaaaaacacaaataggatgcactgagaaaacagcgtttcatatatttagtttagttataaataaaatacgtgagaggagctaaacaaaagttttttttttttggttttttttttgcataaacccaaacaaatatctgtagactgacagatagagaagaattaaattagtgtca

SEQ ID NO: 28463 - DNA, 4331 bp, DROSOPHILA
aaaaaccgctgctaaatcggtcaagaagtgcaatgatatagccgccatatctgatatgtccaagcgcaacataacgtacgtaaagccgcaagaacctagttttctggccaagttgaaggctgaaattggctacaaggagggacccaccgtagagaccaagaattagccgaaaagcgagcggatctgacgcagccaatagtcttcaaacactgtgtcaagcagcccaacatcgagaaaaaagagtcccaatctgaaaccaacaagaagtccgaaaaatccagcacatccaagagcaagaagtccaaggccgccagtagtaagctgtccttcaacgaggacgaggaggacgagactgccgaggattgaagatcacaccttagttatctggctataagttgaaccaaccaagttaacctgcagcgaatgattaagaaacacaaacagctggaagaaaaaccgacttgggcacattccacggagcagagaacggacctcaaatgactgaagttgatgtcgttttgccggagggcgtggccgagcccacgacaaagcttgccagcgcatcaagttccccaaaacagagtaaaccatcagcagatgatgttgagcagcaggtcacaactgtggaggacgatgaagagcaggtggtcgaggagcagcaggaggaagatgtgcacttgccggaggccccctccaatgaaaagctcgagctgctttccgcgggcggcaaggatatcagtaaagaggatgttgcccaggcatctccacaagctccagtggccgacgagataatggaggtggacgggaccgaagacgtggaggaaaacgaagtggagaacgacgacgaagactcacagattaccagcagcagctcgaaggagccaaaactggatgaagaagacgaggaggctaccacaaacggagatggagatcacgagccagaggacgaagacgatgcccaaaagatcggtagcacagcggaaaacagctgcgaggccgaagatcccctgggagcagtcacagttcctgacgatgaactggccagcgggaagaaagcgcacctagatggcgaggagagcgtagctagcgaaggggtcgtcgaggaagagcccccagcaaagcaggagaatgggtttggggccagtcccaaccagaaggagaacggccaagccagcatagcagaggccagggcggcaatagctccctccgatggtggtgtggttaacctggatgaggatagtgacgaggaaatggaggatattacggagcacaaggagccggccaagcccaccgaaaaggcagccaaaccggcttcctctagtggtggtgaatcctccgacgatgctgttctgatagcctccgattcggatacggaatccgcagctccaccgccgccagtaaagaagctcccgccagttgtcaaggccatcccgcccccgcccgtgcaggatgatgaggatgatgatgatgacgacgactgcgtcgtgattgaagatgacacaccgctaagtatttcgcccagcggcaagcgcaagagcgacctagatgacctgcagctgcaacagcccagccacaagagacagcgaagttcgacgccctcgggaatgggccagctgaccattaaggatgcccgctcgttgatgcctctcgatggcagtccgagctctgtgtcgggtccccgagattctatctacccggtgaccataacgaatgctgtgacgggagcggccaccaatctgggtgttgtgccgcctaagctagttcccatggcgggcggcatgagcgccagtccagtgcagctgaatccgccaacgttatcgcttaccgggctgcccagcatgaccaacaacgccaacctgctgcccggtctcactgacgacatgtttgtcctggaagcgccctccttcattgtaccctacatctatgaaaagccaccacgcgaaaacatctgcgaggtcgtcaaagcaattgagaccaagtatgcgctgtcggctgaggatttggccgaggcagacaagggcgacgagttcgacatgatgaccgagcaaaacaaagaggacaagccagcggatcaggccgatgaaagcggcaaaaagaaaaagaaaaagcgaggtgacgacgagtcctggtcggagcagtctgacgatgatgacgacgaagacgacgacgacgactcggagtcgggcgtacggactaaggtgctgatcaaggaggcaaacgatgacctgagcgccttgaaggtggccatcaagcccgccgctgccttggcaacagcgggcggagtgtcggtaaacaatccgggcggcaacaagccaggacaggagaactactttgagagtccgttgggcaagttcttcatggacattggcgtgggtctggtgcaggagtacgtgcagtcggatctgctgcgtctgcagaagcgcaagatgcgcaaggcgcaggtgcaaaattccaaggagtttgaaatggccatcaatgcgctctctggcaacctgcaggcatccaagacgaaaaacgcgcccttcaagttccggatgaagcgatgcgagttctgcaactttaagtcggagtctgccatggcgatggctaatcactacgagacgccgcacatgaacggagtgctgtacaagtgtaacttctgcacgtttgagatacggaacgccacggagattgtctaccacatggaggctgtgcacaacataaaggcgcgccttataaagccactgccctaccaccagtgtcccaactgcggctttgaggataatggcaaggcaaagctggcccgacatcagcccgtctgcgctaagaagttccggccggagcttaacctggcgccgccaaacgactgggaggcaccggctaagataccgcgcattaagcctcgtcatggtcttgtgggcactgccaccgcctatcaggctatggcagcacaggcggcggcacaaaaggccgctttggccaacatccagcagcagcaagcggcggcgcaggcgaggaataacctccaggcagccgcgttagctgcccagaatgcggccaagatgcgtcagcgagccccgcagccacccaaacagaacatagtgcgaaatccggcgcctgtgcgcggaggcaacgcgatgaatgcgggactctcgttacccaacagctatcagctggcagccggacagcttgtccaggcatccaagaagccgatggccggacagcccagcatctcgataacgccattacctcgtcagagctcggtgggcgccggtgcgggtgcctcgtccagcaaagcgccccaagcggcagcaggaatgaagcccggccagagtcccagcggtaacaataaggcgcaatttgttatttgcgagatctgcgatggctacatcaaggatctggagcagctgcgcaaccacatgcagtggatgcacaaagtgaagattcaccccaagatgatctacaataggccgcctttgaattgccaaaagtgccagttccggttctttacggatcagggattggagcgacacttgctgggctcacatggcttggtcacaagttccatgcaggaggctgccaacaagggcaaggatgctggtcgctgtccggtctgtggaaggatgtaccaatggaagctgctgaatcacgtgtcgcgcgatcatcatatgaccctgaagcccgctcacctgtcctacaagtgtaccgtttgcacggcgaccttcggcatgtacaaacagtttgagacgcacgtttacaccgcccacagtaccgtggccagaaaagcgatggacagcaagaagaacagtgcgcagtccagcgggtcgggatctggggcagggatgtcgcgcagttcgctgggagcggccaatgactctctgttgaagccgcttaagatcaacgatgagatcaccatcataccacagcccgcatcgaagccacgcatcacaaatatggagagtcatgtcatagattaaagagcatgttggatcaaccaaaaacctaatctcgcaacgtttgcagcattgacagcgctttaacattagtttcgtttttaagccgaacgcgacattggcgcctcacggtcccgctcctttacttctgtaagtcggatgtcggtatgcagaacaagaaaataatcagaaattggggcggatggtgagggaaaagcagagtggcaaaagccgtcgccgttgaagccgttgaccacctgacctgataaaacgagggacaagccagcgtcacttgctgcggctacaggatacgcgatacacataacgctaacggcatagattcactagagatactagttacggattttagttacatacgttttggagtgtgcacataag

SEQ ID NO: 28464 - protein, 1152 aa, DROSOPHILA; identical to SEQ ID NO: 645

SEQ ID NO: 28465 - DNA, 7621 bp, DROSOPHILA
cgtgatgcagtgcgttgctctccaagcaatctataaatacgtatactctagatctacttagttttatggcttcacacttaagtacctacagtgctagaaaagactggacgaggacaagagatcggcaacattgccgtggtcacatcacaaggttggaatttcacttttctatggcaaagtaaaaataaatttcgcattagtgctaggtaaatgaggcgtctctcttctttccaactggtgttatctggtcttcggattgtgcgaggtggtcatagtcatgtgagtggcgaatgctaaaagcatttccatcacttctcacctctgacgtcggcggatggtggagttgagcaaagtcggaggcccggctggagccccttgaggtgcaatgaaaatctgctctggtcgtagcattttatattaactaagtttttaattttctcattttcagtttgtttgttgttgtttgcttgcttggttggttggttggttggttggttgtgtgtgtgtggttttgcattataactgtagtacatggggatcttaggtggtaatagatgatatatattttaatattaatagataatgtgtaatataaatataagtttaaacttgtacacaaaaattaaaatgtcgaacgtctcgtcgtctctcagatcagtttagaagagtccttcccccccacgcttcgcttcatgcaacttcctcctctctgcctcatcatcatcatgactgttcgtacaaataagctagaagattcgagagaagaacgaagcgaggcacgtcatctatctgcggggcggggaccttttcaaaatgtatatacatactgcaacacacatttggatactcgtagttctcgtataaatagtttagtttttaactaatttacatagtcatcatgctgacgatgcgctctggcggcttcttcataatatgctttaaatatagttaaatatatatgtatgtatgtggtatattttagtagtagctacaacttcaacttatgtgcacactccaaaacgtatgtaactaaaatccgtaactagtatctctagtgaatctatgccgttagcgttatgtgtatcgcgtatcctgtagccgcagcaagtgacgctggcttgtccctcgttttatcaggtcaggtggtcaacggcttcaacggcgacggcttttgccactctgcttttccctcaccatccgccccaatttctgattattttcttgttctgcataccgacatccgacttacagaagtaaaggagcgggaccgtgaggcgccaatgtcgcgttcggcttaaaaacgaaactaatgttaaagcgctgtcaatgctgcaaacgttgcgagattaggtttttggttgatccaacatgctctttaatctgcaaagacaaaaacaaattattaaaatattatcataatgttactctaaacattttcaatccattgatctggaaaatcacgtacctatgacatgactctccatatttgtgatgcgtggcttcgatgcgggctgtggtatgatggtgatctcatcgttgatcttaagcggcttcaacagagagtcattggccgctcccagcgaactgcgcgacatccctgccccagatcccgacccgctggactgcgcactgttcttcttgctgtccatcgcttttctggccacggtactgtgggcggtgtaaacgtgcgtctcaaactgtttgtacatgccgaaggtcgccgtgcaaacggtacacttgtaggacaggtgagcgggcttcagggtcatatgatgatcgcgcgacacgtgattcagcagcttccattggtacatctaaagggagagcggcgattttagacattgttttcatcgtccatttatacgaaaaactcacccttccacagaccggacagcgaccagcatccttgcccttgttggcagcctcctgcatggaacttgtgaccaagccatgtgagcccagcaagtgtcgctccaatccctgatccgtaaagaaccggaactggcacttttggcaattcaaaggcggcctattgtagatcatcttggggtgaatctgttgcaaaacaaagcatttgttagcaaaggggaaaatcggggaaaatggaaactcagctctaccttcactttgtgcatccactgcatgtggttgcgcagctgctccagatccttgatgtagccatcgcagatctcgcaaataacaaattgcgccttattgttaccgctgggactctggccgggcttcattcctgctgccgcttggggcgctttgctggacgaggcacccgcaccggcgcccaccgagctctgacgaggtaatggcgttatcgagatgctgggctgtccggccatcggcttcttggatgcctgtataaatagatcgatattcgattaaaaccggtttttaatgggagagtctattttggtacagctaaacatgctacacatataccctttaaaacccaattccaatgtttaaataatttaatgtagattatagagcgtataaatgtagtttacctggacaagctgtccggctgccagctgatagctgttgggtaacgagagtcccgcattcatcgcgttgcctccgcgcacaggcgccggatttcgcactatgttctgtttgggtggctgcggggctcgctgacgcatcttggccgcattctgggcagctaacgcggctgcctggaggttattcctcgcctgcgccgccgcttgctgctgctggatgttggccaaagcggccttttgtgccgccgcctgtgctgccatagcctggaagggattaaaccgattataaacttattgcaaaagacttaggtgtagatattcctacctgataggcggtggcagtgcccacaagaccatgacgaggcttaatgcgcggtatcttagccggtgcctcccagtcgtttggcggcgccaggttaagctccggccggaacttcttagcgcagacgggctgatgtcgggccagctttgccttgccattatcctcaaagccgcagttgggacactggtggtagggcagtggctttataaggcgcgcctttatgttgtgcacagcctccatgtggtagacaatctccgtggcgttccgtatctcaaacgtgcagaagttacacttgtacagcactccgttcatgtgcggcgtctcgtagtgattagccatcgccatggcagactccgacttaaagttgcagaactcgcatcgcttcatccggaacttgaagggcgcgtttttcgtcttggatgcctgcaggttgccagagagcgcattgatggccatttcaaactccttggaattttgcacctgcgccttgcgcatcttgcgcttctgcagacgcagcagatccgactgcacgtactcctgcaccagacccacgccaatgtccatgaagaacttgcccaacggactctcaaagtagttctcctgtcctggcttgttgccgcccggattgtttaccgacactccgcccgctgttgccaaggcagcggcgggcttgatggccaccttcaaggcgctcaggtcatcgtttgcctccttgatcagcaccttagtccgtacgcccgactccgagtcgtcgtcgtcgtcttcgtcgtcatcatcgtcagactgctccgaccaggactcgtcgtcacctcgctttttctttttctttttgccgctttcatcggcctgatccgctggcttgtcctctttgttttgctcggtcatcatgtcgaactcgtcgcccttgtctgcctcggccaaatcctcagccgacagcgcatacttggtctcaattgctttgacgacctcgcagatgttttcgcgtggtggcttttcatagatgtagggtacaatgaaggagggcgcttccaggacaaacatgtcgtcagtgagaccgggcagcaggttggcgttgttggtcatgctgggcagcccggtaagcgataacgttggcggattcagctgcactggactggcgctcatgccgcccgccatgggaactagcttaggcggcacaacacccagattggtggccgctcccgtcacagcattcgttatggtcaccgggtagatagaatctcggggacccgacacagagctcggactgccatcgagaggcatcaacgagcgggcatccttaatggtcagctggcccattcccgagggcgtcgaacttcgctgtctcttgtggctgggctgttgcagctgcaggtcatctaggtcgctcttgcgcttgccgctgggcgaaatacttagcggtgtgtcatcttcaatcacgacgcagtcgtcgtcatcatcatcatcctcatcatcctgcacgggcgggggcgggatggccttgacaactggcgggagcttctttactggcggcggtggagctgcggattccgtatccgaatcggaggctatcagaacagcatcgtcggaggattcaccaccactagaggaagccggtttggctgccttttcggtgggcttggccggctccttgtgctccgtaatatcctccatttcctcgtcactatcctcatccaggttaaccacaccaccatcggagggagctattgccgccctggcctctgctatgctggcttggccgttctccttctggttgggactggccccaaacccattctcctgctttgctgggggctcttcctcgacgaccccttcgctagctacgctctcctcgccatctaggtgcgctttcttcccgctggccagttcatcgtcaggaactgtgactgctcccaggggatcttcggcctcgcagctgttttccgctgtgctaccgatcttttgggcatcgtcttcgtcctctggctcgtgatctccatctccgtttgtggtagcctcctcgtcttcttcatccagttttggctccttcgagctgctgctggtaatctgtgagtcttcgtcgtcgttctccacttcgttttcctccacgtcttcggtcccgtccacctccattatctcgtcggccactggagcttgtggagatgcctgggcaacatcctctttactgatatccttgccgcccgcggaaagcagctcgagcttttcattggagggggcctccggcaagtgcacatcttcctcctgctgctcctcgaccacctgctcttcatcgtcctccacagttgtgacctgctgctcaacatcatctgctgatggtttactctgttttggggaacttgatgcgctggcaagctttgtcgtgggctcggccacgccctccggcaaaacgacatcaacttcagtcatttgaggtccgttctctgctccgtggaatgtgcccaagtcggtttttcttccagctgtttgtgtttctgcaagagacacaataaaattgaagaattatcaaaactgagttgggaatttaaatttttacttaattttacttaatggcagcttcttcttaagaccaaccggaaaaattggcacgtaaaagaaaactaaagtatcaaaaagcaacgaatgagcagcacaaagcgcagcgggcgaagagtaaaaataaaaagagctaaaactgcagaaagaggacggcgaaggggcgaggcgaggcgaaaaattaacaatcaccgaaaaatatttgaaaatctaggtgaattaagaaggtgaactcaagaaaaggcggaccaaaaacagggcagcagcggtagggcaaggggagcgggggaagttgaaagaatggtttgatacaaaatggctgccatattggattaaaactaaaatacaatttaatatgtaatgtaagtatgtaaatggctttacactgcaagaaaaaagagaatgcagaaacgggggggggagttatggtttggcgatatatgcaatttatatactttggtattaacacacttgcctataaatatatattaaacatatatttatatatgtttatgtgaaatgtttgtatgtacaaacgaacagttaccgagcagagccaacaaaacgattgacatacatacagacacaaacgcacacacaccgcctgcacacacaaatatacaatctatatatacggcacatatatatttgtacgcttgtaagcacagggggagggacgcagggcggggggcggcacggatgacgacgtttggctttagctttattttttgtagttgtttttgttgctcggctggcggcgtggtggagtatactaccgctgttgttgctggtgttgttgttgtactttttggtacaggagcgtgtttttgcgctagtgtttgtccctgtgtgcgtgtgtgtgccgcgcttgcttgcgtatgtgtgtgtgttttttctgctgctatgttggatctcaccttacttttcaatattctaggtttctttcaaactaaagacgattttcagcggcatttagcattgtttttgttacttggcggcacttacattcacattttcccctcacaatcggcaggttgttgttttgtttcgcctcccttttggtcccttgatcacaataaacaaaaaacagagctgccaataaatgaaagatcgttttctttacgaaataaccagggaaaatccgaaaattttgcgtggggtttttttaattggagaaaaaaaactgagcagaaagaacgccgaaggcggagacacaagagacgaggaacgaacaagcaggcaaggcaaactggaaatgtgtgaggcggaaaaagcaaaaacagagttgcaacgaacagcagggcgcgcgcagggttgcacggcttatcggttatcgattaccggccatcgatagtgagccacccaaaggtgccaattgctgatttcgcaattaatttttaatttaattcatattttcgctcattttccttctctagtaacggtaatagcttttacattgccggctatggagagggctctctttcacttgaacgcctctcaaaaatagcgaataagcgtgtgaagcgcatggcccgcacacatgggcctttgtgcatgtgtgtgtgtgtgcatgaatggaatggcgtggaatgggagggaaaacaaatttgacaattgtacgcgcgccacgaacgaaatgaacaaaacaaaactgaaacggcattgcttgtcgccggttttactttgatggatttatgcgaatcggcatgtgcggaaattcaaacagagcgcgcgaaaaagtctagatggctttaaatatcgcagataaatatggcaaattgcaactcccccgccgccgcacccctctcaccaacacactcactcatactagcacacacactagcgtcttaaactgtatactcatcacgatacttttgctgatgcttcttctttctcctccaacttatttcagattacgctgtccctctctttcgcacccacggccccggggtatatacaatcgtacatatctatctatatgtatacatacaactaaatatgtatgtccgtatgtaagtcgccctatgcatgtgtgcgtgtgtgtgtgactgtgcgatttggtctatatgcaagtacaaaatttgaaagtaacccgcttctggcgcattttccatccccgtcccctgacctctgcccaccccctcccccatgatcgacaacttggtagaggtcgaagggcatccggagcaaggagcaagccacctaaccaatcgccatcatcattaaagaccccgaa

SEQ ID NO: 28466 - DNA, 4130 bp, DROSOPHILA
cttgttcgttcctcgtctcttgtgtctccgccttcggcgttctttctgctcagttttttttctccaattaaaaaaaccccacgcaaaattttcggattttccctggttatttcgtaaagaaaacgatctttcatttattggcagctctgttttttgtttattgtgatcaagggaccaaaagggaggcgaaacaaaacaacaacctgccgattgtgaggggaaaatgtgaataaacacaaacagctggaagaaaaaccgacttgggcacattccacggagcagagaacggacctcaaatgactgaagttgatgtcgttttgccggagggcgtggccgagcccacgacaaagcttgccagcgcatcaagttccccaaaacagagtaaaccatcagcagatgatgttgagcagcaggtcacaactgtggaggacgatgaagagcaggtggtcgaggagcagcaggaggaagatgtgcacttgccggaggccccctccaatgaaaagctcgagctgctttccgcgggcggcaaggatatcagtaaagaggatgttgcccaggcatctccacaagctccagtggccgacgagataatggaggtggacgggaccgaagacgtggaggaaaacgaagtggagaacgacgacgaagactcacagattaccagcagcagctcgaaggagccaaaactggatgaagaagacgaggaggctaccacaaacggagatggagatcacgagccagaggacgaagacgatgcccaaaagatcggtagcacagcggaaaacagctgcgaggccgaagatcccctgggagcagtcacagttcctgacgatgaactggccagcgggaagaaagcgcacctagatggcgaggagagcgtagctagcgaaggggtcgtcgaggaagagcccccagcaaagcaggagaatgggtttggggccagtcccaaccagaaggagaacggccaagccagcatagcagaggccagggcggcaatagctccctccgatggtggtgtggttaacctggatgaggatagtgacgaggaaatggaggatattacggagcacaaggagccggccaagcccaccgaaaaggcagccaaaccggcttcctctagtggtggtgaatcctccgacgatgctgttctgatagcctccgattcggatacggaatccgcagctccaccgccgccagtaaagaagctcccgccagttgtcaaggccatcccgcccccgcccgtgcaggatgatgaggatgatgatgatgacgacgactgcgtcgtgattgaagatgacacaccgctaagtatttcgcccagcggcaagcgcaagagcgacctagatgacctgcagctgcaacagcccagccacaagagacagcgaagttcgacgccctcgggaatgggccagctgaccattaaggatgcccgctcgttgatgcctctcgatggcagtccgagctctgtgtcgggtccccgagattctatctacccggtgaccataacgaatgctgtgacgggagcggccaccaatctgggtgttgtgccgcctaagctagttcccatggcgggcggcatgagcgccagtccagtgcagctgaatccgccaacgttatcgcttaccgggctgcccagcatgaccaacaacgccaacctgctgcccggtctcactgacgacatgtttgtcctggaagcgccctccttcattgtaccctacatctatgaaaagccaccacgcgaaaacatctgcgaggtcgtcaaagcaattgagaccaagtatgcgctgtcggctgaggatttggccgaggcagacaagggcgacgagttcgacatgatgaccgagcaaaacaaagaggacaagccagcggatcaggccgatgaaagcggcaaaaagaaaaagaaaaagcgaggtgacgacgagtcctggtcggagcagtctgacgatgatgacgacgaagacgacgacgacgactcggagtcgggcgtacggactaaggtgctgatcaaggaggcaaacgatgacctgagcgccttgaaggtggccatcaagcccgccgctgccttggcaacagcgggcggagtgtcggtaaacaatccgggcggcaacaagccaggacaggagaactactttgagagtccgttgggcaagttcttcatggacattggcgtgggtctggtgcaggagtacgtgcagtcggatctgctgcgtctgcagaagcgcaagatgcgcaaggcgcaggtgcaaaattccaaggagtttgaaatggccatcaatgcgctctctggcaacctgcaggcatccaagacgaaaaacgcgcccttcaagttccggatgaagcgatgcgagttctgcaactttaagtcggagtctgccatggcgatggctaatcactacgagacgccgcacatgaacggagtgctgtacaagtgtaacttctgcacgtttgagatacggaacgccacggagattgtctaccacatggaggctgtgcacaacataaaggcgcgccttataaagccactgccctaccaccagtgtcccaactgcggctttgaggataatggcaaggcaaagctggcccgacatcagcccgtctgcgctaagaagttccggccggagcttaacctggcgccgccaaacgactgggaggcaccggctaagataccgcgcattaagcctcgtcatggtcttgtgggcactgccaccgcctatcaggctatggcagcacaggcggcggcacaaaaggccgctttggccaacatccagcagcagcaagcggcggcgcaggcgaggaataacctccaggcagccgcgttagctgcccagaatgcggccaagatgcgtcagcgagccccgcagccacccaaacagaacatagtgcgaaatccggcgcctgtgcgcggaggcaacgcgatgaatgcgggactctcgttacccaacagctatcagctggcagccggacagcttgtccaggcatccaagaagccgatggccggacagcccagcatctcgataacgccattacctcgtcagagctcggtgggcgccggtgcgggtgcctcgtccagcaaagcgccccaagcggcagcaggaatgaagcccggccagagtcccagcggtaacaataaggcgcaatttgttatttgcgagatctgcgatggctacatcaaggatctggagcagctgcgcaaccacatgcagtggatgcacaaagtgaagattcaccccaagatgatctacaataggccgcctttgaattgccaaaagtgccagttccggttctttacggatcagggattggagcgacacttgctgggctcacatggcttggtcacaagttccatgcaggaggctgccaacaagggcaaggatgctggtcgctgtccggtctgtggaaggatgtaccaatggaagctgctgaatcacgtgtcgcgcgatcatcatatgaccctgaagcccgctcacctgtcctacaagtgtaccgtttgcacggcgaccttcggcatgtacaaacagtttgagacgcacgtttacaccgcccacagtaccgtggccagaaaagcgatggacagcaagaagaacagtgcgcagtccagcgggtcgggatctggggcagggatgtcgcgcagttcgctgggagcggccaatgactctctgttgaagccgcttaagatcaacgatgagatcaccatcataccacagcccgcatcgaagccacgcatcacaaatatggagagtcatgtcatagattaaagagcatgttggatcaaccaaaaacctaatctcgcaacgtttgcagcattgacagcgctttaacattagtttcgtttttaagccgaacgcgacattggcgcctcacggtcccgctcctttacttctgtaagtcggatgtcggtatgcagaacaagaaaataatcagaaattggggcggatggtgagggaaaagcagagtggcaaaagccgtcgccgttgaagccgttgaccacctgacctgataaaacgagggacaagccagcgtcacttgctgcggctacaggatacgcgatacacataacgctaacggcatagattcactagagatactagttacggattttagttacatacgttttggagtgtgcacataag

SEQ ID NO: 28467 - protein, 1152 aa, DROSOPHILA; identical to SEQ ID NO: 645

SEQ ID NO: 28468 - DNA, 4973 bp, DROSOPHILA
acttacgactgtagcaaatattaaaatgcatttttttttttttttgattatagataatacttggaagtggtatttatttgtcatgcgctattcatatctggcattttccttattaagagtcaccccgttaaattaaatcaaattgaagatttcgccagccattgcgtgagaagttgccccattccgaggcacatacgtagctttgggtcgcggccatcaatcaatggcgtagcacggcacgcctataatctcgaatccccatatatacccactgtacaacgccgtggtgcgcttatcaatccaattgagtgcgctgttattaataacaatacccgtgctttatattaaacgcgttgactgttgcatcaacgcccctcagaagcacacagcgcgtcaataaaagttggatgagtaatcccagtggactcgggttaccaactgccagtggaatgcatatgtaaaaacaaacaagccagccaccatttacggtcattaaaaacatataaaataatttattctgcttattaatttgtttaataaatatacaatatataaaactgcgggttagtcgcgcaagtccgcacaagtgtggtaaaaaatggacttaagtagtgtaactttaacgctgtgttagaaacagacaacacagagaacacaggacattgacttggacttgttttgggttaagattgctctggcgaaggcacaacatcgttatcataatcgttatcagcgtggtgattgttattagtctagaattccatttccattaacacttatacacgaacgctttcgatttgggtgggttgactgactgggttgattaaaaatgtaggtaatcgttggacaacttcttggacaacttggacaacacaaatttaagagacttatacttataaagttaattatttttttttttaggtaaatgccgacaaaagaaaaccaacttctggtgtcggacactagtccgtcaaagttgtttacaaaatatatacgtatttaggttgataaaccgaacagaaaaaaaacattgagaaactaacaactagagttacgaagaagttgcttggtgtggtccacagattaccagtcaacccataaatcaacgcaccctacattaggtaaatatatgtagataaaactgtagaacatgcgacgaggtttgtgcttggcactcaagactccagtccaatgctccagactgcgccaatccgtttacgaccagccgcccgtcagcttgtggaacatctcctcgttcagcgtctggttgttctccttggatcgcatggacatgaatatgtagccgccgatgaactcgtgcaccaccttacagtcggccgactgcacggagaagacgatgttctcgtcctgcagctgaatcatcatgcacttgatgccccagttaacattccaggccttcattgtgttgtagcgccaggtctttatgtgatcgccggtgttgaggtccatgcgcatgatacgattgttggccacgcccaacagctcctccttcttgtgtccatcgaacttgatgatgaagagagtaacaccgaagtctggtagagattgccaagcctggatgtacttcatcttggcgtccattaagctcagctggcgaacgttggcatgggcctctaggatcctctgcaccgccttgctggatagtttgcgcatcattttgggcgataggtaatccatgggctcaacacttcgcgggttgacggtgagcggagctccctgggcgggtttctgcatctgcagcagcgagcgaatactgctaacttcgctgtcgtaagagctatcggctagagagcgacccttggcggccagacgacaggctgccatccacttggcgtactgctcttcgttgtcgcatctcacccagacctcactgttcggaccatttctgatctctgacggaacttccagacggatggcgaactttccttgggccaggttaacatcgggcgtcacctcgcagcccttcaaattgatgctgatggtgggagctccccgcctggactcatcctgcgatttgtaaaggtgcagatgcagatccctgtaggtgaagaagtagcgcttgtatcctttaagggtgaacctttgaggcttgaggaatttcaaatagtccgacagctctggtatcctggtgatgttgccctgatccttgccacctcctggtccttcgagtgtgatctgcagctcgttgagagcggagtcaatgtcgtcctcgccgccagtctcctgactggaggtatctattccggaatcgatgcctgggggatgcagatccgtctgatgattcacctggaactgcagggcggcaaacatgagggtctcctcctcggtgggttccaattcctcgttcaaaatgctccatttggcttgctcgtacagttgattgatcctcacttggtcgtacttggggttcagatcgaagaacgtgaagtatttgaagcgcaggcacagagtgtcatactccctaactccctgctccatgatggaaagggacgagtccaaccatcccacgttgagacgggctttctccacccgggacttgggtcgaaccaagcgtgctcgtacatccggactgggcgaccttggcgacatggccagattctcctggaggtctccgaaactagagttggaatcgtagctagcatagccagtggagttgtgcttccaggtgcccgtgggcgagctgatgggtgttcccggagcagtggctgcccgtcgggtatacggtgaagccggagcgcacagcagattgccattgtgcgagcgatccaggctgccattgctaccgttataggctcctgtgatcgggacaaaggagttggtgtccagcgctggctgcacgtatgcgattccatttgcctccgccaccggaatctttcgctgcggcagcttggagaagttcttcttcagatgctccggttccaggggcttgcagaaagacagttcctccggatagcgaatgtccaggtccttgcacaagctcacaacggctccgaaagttttggccgaaaagttgacgcggtagtccagataacgaagatcgggcatctgcaccctcagtgtcttgtgcatgggcgtgaagtgcagaaaggaatccgattgaactccggcctggtccaaagtggaccgcgtcctggtcagccagatattcttggcgggccaccacagggcgtgatcggaccaatccttgggcaactccggatccaccaggttcagcattacgccgccaatgtgctggtcacccttcacgcgcagcgtcttctccacctgcagatccgtgatgaggatccgcaggttccacgtattttcgcccacatgaatcatctttcgctaaaagttccgatgcgcgggcgtctcttctgtccaaaggcgaaactataactgcgggtatatttgtatagtgtatatatatggcacaatcagagtctaaatttgccctcgaaacgatgacgtaattcaacttacgttcagcaccgtttttgcaaccaagtttttgttgttcttgtcgttgtcgttggctggcggggagcggagagggggggactgcgactgtggcggtggcgaaactatataggcccttatctcgccagatgtttgcacggaaacagaaacgccagcgaaacagacccaacaatccaacaagccgagtaatccagatcaaaatcgttggatgtagagatggtggtggtatgtatgatgataaaagggggggagaggcggggatgtacggatcacttgattaacacacgcccaaggttacgattttgatggcttgcttgctgctgcttgggatgttttgttttcccgatctctctagcaatcgcaattcgcagcgttttcctcgctcttttcctcgcacatcaacacaccgacgaacactaatgcacgcgctcaaaaatgcgatgcaaattttcacaaaacaacacgtcgcgggcgacgagacaaagcgaacgagccgagatagagagaaattaatttataaataaaccagcagcagagcagtatgaccgtttgtctgcgcatatcgatggttcgcgccagcgaaatcgaacttatcggaacggatggtaagaagtatagtttaaattttgttaaaaattacatcgaaaattaagcaataccatttaccgttaattctcgtgcttagttttttgttattaaacttactgcaagagatattaaccaccatacattcttataaattctactttcacaattgaaccgtggatagggcatacctaatacattagattcgcatgatttaatataattcgtattcgacttgaaacgaatttgtgtatggcaatctattgtattgtatcaattgtattgtatcataatatcggacaggcaaagaacaatgaagtcgtggagattggcactattgttcctcatttatttcttcgaattggcttattccatacgtacctgtggcccaggacgagaaaggaactgtcatattaatactaagcaaaaatatcaaaggccgaaacattattaacgtaaccacatgttaacagtaagcacatattttaaaatgagggtacaaatatgaaaagtgtatcgatatttatttttttccagaaatgggggtcacaccggcccaatggtcatctctaagttatcgtaacgaaaaatatagttctgttgttttaataattttagtagaaagcaaatctgctattatgaatatcaatttaaattaacgcatgttccagttaactaatttgttataaagcaaaagtacatgcatatataaaaacaatactggtttttctcctcctctctcgctgtttcgctctttccgctctttttctccacaccgcattcgtaaacaaagacaatgaaagctccagttgaacggctaaagaggcctcaaagcccccagattgtttttcgccgttgagccgagcgcacgtattcgaaaaaacaactaatagtgtataatagtgcag

SEQ ID NO: 28469 - DNA, 2889 bp, DROSOPHILA
ctcgttcgctttgtctcgtcgcccgcgacgtgttgttttgtgaaaatttgcatcgcatttttgagcgcgtgcattagtgttcgtcggtgtgttgatgtgcgaggaaaagagcgaggaaaacgctgcgaattgcgattgctagagagatcgggaaaacaaaacatcccaagcagcagcaagcaagccatcaaaatcgtaaccttgggcgtgtgttaatcaagtgatccgtacatccccgcctctcccccccttttatcatcatacataccaccaccatctctacatccaacgattttgatctggattactcggcttgttggattgttgggtctgtttcgctggcgtttctgtttccgtgcaaacatctggcgagataagggcctatatagtttcgccaccgccacagtcgcagtccccccctctccgctccccgccagccaacgacaacgacaagaacaacaaaaacttggttgcaaaaacggtgctgaacttatagtttcgcctttggacagaagagacgcccgcgcatcggaacttttagcgaaagatgattcatgtgggcgaaaatacgtggaacctgcggatcctcatcacggatctgcaggtggagaagacgctgcgcgtgaagggtgaccagcacattggcggcgtaatgctgaacctggtggatccggagttgcccaaggattggtccgatcacgccctgtggtggcccgccaagaatatctggctgaccaggacgcggtccactttggaccaggccggagttcaatcggattcctttctgcacttcacgcccatgcacaagacactgagggtgcagatgcccgatcttcgttatctggactaccgcgtcaacttttcggccaaaactttcggagccgttgtgagcttgtgcaaggacctggacattcgctatccggaggaactgtctttctgcaagcccctggaaccggagcatctgaagaagaacttctccaagctgccgcagcgaaagattccggtggcggaggcaaatggaatcgcatacgtgcagccagcgctggacaccaactcctttgtcccgatcacaggagcctataacggtagcaatggcagcctggatcgctcgcacaatggcaatctgctgtgcgctccggcttcaccgtatacccgacgggcagccactgctccgggaacacccatcagctcgcccacgggcacctggaagcacaactccactggctatgctagctacgattccaactctagtttcggagacctccaggagaatctggccatgtcgccaaggtcgcccagtccggatgtacgagcacgcttggttcgacccaagtcccgggtggagaaagcccgtctcaacgtgggatggttggactcgtccctttccatcatggagcagggagttagggagtatgacactctgtgcctgcgcttcaaatacttcacgttcttcgatctgaaccccaagtacgaccaagtgaggatcaatcaactgtacgagcaagccaaatggagcattttgaacgaggaattggaacccaccgaggaggagaccctcatgtttgccgccctgcagttccaggtgaatcatcagacggatctgcatcccccaggcatcgattccggaatagatacctccagtcaggagactggcggcgaggacgacattgactccgctctcaacgagctgcagatcacactcgaaggaccaggaggtggcaaggatcagggcaacatcaccaggataccagagctgtcggactatttgaaattcctcaagcctcaaaggttcacccttaaaggatacaagcgctacttcttcacctacagggatctgcatctgcacctttacaaatcgcaggatgagtccaggcggggagctcccaccatcagcatcaatttgaagggctgcgaggtgacgcccgatgttaacctggcccaaggaaagttcgccatccgtctggaagttccgtcagagatcagaaatggtccgaacagtgaggtctgggtgagatgcgacaacgaagagcagtacgccaagtggatggcagcctgtcgtctggccgccaagggtcgctctctagccgatagctcttacgacagcgaagttagcagtattcgctcgctgctgcagatgcagaaacccgcccagggagctccgctcaccgtcaacccgcgaagtgttgagcccatggattacctatcgcccaaaatgatgcgcaaactatccagcaaggcggtgcagaggatcctagaggcccatgccaacgttcgccagctgagcttaatggacgccaagatgaagtacatccaggcttggcaatctctaccagacttcggtgttactctcttcatcatcaagttcgatggacacaagaaggaggagctgttgggcgtggccaacaatcgtatcatgcgcatggacctcaacaccggcgatcacataaagacctggcgctacaacacaatgaaggcctggaatgttaactggggcatcaagtgcatgatgattcagctgcaggacgagaacatcgtcttctccgtgcagtcggccgactgtaaggtggtgcacgagttcatcggcggctacatattcatgtccatgcgatccaaggagaacaaccagacgctgaacgaggagatgttccacaagctgacgggcggctggtcgtaaacggattggcgcagtctggagcattggactggagtcttgagtgccaagcacaaacctcgtcgcatgttctacagttttatctacatatatttacctaatgtagggtgcgttgatttatgggttgactggtaatctgtggaccacaccaagcaacttcttcgtaactctagttgttagtttctcaatgttttttttctgttcggtttatcaaccta

SEQ ID NO: 28470 - protein, 708 aa, DROSOPHILA
MIHVGENTWNLRILITDLQVEKTLRVKGDQHIGGVMLNLVDPELPKDWSDHALWWPAKNIWLTRTRSTLDQAGVQSDSFLHFTPMHKTLRVQMPDLRYLDYRVNFSAKTFGAVVSLCKDLDIRYPEELSFCKPLEPEHLKKNFSKLPQRKIPVAEANGIAYVQPALDTNSFVPITGAYNGSNGSLDRSHNGNLLCAPASPYTRRAATAPGTPISSPTGTWKHNSTGYASYDSNSSFGDLQENLAMSPRSPSPDVRARLVRPKSRVEKARLNVGWLDSSLSIMEQGVREYDTLCLRFKYFTFFDLNPKYDQVRINQLYEQAKWSILNEELEPTEEETLMFAALQFQVNHQTDLHPPGIDSGIDTSSQETGGEDDIDSALNELQITLEGPGGGKDQGNITRIPELSDYLKFLKPQRFTLKGYKRYFFTYRDLHLHLYKSQDESRRGAPTISINLKGCEVTPDVNLAQGKFAIRLEVPSEIRNGPNSEVWVRCDNEEQYAKWMAACRLAAKGRSLADSSYDSEVSSIRSLLQMQKPAQGAPLTVNPRSVEPMDYLSPKMMRKLSSKAVQRILEAHANVRQLSLMDAKMKYIQAWQSLPDFGVTLFIIKFDGHKKEELLGVANNRIMRMDLNTGDHIKTWRYNTMKAWNVNWGIKCMMIQLQDENIVFSVQSADCKVVHEFIGGYIFMSMRSKENNQTLNEEMFHKLTGGWS

SEQ ID NO: 28471 - DNA, 3241 bp, DROSOPHILA
ttgttgctgtgcacttgcttgttaatatttccatttccgttgttttatggcccgattccgaaaggcctagacatcgggaagacaaaggctacacgtgcatatagaatacaaggaggtacaaaatggaagtatattcgagttgagtgccccgctttacaaggacaataacaaggagcaacagcttcaagtgcacgagcaacaaatgaagccattacattcacaggcttatcggcaatgtcaacgagtctacctcgctttttgccaactcccgtccaacaaccaccacccatccattgtttgcataaaattgcaatttacaattatgagaaaaacagcagcgaggaaaatgatgacagagggcctcgcttatctgcggaaattttcgcttagataagctcaaacggcgaaatggaacagaaagaacttgtttgcattagctaaatgagacaaaaatttgataaattactaaagagcgggggttacacagggcaaaaatattacacttattacaattcctattatatagtttgtgcataagtgcggcacgttctaaagttatttttagcacatttattctgtgtgtacaaaaaataacgttaaatcgaagaaagggaatccccagttgcaccaagggaatgaggaaaagttgggaaaatgtaacttgcttccataattagacacgctgctcacacaagatggaggcataaattattgccagtcagtgtggagtgtgagggacttggcatcttatcattaaattagtttcggtggaggagggcagcttaaatgagagattattgcacaagcgagcgataaattacgcaaagccttatgaatgaggcctaaattcgcttgagttttggccagattgcccatagcaaaaatataacaatcaagtgaaagaaaataatgctcttcgttccatattcaaacagaatttgtagcattattttagagtcaaattaggcatagatattaattagaatataaactaactcacctccatatctgcaatttgtcttgtcagcgggtatattgccattcggttcgagtcggtccaagtattcctccgaattgtagccgttgtatggaactttgttaccgtggttgtggtgcccgccatgtccaccgcgatgatgatggtggtggtgatggtggtgcgtcgactcgtcgccatcttcgcgggaaattgaaacctcaattttcaccgtggaaggcgtgcagctttacacggagccaaatcgacagaataaatgaaaattaaagcaagtcctctctgtggatggcgtacgtttctactgttaggatccaaatcacccaatcaacatcctcctggactatcaatctgtcaatcaacctatcgcatcatccagcaatcgacagccatatataatgcaagaggaacttctcgcccgcgcagaagttttgtactataattctatgatactttttagttattagttcgatttcgcagtgagttagctgagggagtttagcagaagacacggcaccaacggcagcattttattttcagtcaaattgcttaaagttagtttagatttctgtagatttctcgccatcctgcagccgcgtcgtaaaggatactcagtttagtcaaagcgcagacacgtttttctgtattcttttgtaagctaacaaaaatttacatttaatggtagcttttagtgagtgaattgcctctgtggattacgcaatattttcgattgcaatgagtgagagataatcatcatgatgtttgatatgctcgtgtgtatttcgttttcattattttttcctttagtttttattcgatattttctacgcgaatgttcgactgcggagtgttgattaaaattgcaaatataaattcaattggttactgctttaatagagtgcaattaataaaaattaatgaattggcggcaatgcgccaaaaaaaaaaaatgaatcaattaatcaaataatgatgtgctcaaaaggtgtacgattatttccaagcaattactcaacttaaaattatgcacattttcaaattaagacttgtttagttctgctcacagctccttttaattgttggattgtataattttgtaacgtttcctttgtcattttaaaatatatcagttcgccgcgctgtttaagtgataattttataactattaaatgaatttatgtaaaaagcaagtaaatcaattattaacaatatgtaaaacaataaatttaaaccatttatacaatttatgtttgatttcgttttttatctttttattttaagttttaagtttttggttctttccacagatttgctgacgtgcggatgatgattaaattcctagaaacatttagtcaaaaatcaaaggtcgggaggaaggctgacggatcataaatcataacattttcgatgcaaacttaagcgaatagataaacaatttaactagcaaagaacgcaaaatagtagaatcaaatttttagcaatcaaccaaaagtaaattcgaaataaaatagccatcaactaaacactaaagtaacctaaccaagtattttacatagagttcgtagcgagaagtatcgaaaccaagcccaatccatttccataatctaagaaacgtaccgtatttggccaaaacgagaggacgcccgccgtattcgggttccacaaatcttaaagagaagttcaaatgagagctaacaaatgtgcaaattgaaatcaaagacacttcacatggttttgaaacaagtaaatgaatcaaaaacgatttgagtagaggaaactaatgcgtagaacaaaatatattatgaatatcgtaaaaatctatgagaaagacgagccaatttgagttgtaggcaatcaaattgctaagattctctgattaagacatgattataaggagatatcaagcccgttaagttagttgatacttaaatagctcgaacaaaactcgattagggccacgttttaatagcgctccaaaaccagattatattttgtagcaaaagtaaaagtcaaatttaaacaatggcgaatggaaaaccaaatatttcaaatgaataaactttttctgtgatttatgaaaaaagtatgcaaaaacacacactgaaatacactacagcaaggtaaacacaacacaaagtaaacaaaaacttaataaagataaagaattaggcactttagaaaacaaacgtagcagctggccagcaaaattgtttagaattgtttgctagccaagaagagcagtacatt

SEQ ID NO: 28472 - DNA, 3273 bp, DROSOPHILA
cgtgtgcgaaactcaaagcggcaggttgtgcgtcccggcgaaaatatcccgaaaataacttcccagaatttgcgagactttccgaaaaaaaagagtgtaaaagagtttccacatcagtctttatttctgatttttaaacatcgttgtgatagtttttcaatatcaagctggctttctttactagttttatgatttgtgtgctgcgcttatattatttgcactatttttagacactgccttcaaagtgaaactttgctaataaaatgtgaatgctgcaactgcttaggcgcttttcatagtatttagctgaaacgtgaaaccacttaaaagggatcaaaatcaacaaccacccctaacaaacaaccaccgtggaaaaagtcgaagcccgcaacaaaatgtgtctttcgagcggcaaactttttctgcggttcttgttgttgtctgtggtcgctagatttattgttgttttgtctgcagataatatttgacctcgtttacttgcaacttcggcgtcgccgtctgataaaaaaaacaaaaaagaattgataaacccatatatttatacgagagtgtgtgctgtgtttggagctcatatatatttgcatcggatttgtgacccagtgaaattcccgagtatccaggaaaaccaaagatatgtgtgccatcagcgagagtgttaacccaactaaataatcaattgaataacattgaaataaacttacctgtgcgcctgaaattcgtcttaaagcagaaacatggccgaattaatcagtcagcccactaaaattaacaacaataattttggtgccggcgtcacaatgcgcgagaaaaagggaggagcccttcagaagctcaagaagagactttcgcacagcttcggcagattaacaatttcccgcgaagatggcgacgagtcgacgcaccaccatcaccaccaccatcatcatcgcggtggacatggcgggcaccacaaccacggtaacaaagttccatacaacggctacaattcggaggaatacttggaccgactcgaaccgaatggcaatatacccgctgacaagacaaattgcagatatggagactggcgcagcacggacagcaccgaccaccacgatcgcgtccagagacagctttccgtgtcctccgacagcaagttgctcgacgaggacattcgcgaggagatgaagtaccattcgcacgtggtcatgcgtcccaagaagccgcccagacccaaatccgaggtctttctgaacaaacaggaaacgcatccgcgccggaaacgattcagtgcatttggtggcgactccccatttggcaagcaggaggcctatgttaaactcgagccgctgggcgaaggctcctatgcgacggtctacaaaggatttagcaaattaacctaccagcgggtggcgctgaaggagattcgcctgcaggaggaggagggagcacccttcaccgcgattcgcgaggcctcgctgctgaaagaactgaaacacagcaacatcgtcacgctgcacgacattgtccacacgcgcgagacgctgacctttgtctttgaatatgtgaatacggatctgtcgcaatacatggagaagcatccgggcggcctggatcatcgcaacgtgcgcctgttcctcttccagctgctccgtggactctcctactgccacaagcggcgtgtcctccatcgggatgtcaagccgcagaacctgcttattagcgactgcggcgaactgaagttggccgatttcggactggccagggccaagagcgtgcccagccacacctactcccacgaggtggtcacgttatggtaccgccctccagatgtcctgctgggcagcacggagtactcgacctcgctggacatgtggggcgtgggctgcatcttcgtggagatggtgaccgggatgccgacgtttccgggcatacgtgatacctacgatcagctggacaagatattcaaattgctgggcacgcccaccgaggacacgtggccgggagtcacccactttcccggctacaagccacacaagctgggtttctatcgaccacggaaactgggtcacaacttcccacggctatacgacatcatcgagggcgagacgatagctaacggcttcctgcaactgaatccggagcagcgtttgggcgccgatgatgcactgcagcatccgtactttgcgcagttgccaaagaaactctacgaattgccagacggtgaaaacctcaattttcaccgtggaaggcgtgcagctttacacggagccaaatcgacagaataaatgaaaattaaagcaagtcctctctgtggatggcgtacgtttctactgttaggatccaaatcacccaatcaacatcctcctggactatcaatctgtcaatcaacctatcgcatcatccagcaatcgacagccatatataatgcaagaggaacttctcgcccgcgcagaagttttgtactataattctatgatactttttagttattagttcgatttcgcagtgagttagctgagggagtttagcagaagacacggcaccaacggcagcattttattttcagtcaaattgcttaaagttagtttagatttctgtagatttctcgccatcctgcagccgcgtcgtaaaggatactcagtttagtcaaagcgcagacacgtttttctgtattcttttgtaagctaacaaaaatttacatttaatggtagcttttagtgagtgaattgcctctgtggattacgcaatattttcgattgcaatgagtgagagataatcatcatgatgtttgatatgctcgtgtgtatttcgttttcattattttttcctttagtttttattcgatattttctacgcgaatgttcgactgcggagtgttgattaaaattgcaaatataaattcaattggttactgctttaatagagtgcaattaataaaaattaatgaattggcggcaatgcgccaaaaaaaaaaaatgaatcaattaatcaaataatgatgtgctcaaaaggtgtacgattatttccaagcaattactcaacttaaaattatgcacattttcaaattaagacttgtttagttctgctcacagctccttttaattgttggattgtataattttgtaacgtttcctttgtcattttaaaatatatcagttcgccgcgctgtttaagtgataattttataactattaaatgaatttatgtaaaaagcaagtaaatcaattattaacaatatgtaaaacaataaatttaaaccatttatacaattta

SEQ ID NO: 28473 - protein, 509 aa, DROSOPHILA; identical to SEQ ID NO: 339

SEQ ID NO: 28474 - DNA, 3241 bp, DROSOPHILA; identical to SEQ ID NO: 28471

SEQ ID NO: 28475 - DNA, 2703 bp, DROSOPHILA
agttcacaatcgaacgttcgccgcggctgacgtttcgctctcgctcgctccctctgttcccgtcttattcgcgcgccgtccaccgctctctttcgctccgccagtggctttcaaactgcagatattccggagccgcgaagtgcgcaccccaacgaaatgcggtctctagtttcaattagaaaaacatggccgaattaatcagtcagcccactaaaattaacaacaataattttggtgccggcgtcacaatgcgcgagaaaaagggaggagcccttcagaagctcaagaagagactttcgcacagcttcggcagattaacaatttcccgcgaagatggcgacgagtcgacgcaccaccatcaccaccaccatcatcatcgcggtggacatggcgggcaccacaaccacggtaacaaagttccatacaacggctacaattcggaggaatacttggaccgactcgaaccgaatggcaatatacccgctgacaagacaaattgcagatatggagactggcgcagcacggacagcaccgaccaccacgatcgcgtccagagacagctttccgtgtcctccgacagcaagttgctcgacgaggacattcgcgaggagatgaagtaccattcgcacgtggtcatgcgtcccaagaagccgcccagacccaaatccgaggtctttctgaacaaacaggaaacgcatccgcgccggaaacgattcagtgcatttggtggcgactccccatttggcaagcaggaggcctatgttaaactcgagccgctgggcgaaggctcctatgcgacggtctacaaaggatttagcaaattaacctaccagcgggtggcgctgaaggagattcgcctgcaggaggaggagggagcacccttcaccgcgattcgcgaggcctcgctgctgaaagaactgaaacacagcaacatcgtcacgctgcacgacattgtccacacgcgcgagacgctgacctttgtctttgaatatgtgaatacggatctgtcgcaatacatggagaagcatccgggcggcctggatcatcgcaacgtgcgcctgttcctcttccagctgctccgtggactctcctactgccacaagcggcgtgtcctccatcgggatgtcaagccgcagaacctgcttattagcgactgcggcgaactgaagttggccgatttcggactggccagggccaagagcgtgcccagccacacctactcccacgaggtggtcacgttatggtaccgccctccagatgtcctgctgggcagcacggagtactcgacctcgctggacatgtggggcgtgggctgcatcttcgtggagatggtgaccgggatgccgacgtttccgggcatacgtgatacctacgatcagctggacaagatattcaaattgctgggcacgcccaccgaggacacgtggccgggagtcacccactttcccggctacaagccacacaagctgggtttctatcgaccacggaaactgggtcacaacttcccacggctatacgacatcatcgagggcgagacgatagctaacggcttcctgcaactgaatccggagcagcgtttgggcgccgatgatgcactgcagcatccgtactttgcgcagttgccaaagaaactctacgaattgccagacggtgaaaacctcaattttcaccgtggaaggcgtgcagctttacacggagccaaatcgacagaataaatgaaaattaaagcaagtcctctctgtggatggcgtacgtttctactgttaggatccaaatcacccaatcaacatcctcctggactatcaatctgtcaatcaacctatcgcatcatccagcaatcgacagccatatataatgcaagaggaacttctcgcccgcgcagaagttttgtactataattctatgatactttttagttattagttcgatttcgcagtgagttagctgagggagtttagcagaagacacggcaccaacggcagcattttattttcagtcaaattgcttaaagttagtttagatttctgtagatttctcgccatcctgcagccgcgtcgtaaaggatactcagtttagtcaaagcgcagacacgtttttctgtattcttttgtaagctaacaaaaatttacatttaatggtagcttttagtgagtgaattgcctctgtggattacgcaatattttcgattgcaatgagtgagagataatcatcatgatgtttgatatgctcgtgtgtatttcgttttcattattttttcctttagtttttattcgatattttctacgcgaatgttcgactgcggagtgttgattaaaattgcaaatataaattcaattggttactgctttaatagagtgcaattaataaaaattaatgaattggcggcaatgcgccaaaaaaaaaaaatgaatcaattaatcaaataatgatgtgctcaaaaggtgtacgattatttccaagcaattactcaacttaaaattatgcacattttcaaattaagacttgtttagttctgctcacagctccttttaattgttggattgtataattttgtaacgtttcctttgtcattttaaaatatatcagttcgccgcgctgtttaagtgataattttataactattaaatgaatttatgtaaaaagcaagtaaatcaattattaacaatatgtaaaacaataaatttaaaccatttatacaattta

SEQ ID NO: 28476 - protein, 509 aa, DROSOPHILA; identical to SEQ ID NO: 339

SEQ ID NO: 28477 - DNA, 3517 bp, DROSOPHILA
ttcatcagaaccactgatatgttgttcacgtgcactgccataaattgggcaaaggtgataatactcgccggcaccttagtttgccggaagtctggcacacccttcgcctccgaggctttgcccgccaacgtctgagtccgccggagttcgtaagagtcctggtcgtaggagtcatcctgtcgactgtgaatgtctttgttgatgcgaatgtcacggatataaatggagagcagcttggtcacctcggtggtgaagaaactgctgcgcagacacacctcctcgatttgctgtaaaattaggagtgtttatcgcttggtaaccagagttcgaaggttatccataccaccgagaatccactcttgctgatgtgcacattcttcagggacaagtagggcagcgaaatgcgaccgatccgtactttgacccgaaacctcttcaccaaataccaactaatgcccgtgggcaagaccctaaaatggaaagtgatcaattttttatgtttataacgatgatggatcaatcatggggccacggaacaggcaaaactaaccaataaacgaagatgaagagcgccaggcagaatagaagtagctgtagcatcatgttgttgcctaaataccatagtgtcccaacatttatgttgtgctatttatgttttgaaattttttgactaaatactgaacaatttactagttgcggcaatagagtgaccaatgcatactattcaaaaataccacaataagctatcagtttttcaaatacttagcccttgcaagacaagcttgttcgcaaaatgcataacttaaacaattaccgcaattaccaaaattttagttacagtgtataaaaagaaaatgcattctcaattagaaattaataatgcaaagaaatgcatccctgttcatgtgcgactttgacttgtcgcatcaacaaagctcgtcaggggttcaggctttattaaatttcggctttccccagacggtcacactgtggctttatatcttttaaaaataacaaaatcaaaaagttatcttatcgctgctcccgcgcccgttattccattgtaagcatgcgaacgtgaaaattggccaaagaagtcgctatgttgctgctggagctgaacattctgaccctgaatatatggtgagagcaggcatctccttctaaggctgctggagccccacttcccttgacaccgatctgcacaggctaatcatgtgcactttcaggggcattccgtatgtgtcgagtgatcgcagaccccgcatcgatgccatctgcaaggagctggctagcgggaagtatgacatcgtgtccctgcaggaggtgtgggcgcaagaggacagcgagctactccaaaagggcacggaggcggtcctgccccatagccactactttcacagcggcgtgatgggcgccggtctgctggtactgtccaagtaccccatcctgggcactctgtttcatgcgtggtccgtaaatggctacttccaccgtattcagcatgccgattggttcggcggcaaaggtgtgggcctgtgccgcatactcgtcggcgggcagatggtgcacctatataatgcccacctgcacgcggagtacgacaatgccaacgacgagtacaagacacatcgcgttattcaggccttcgatactgctcaattcattgaagccaccagggggaactctgcgctgcagattctggctggcgacctgaatgcccagccacaggacatctcttacaaggtgctgctctatacctccaagatgctcgacagctgcgactcggactcttttcggaccaacgaatgcgaacacaactcatacacatctaagcaagcacgggagagaaatcctctgggtatccgtatcgatcacatctttgtgcgtggtggcgatcatgtaaatgctgagatagccgaatacaaactgccttttccggagcgagtacccggcgagaaatttagcttctccgaccacgaggcggtgatggccaagctgaagttattcaagctggaacctagaagtgaggagccagtggcaacgatcgaggtgaactgcctggtagaggatggtgaaacctgttccgtgagggaagtaggagcaggggatgctttgacaggagaggacgatcagtcatcacaacaccagccggagatccaatgcaatggaagctccacttccattcaatccatgcccgccgctagaactgctgcccttcttgaagctctggcgctgtgcgatgcttccctgctgcagttaaacactgatcgaatactgtactacagcgccgccaccttcctgtttgtcctcttggtccttctggtggagttcaccgcccccgtgggcatgcgcactatctttctgctgctcaagttcatcgtgtttggcgtgatcctgttctgcgtcttcatggcctccatctggaactatatggaacgaaatggggtcctgcagggcaagaagtcgatggaggtgatgctgcaccacgcccagaagtacgagtacttctactgaggctgtgtatagcagccaagctcaatgcgcatttaaaatccacgtgtagcgtactataagcagcgatatatgtttgactagagttatagcgctcttacttgatctttttattcgtgtaaccgtcaatgcaattccatggtctctttctgtgtaacgtcatccatatcccaggaataatagttcaataaaagtgagaatcatttaggcaaacaaagattgattgatctaaagataccttttgtatcaacaataatatagtttgtcgtttaataagcaacaatatatatggtaagctcattcatggttatagaaaatttcataactaccgccccaaagtatgcagtacttggtcgctacccattatcgacaaataaccacagaactgtattaatattacggtgtttttaatattttttctttattctcgagtagaaaacagctccgcatagccccaatctggtacagtttattcgggcttctttcccttagcaaactcggccttctttcccttgacgggggcgggcttctgggagcgcaggacagcggaagcgcggcggagggcagcctataagcacaagtaaaatcattagaataggcctaacactgaagtacgataagcttcagctttgagagcttcagataagtttatcaacacgatcattctgcgatcttggttgtgtagcattaaaaaaaagatcatcatgacaagaacccaaacagttgtttctaggcttggagccataatcacctgtgtcaggtccttgcggtacttggagccgataagcaggttcttcagcttcttcagggaacggcggggaccggccttgaagtcaacacgcacggtgttcttggcggggcgctgggcatacttgcccttcttcagcacggcggtgaagcccttcttgtcggcagctggcacgactcccagggtcttcttgtgcacgatgccgctgtagcggtacgagctcacgctggccaagttgtttggctcctggaaggg

SEQ ID NO: 28478 - DNA, 927 bp, DROSOPHILA
tcttttaaaaataacaaaatcaaaaagttatcttatcgctgctcccgcgcccgttattccattgtaagcatgcgaacgtgaaaattggccaaagaagtcgctatgttgctgctggagctgaacctgaatgcccagccacaggacatctcttacaaggtgctgctctatacctccaagatgctcgacagctgcgactcggactcttttcggaccaacgaatgcgaacacaactcatacacatctaagcaagcacgggagagaaatcctctgggtatccgtatcgatcacatctttgtgcgtggtggcgatcatgtaaatgctgagatagccgaatacaaactgccttttccggagcgagtacccggcgagaaatttagcttctccgaccacgaggcggtgatggccaagctgaagttattcaagctggaacctagaagtgaggagccagtggcaacgatcgaggtgaactgcctggtagaggatggtgaaacctgttccgtgagggaagtaggagcaggggatgctttgacaggagaggacgatcagtcatcacaacaccagccggagatccaatgcaatggaagctccacttccattcaatccatgcccgccgctagaactgctgcccttcttgaagctctggcgctgtgcgatgcttccctgctgcagttaaacactgatcgaatactgtactacagcgccgccaccttcctgtttgtcctcttggtccttctggtggagttcaccgcccccgtgggcatgcgcactatctttctgctgctcaagttcatcgtgtttggcgtgatcctgttctgcgtcttcatggcctccatctggaactatatggaacgaaatggggtcctgcagggcaagaagtcgatggaggtgatgctgcaccacgcccagaagtacgagtacttctactga

SEQ ID NO: 28479 - protein, 274 aa, DROSOPHILA
MLLLELNLNAQPQDISYKVLLYTSKMLDSCDSDSFRTNECEHNSYTSKQARERNPLGIRIDHIFVRGGDHVNAEIAEYKLPFPERVPGEKFSFSDHEAVMAKLKLFKLEPRSEEPVATIEVNCLVEDGETCSVREVGAGDALTGEDDQSSQHQPEIQCNGSSTSIQSMPAARTAALLEALALCDASLLQLNTDRILYYSAATFLFVLLVLLVEFTAPVGMRTIFLLLKFIVFGVILFCVFMASIWNYMERNGVLQGKKSMEVMLHHAQKYEYFY

SEQ ID NO: 28480 - DNA, 4760 bp, DROSOPHILA
agaagaacgtgtaaagaatttatttgatataccctaagcctaagccatgacttcccgttagcagtaaagcttccttaataataatgacattcgagtttgggaaacagctattttgtttaagaaaggcattataaaaaccgtaatttgttatcatacccattactcatagaggggtatattaaactcgttaaaaggaatacaaatttctatcgatatgccaagataattttgaaatttctctctcaaactcactcccactatctggtatctgatagtcgagaaattcgactataacattctttcttgtttaaaaaaattgtctaaatttagggattcaaaagtggtttaccgatgataagctttcttgagccccacttaatatgatcacaaggtttaatttcttttctgcatttatttttaaaattattcgccgttgttatttcgtagataaatcggtagtggtcaacttttttttattaactgtcaggccaaaaacaaatggaatttaaaatagttcaaatcaaattcgaatacgaaaataagtgttgtattttgaaaaagaaaaaaaattcgtaatttcacaccatggccgaggagatagaggttgaggagacggaggacttccacgacatggacttcaatgacgaagagccatcctgtagtggaggagctgtccaggccaggacggagcgctttgtggtgaagaaatgggttgcgcacgccatgtggggatgggacgtagcagtggacaactgtgccatctgccgtaaccacatcatgaacctgtgcatcgagtgccaggcggacccgaatgcaaaccaagacgagtgcactgtggcttggggcgagtgcaaccacgcattccattaccactgcatcgcgcgctggttgaaaacgcgcctggtctgtccgctggacaacaaggagtgggtctaccagaagtacggccgctagcgaggaatatggatcgggatattaggtggtgatagctgtttgctggcatgtaattactgtaattaaataagaacggacttgggttccaaaagaaggtttacgcttcctggtcgggcaggagttgctgggccgtgggcctgacgccagttatatgttcgatttgagagtaaagcgaatcgcgctcctccactaagctagcgtacttttgctgcagctccttctcgcggtccatctggcgacgcacgtcctcttgcagcgattccaggcgtcgcggcacagcgatggcctcctgttcgcccaaaaagcggaatgtcgagagtgagacagagttctgctcaatctggccgtacgtgtcctgaagctgcttaatcagcacctgggcgcgcgcctggtagccgccggtgagaatcttcagcttcttctcgatcttgccgcagcgcttggcttccttggccatgtggcggcgatttgtctccagccgtttctcggcagactctaatcgatccttcttgctggccaaattggcgcgtgtgtagcgatgttgggagggtaggtaaagaacctggccgaggcactcctgccacacctgggcataaacgtctaggggcagttcgccatgcgccatgcgctccttcaccacctccatttcctcggtgagcatttgcttggccttcgccaactcttgctgcgagatgtcctcgtagggattggccttaaagtagctttgtagctgttccaacttgtgctgcgattgaccaggcacgggatccttgaccgagtcgtacactgccaagaaaaaggacgttagttacttgggttaaaatggaaacgttgggtttactcacgctgcatggtgatcatttcgtgtttaatcagctcttcggcctgctgctgttccgtaaggttctgtttctcggactgcggtcgcagaatcttggtgttcacttcagttggtcgcgggagactacgctgaataacctgggagcgcttctctagctctcgctttcggcgcgcctcttgttcagccaataacctggcgtcgacatccgcctgatcctcgacggcgggttctgagttggtctcaatgcgttcgctttcctcctgctcaggcaccacgatctcatagtcattccgtggagcgggcagcgtggagagaccgtcacgcagtgtagactttagttgcttttggtagtttttgtaatgtgctggggtctcggtgacgcccatactctcctcaggattgatgcttagcttgtccctcacgtaggcaggtgtattgacgacacccgtagcccctcctgccccctttacgggaactagggctccggaggagggcgtttggaatccgccgggagtggctgctccgccctcgcgttgggttctaaacggcgtggcaatcactgtgttaggcgtggcgatggaggccgccttgggcagcacgccggagaagtctgactcgtgcagcggtgtgttcaggccacctttgagtggcgtctctgtgtgggtgagggccatcatgttttgggcctcctgcatgatgcgatcggtgtacggagccggagtacgtggagtggctgctacctggggtgtaatggagtagtcggctagcaaagcatccgtcgtctctatgccgctctcaccggcaatttcctttgccatctcactggcgcgtcccagcttgactacctgctgtagttccatgtcggaaatctgcggcgtaggcaggactagtttggagcgcttccgctcgggctccatgttttgcagcattgcggtgggcacttcattctctttgcgctgcttcagcttctgcttgtcccgcttgcgttcgcgttcctccttctctgagcggagttctccatctaggtcctgctgccgcatcttgttgaagtcgggttcatttttctgcaagtgttcctcggaagtgtcgtagaatccgtgggcaggtcgcttttcgaagggaatctcggcgttgtagtctattcccttgatccgcttgcgatttccgctgccaattccggcggcacgaagttcgcgccgcttttggagagtggccaggcggcgggcttcctccagttgcttttcgcgagccttgcgcttggctttcttgccttgcgtgttggccaagcgggcgcgtgcctcggacagcatttccagctcgtcctcgtccatgtccttgggatcgggccgcgccggcttggtctctggattggggtcaatctctccgggcttcaacttgcgaggatcatccatcgtgtcctcgccatcctctttgcgttgggcttggtctctgtacggcaggaaagggatcagaaattttctacttagtatgttgtgcgttggactcacagcaagtactcatagcgctccaggcactgggctgccgtccgtccgatgatcggggctatggtgcgccactgcgtcggcatcagcttggccaagtggagcagtttctcgtcctcctcacgggaccactcggtcttcttgatgctgggatccagccactcgtaccacctggccttgcactgcttggcggactttctgtgcaggagggaggcaattcgactccactggttcttgccatatttcataaccgcagctttgaggatttcatcctgggaaaatgaaatcggtagccaatgtaagccatgtgtggttaaccgatagactattgggataattacctccgtgttgcgccacacgccgcccttgatcattattcgcggcattctggggccttatgttgctttctgtcgcgtatacaatggattttcacaattttcactcgagtccacgaaactccgctcttttttttgcagtagccgctagcgatggttagtcttcgataacagcgatatctccagcacgttttggtatatttatagaacctctagttaaactattctagcttagtacaaaaaaatttcattatattgtatttagtcttcgtataccgtttgatttaacttcggtcttaatattggtaacttaaattattcaatttaataaagggcctatacacacgacataacataacgcgacagtgtgaccgaatatagttgtgcaaacaccgctgccacactgtgtacagcaacagctgttcgctatcagttattttgtgatgaaaagttttttttctgcgtaatgccaatttttgtgatgcggaattaagaggcgtgtgcccaggaagcggaaaaccggcaaccggcaaccggaatccggcaccgggaatcaactggaccaaggaaggcacccacgatgagcgatgcgacctatccgggatattacggcggcaaccaggtgagcaaccagcgagtacctctggccagaaaaacacgccgtgtgtcttccagctgctcccgttgtcgcatccgcatcctacacatccgcaccaagacctgtcgctttccacgccggttcactccttggagcaggactccaacttcgggggattctttgacgaagagctggtcatcggatcgggatccggatctgcctccgcgtctgctgcaaacaccaccccttctggaactactttgtggctggccgatggcgggaatcgatcacctactgaggtggcggtggagtcccagcccaatcagggcattccctttgtccagatccacaccaccgacttgcagcaaccagagaaaagctaccgcaatgccttccgcaggcgtacagcggaaattaagtcggaggaactaatcaagtcggaacttgcggaagcggcagccaaggatcgcctgaatgccacgccaacgccaccaactcgaaattccagctgcgccagcgtggagggcaag

SEQ ID NO: 28481 - DNA, 2479 bp, DROSOPHILA
agcggagtttcgtggactcgagtgaaaattgtgaaaatccattgtatacgcgacagaaagcaacataaggccccagaatgccgcgaataatgatcaagggcggcgtgtggcgcaacacggaggatgaaatcctcaaagctgcggttatgaaatatggcaagaaccagtggagtcgaattgcctccctcctgcacagaaagtccgccaagcactgatgccgacgcagtggcgcaccatagccccgatcatcggacggacggcagcccagtgcctggagcgctatgagtacttgctagaccaagcccaacgcaaagaggatggcgaggacacgatggatgatcctcgcaagttgaagcccggagagattgaccccaatccagagaccaagccggcgcggcccgatcccaaggacatggacgaggacgagctggaaatgctgtccgaggcacgcgcccgcttggccaacacgcaaggcaagaaagccaagcgcaaggctcgcgaaaagcaactggaggaagcccgccgcctggccactctccaaaagcggcgcgaacttcgtgccgccggaattggcagcggaaatcgcaagcggatcaagggaatagactacaacgccgagattcccttcgaaaagcgacctgcccacggattctacgacacttccgaggaacacttgcagaaaaatgaacccgacttcaacaagatgcggcagcaggacctagatggagaactccgctcagagaaggaggaacgcgaacgcaagcgggacaagcagaagctgaagcagcgcaaagagaatgaagtgcccaccgcaatgctgcaaaacatggagcccgagcggaagcgctccaaactagtcctgcctacgccgcagatttccgacatggaactacagcaggtagtcaagctgggacgcgccagtgagatggcaaaggaaattgccggtgagagcggcatagagacgacggatgctttgctagccgactactccattacaccccaggtagcagccactccacgtactccggctccgtacaccgatcgcatcatgcaggaggcccaaaacatgatggccctcacccacacagagacgccactcaaaggtggcctgaacacaccgctgcacgagtcagacttctccggcgtgctgcccaaggcggcctccatcgccacgcctaacacagtgattgccacgccgtttagaacccaacgcgagggcggagcagccactcccggcggattccaaacgccctcctccggagccctagttcccgtaaagggggcaggaggggctacgggtgtcgtcaatacacctgcctacgtgagggacaagctaagcatcaatcctgaggagagtatgggcgtcaccgagaccccagcacattacaaaaactaccaaaagcaactaaagtctacactgcgtgacggtctctccacgctgcccgctccacggaatgactatgagatcgtggtgcctgagcaggaggaaagcgaacgcattgagaccaactcagaacccgccgtcgaggatcaggcggatgtcgacgccaggttattggctgaacaagaggcgcgccgaaagcgagagctagagaagcgctcccaggttattcagcgtagtctcccgcgaccaactgaagtgaacaccaagattctgcgaccgcagtccgagaaacagaaccttacggaacagcagcaggccgaagagctgattaaacacgaaatgatcaccatgcagctgtacgactcggtcaaggatcccgtgcctggtcaatcgcagcacaagttggaacagctacaaagctactttaaggccaatccctacgaggacatctcgcagcaagagttggcgaaggccaagcaaatgctcaccgaggaaatggaggtggtgaaggagcgcatggcgcatggcgaactgcccctagacgtttatgcccaggtgtggcaggagtgcctcggccaggttctttacctaccctcccaacatcgctacacacgcgccaatttggccagcaagaaggatcgattagagtctgccgagaaacggctggagacaaatcgccgccacatggccaaggaagccaagcgctgcggcaagatcgagaagaagctgaagattctcaccggcggctaccaggcgcgcgcccaggtgctgattaagcagcttcaggacacgtacggccagattgagcagaactctgtctcactctcgacattccgctttttgggcgaacaggaggccatcgctgtgccgcgacgcctggaatcgctgcaagaggacgtgcgtcgccagatggaccgcgagaaggagctgcagcaaaagtacgctagcttagtggaggagcgcgattcgctttactctcaaatcgaacatataactggcgtcaggcccacggcccagcaactcctgcccgaccaggaagcgtaaaccttcttttggaacccaagtccgttcttatttaattacagtaattacatg

SEQ ID NO: 28482 - protein, 698 aa, DROSOPHILA
MDDPRKLKPGEIDPNPETKPARPDPKDMDEDELEMLSEARARLANTQGKKAKRKAREKQLEEARRLATLQKRRELRAAGIGSGNRKRIKGIDYNAEIPFEKRPAHGFYDTSEEHLQKNEPDFNKMRQQDLDGELRSEKEERERKRDKQKLKQRKENEVPTAMLQNMEPERKRSKLVLPTPQISDMELQQVVKLGRASEMAKEIAGESGIETTDALLADYSITPQVAATPRTPAPYTDRIMQEAQNMMALTHTETPLKGGLNTPLHESDFSGVLPKAASIATPNTVIATPFRTQREGGAATPGGFQTPSSGALVPVKGAGGATGVVNTPAYVRDKLSINPEESMGVTETPAHYKNYQKQLKSTLRDGLSTLPAPRNDYEIVVPEQEESERIETNSEPAVEDQADVDARLLAEQEARRKRELEKRSQVIQRSLPRPTEVNTKILRPQSEKQNLTEQQQAEELIKHEMITMQLYDSVKDPVPGQSQHKLEQLQSYFKANPYEDISQQELAKAKQMLTEEMEVVKERMAHGELPLDVYAQVWQECLGQVLYLPSQHRYTRANLASKKDRLESAEKRLETNRRHMAKEAKRCGKIEKKLKILTGGYQARAQVLIKQLQDTYGQIEQNSVSLSTFRFLGEQEAIAVPRRLESLQEDVRRQMDREKELQQKYASLVEERDSLYSQIEHITGVRPTAQQLLPDQEA

SEQ ID NO: 28483 - DNA, 3019 bp, DROSOPHILA
ggtccccatatgtctgatcatttgggaccaaaaactaactggatttttaaagatggaagaacaaatttaggaaaaaaaggagcagacgagcagatgtaattcttcgcataggaacaacccaaagcaactgcaccgtattttttcaataagccaaaaaagtttataactacacacagagggaacatcaattttgtttaagagattccttctgtttcagtgtcgttaaatgaaaaatcaaaaaaatcgaaaaatacttgttagtccaaactcacttttttgaaccacattgtgggtccgagctttatgcttgacaaaaattgactctgtgatgcttcctttttcggtttgcatatcataataagcttgtaaaaatgtatgtacatatgtgctatgtaaaatcaaggcttaactgcttatcaataaaacaatcaagttaaccgaaaatgatttggatcatgctgacaaatgttaatcgaaaataaaggtcaattggggtcattggcgataatgttaacggcgaaagtttaaagcatgaggttttttaaattaaatttgcattgacgcagaagtatcgtctgaaatgtctagattcggaatatttgttaggctgtccaggtcgtataatcaccgattgcagctgacgatttttttaaggcattttcctgctgttagttggacttattcaaagccaccctcatccgataatataagaaaactacagtctaggctccaatgcacgcaatcctgcctaaccacccctgagtacaatcccgtctggagtagtgatatggtgagctacgacaataaaagcaaattgaactgcgcaatcaagtgcgggttaagtaagtacacacacaatatctgcacaagtctccagatcggatcgttctaaaactacatccacttgtatcgttgtaaaactacatccatgtctaatctaaaccggcccggacgagtacgctagttatcctgatttggaatatatgtatatatacaagccgtaaagaaagcacttgccttacttttagtaagttaaatttggagctgcacatatgtattctcctgaacatgtaagtacctcaggtacaattcgcactaaatgttaacataaagacatgtatgtatgtatgtgcatggataaatatgcatgtgcatattttttttaaaacattgttcacagaatgcgtgtactggttttaaattccaattcctgaatttacggattttgctaacagtcgaaagcgaaaggcgctttcaagtttcaaagaatcaattgcgttaatctggtaggcaaccggcctataaataggcgtcactgggtttccggggacctcagaagtgcctggtagctcaagcgaagcggaaccaacaaactcccgaaatggattggatcaaaatatttggtagatgttgtgacgacttgagatcagcgatattaacttagactctagtttcaggtcttgccctgctattgattgggatggcgcagtgctacccgcagttcgatagcgaaaacccctggttgaggcctcggcaacccactgaacctacgatatctccgaatgcggggggcagtaccccggccaacgctgctccaccaaccacccagtcaccgcgctatttcgcctgtttccattcatgcccggccaccagcgagtacaatccaatctgcggcagtgataacgtgaactactacaatgaaaacaagttcaactgcgccttgaactgcggcctaagtgagtatataggctgcgtgcctccccagattcctttctaaaacgatgtatgtacacatggatgccttcttcattatagacatccggaaggtgcacaagggaatttgtcagacttagtctagatcgcttgaattcagttcacttgtgtatgtaagcatgaacgtattgcaaatactctattcatcgtctgatcgatgacatcagcgaatataaatatgtatatatgtacgtacataaataaaaacttagcgctgttactggtatatggacggtgtatgaccccaaaaaactcagaatctcttgcttccaatcagtcacagtcgggttgcttgtctgttcgcctgtagcgctaaagtctccatcatctattacctatttattgaggctttgtaaaattaaagaaaatggtttacatatgcagtaagtcgaggccatacattaatatatacataagatgtatatgtacatattgcatatatacgtaccttgcgttcatcccactagcagctcttgtggtgttgatctttcccgtcttgttgttgggtgcaccatgggaagggtcgcatcctaagtctcaggtggaatacatcagcaacgacaagagagttgattctggcttcgccaaccccaatatcgtgcccatcacccagccgtcggtcgtaacgcaaacagctcctcctccgccgccaaattccaaaaactttgcatatagtccgatgacgcagagctggaccctcattgcgccaggcgatccgctgcccaataatgacaccctcgtctggaaccagagcaatgacaaatggctcactcgctaagcaatgcaaccatcgatggctttgctttaatcattgtgtattactattgaaataaatataactaattcactgtaggacttagcggtggcgacggatgtggctggaggccacagactgaccctgctgccgcagccggcacaactcgtcggtactgtagttcagcttgcgggttgcgttttctgagaaacgctcgaacttggccactaggtccaccagttgcgtcttgatcgcctgcacctcggcgagcactgcgcttaggacattagcctgattcttcatctgtactgttccctccgcctcctggcggaactgctgcggcacatttgtagcggatcgggggcgcaaaagctcgtgcatgtgaaataaattctgtggagtcttctttgtggtccccgtggcaggttctggcttgaggaaatccgtgtggagcggctgctgctgacgctgtagactgcggctgaaaatgtt

SEQ ID NO: 28484 - DNA, 897 bp, DROSOPHILA
gtaaagaaagcacttgccttacttttagtaagttaaatttggagctgcacatatgtattctcctgaacatacatgtatgtatgtatgtgcatggataaatatgcatgtgcatattttttttaaaacattgttcacagaatgcgtgtactggttttaaattccaattcctgaatttacggattttgctaacagtcgaaagcgaaaggcgctttcaagtttcaaagaatcaattgcgttaatctggtaggcaaccggcctataaataggcgtcactgggtttccggggacctcagaagtgcctggtagctcaagcgaagcggaaccaacaaactcccgaaatggattggatcaaaatatttggtagatgttgtgacgacttgagatcagcgatattaacttagactctagtttcaggtcttgccctgctattgattgggatggcgcagtgctacccgcagttcgatagcgaaaacccctggttgaggcctcggcaacccactgaacctacgatatctccgaatgcggggggcagtaccccggccaacgctgctccaccaaccacccagtcaccgcgctatttcgcctgtttccattcatgcccggccaccagcgagtacaatccaatctgcggcagtgataacgtgaactactacaatgaaaacaagttcaactgcgccttgaactgcggcctaaacatccggaaggtgcacaagggaatttgtcagacttagtctagatcgcttgaattcagttcacttgtgtatgtaagcatgaacgtattgcaaatactctattcatcgtctgatcgatgacatcagcgaatataaatatgtatatatgtacgtacataaataaaaacttagcgctgttactggtatatggacggtgtatgacccc

SEQ ID NO: 28485 - protein, 97 aa, DROSOPHILA
MAQCYPQFDSENPWLRPRQPTEPTISPNAGGSTPANAAPPTTQSPRYFACFHSCPATSEYNPICGSDNVNYYNENKFNCALNCGLNIRKVHKGICQT

SEQ ID NO: 28486 - DNA, 12319 bp, DROSOPHILA; identical to SEQ ID NO: 23821

SEQ ID NO: 28487 - DNA, 2444 bp, DROSOPHILA
acccacgaccgcccccttcgacacctacgcctgtgtctgcggaattatcaaatgccagtgtgtgagtgctgcttctgtctgtgtgtgcttgtgtttttgcgtctgtgtgggggtcttaacggttaacgtgctggaaaagtggagcgataaaaaaaaacagttgagcttcggaatataatgcgtgacatgtgttaaccccccgagatacggctgctatggatccaattttcttctcgccaacgaatggaataccgtcagagagtaaactcgccacttatatggtcacgccgcagtcgcccgagttcattccaacgcgccttggctcgacgcccaacttctatgcaccatatcacaacgcgcccatgcaattaagtaatgggctcaatggcgtcaatgggttaacagccgccgcagcagcagcagcagcagccgccgccgccgccgcagcagcagttccctcctccacgtcatcggcgtcctccgcctcggtgaccatcagcaaaacggccaacggtggcgcctccatgctcgccctgcaaaagaccgcatccatcgcctctgtaaccatcgcacaacagcagccacagcatccacagaaacagcaacagcatccgccgtcggtgggcggaggagctgtgtccgccgcctccgcccccattgccattagtggcgctccaccgaatcccgccgcagctccgttcgtcagcagcatgtccgctcagacgccgctcaaggggaggggcgccatgatgcgccaggaatcaccaacggcagccatgatttcgggcgcagggccaggtgagaagtcgccaccgcacgggatgacgccgcacggagcatcgcccataccatcagcgctgcccaccagcgtgcaccaggagaacgtaggcggcaccatatacttctatccgactgccaacgcacagaacagccagcccgtcgtcaattccatggtggtggatggaacgcatccggctctccatggcgtgagtgctgtggcgccgatgagtgcgggcgttccggcggccatgatgtacacggggcatgtgtatccgggaccgtcctccaacgtggtcaccatgcagccaaagacgctgctggagtcggccttctttatgcccgacgagatgcgcgccgaagtcctcgcccgcaacgagatctctaacctgatcatggacgcagcggaggctgcgcagcacgctctaccgctggaggtggagaactaccatgccctgtatccactggaaccgccggcgcagccgttgcacgccaagctcacgttccccgccaccacttatagggccacgcacaacacgacgggctacaagtactgcctgcgaagaatacatggtttccgcctgcagtcgaccaagtgcatgacgctggtggagatgtggaagaagctgcagcacacgaatgtggtacaactgcgtgaggtgttcacgacgaaagcatttggtgataactctttagtattagtgtacgactatcatcccggctcacaaacattactggccaaatacttcactccggcgccagagaccaacgggtacactgatccattccaaggcgaggcccgccccttcagtcataagagtaacatgcagcgaacgagcaatggaccgctgctaccggaggccaccatctggtcgatcatcatgcagctgaccgccggcttaaaagccatccaccatgccggtcttgcctgcaaggttctggatcccacaaagattatagtgacgggcaagcgtgtacggtttagctcatgctgcatttcggatataacgcaattcgatccgaatgcatccaatcccttggcgctggttaatatgcatcagcaggacgatctgaccgctttgggtcgcttagtattagctttggcctgccgctgtcttcaatccgtgcaacgcgacaatgtccagtccagcatcgatatggtcacgcgaaactactccaccgatctgcgaaactttattgtttacctcttcaccaccaataatcgtcgctccgtgaccgacctgatgccgatgattggtgcccgcttctatacgcaactggatgcactgcagagcaaaattgatatgcaggaggacgagttggccaaggagatggagaacgggcggttatatcgcattttggtcaaacttaatagcatcaacgagcgacccgactttaatctggactgcacttggtctgagactggtgatagatacatgttgaaattattccgtgattatttgttccattccgtcactgaggatggccggccctggctagatcacgcacacattgtacaatgcctcaacaagctggatgctggctccatagagcgcgtgcaactgatgtcccgcgacgagcaatcggtactcatcgtctcctatgctgaactcaagaattgtctggagaacgccttctccgaactgatgtcaagtgcggccaactga

SEQ ID NO: 28488 - protein, 742 aa, DROSOPHILA
MDPIFFSPTNGIPSESKLATYMVTPQSPEFIPTRLGSTPNFYAPYHNAPMQLSNGLNGVNGLTAAAAAAAAAAAAAAAAVPSSTSSASSASVTISKTANGGASMLALQKTASIASVTIAQQQPQHPQKQQQHPPSVGGGAVSAASAPIAISGAPPNPAAAPFVSSMSAQTPLKGRGAMMRQESPTAAMISGAGPGEKSPPHGMTPHGASPIPSALPTSVHQENVGGTIYFYPTANAQNSQPVVNSMVVDGTHPALHGVSAVAPMSAGVPAAMMYTGHVYPGPSSNVVTMQPKTLLESAFFMPDEMRAEVLARNEISNLIMDAAEAAQHALPLEVENYHALYPLEPPAQPLHAKLTFPATTYRATHNTTGYKYCLRRIHGFRLQSTKCMTLVEMWKKLQHTNVVQLREVFTTKAFGDNSLVLVYDYHPGSQTLLAKYFTPAPETNGYTDPFQGEARPFSHKSNMQRTSNGPLLPEATIWSIIMQLTAGLKAIHHAGLACKVLDPTKIIVTGKRVRFSSCCISDITQFDPNASNPLALVNMHQQDDLTALGRLVLALACRCLQSVQRDNVQSSIDMVTRNYSTDLRNFIVYLFTTNNRRSVTDLMPMIGARFYTQLDALQSKIDMQEDELAKEMENGRLYRILVKLNSINERPDFNLDCTWSETGDRYMLKLFRDYLFHSVTEDGRPWLDHAHIVQCLNKLDAGSIERVQLMSRDEQSVLIVSYAELKNCLENAFSELMSSAAN

SEQ ID NO: 28489 - DNA, 8298 bp, DROSOPHILA
gttcggaaattattatagagttatgtatgagtttccagagatttctcaagcaacccctaatctataaattctgccaactttattcagtgcaaattgaagatagcactgcttgactgtatctgcagcaatatgcaagcaacagcaccatctgcggctatgaccacatatttacagttaatcggatggacgggcgagcgagcggtccccacaccacacgcccactttgtcttcgccgctcgtctgtcatcgtcacacagtttgacacgcactgtggggctcgcgctctctgtttttttttggctctcacactctccagccagcagaggcacagtggaacgaactagtaaattcagtaaaacatgttaaaagtacagatgtggatatatttcaaaataggaatagacaatatatttaaatttaaatagattcgaacacaaatctctgcagtgtggtgaacaaatttatggaagcacaaacgaattcatttagatttcgtagcttttgcgaccactgtgcgcagtcgctgcctgccgcgtttccccaaagcaaaacagcggttgggggtttcagtttagagaacgctgcactgccgctcggttcgtggcgcgatcgatggtcttggttggtccccccattttaaccgatccgatgtgttattttcaccgcttgcatattcattacacttacacgaaaacaattacgcgcctctgctctttgaataacagcaacaaagtgagcccagctgggcggtaaatggtaggccttaagaccgctctgccacatctacatattcacttaacgtgacgtaacagcgcggtttttgttattgtttggcctgctccccaaacgtgtgactatctatatacgaattcgaaaaaatatatatgtatgtatgtatgtatacacaaacgtgtatatgtatgtatctgagtgtggcgttttcatgaacgcgttcgtgatctttgaagcaaagctgtccatttcaccgcgaaacgcagcataaggcaacggcccaataatcatcggttttctatgtgtaaatataaactgaatacttacatatatatgtatatataactgaagaccaaaatcgctcacgtaaaccctaaagtatagacgtgcctacatatacattatttttctgccgacgtcatgccaacaaacaagcagtggccagcgatttatgtaaactgagaaacaactttgattctggccatgttcaagtaagtttcggccagcccaactgtggacaacaacacctgattgaggctctcaaactgtggcccagtcctaacaggttatcgcccaccttctccgccccctaattaccctgcccagtgcacagaatataaataaattaaggcacacataataattatcattaacatatgtgggcattcaattaaatcgttttgctttctgttcgctcgctcgttcgtgtgtttgtttttcaattcgaagtcaaataaataaaatcgggctacgaattattgcttatatggccacagcatcatcaacagcaacaattatctctcaattcataatcaatatttggcctacgaattctaactacccttcaaaacaaaatttatatgattcagtgttctgatagcagcgaaattattcgaaagtaacatttcaaaaacatttgagttgttttagaattcaagcactctagccttactagcccatatcaaaaaaaaaaagtataatcctttgctacatttattatattatagtatatatctgcagtatctgataaaatgtagtcgataaacgtatcattcgtcgtcgtctccccgccgaaattgcacgaatagtgaatacaacctgctccatataaatataaaatatttgtacgtatattcgtctatatgctatatagcgaattcaaggccaatatcacttgttttctcttcgtacattggcaagaggcattggccccgtaccccgaatcaaatgctttgcttttcaaattaaatttttcactttcggtttgtcgaaggcaaattcacttgcattcgaatctcgaaacaagtcgaggggagtctgcttagcattgattcagcactcgaatatccggtggagagtcgttcgaattttagagaactttgaaagctgaccaagaacccagcatagcactcatacgtggattagtcatgacggcgctgcttccgagttgtctacataggaggaaggtatagtgattaacacctgagcagcctgaccgtagcacgcacgcatataccgattatactacatacaaatatgtatgctgttgtattattatatttcctttaaaatgtgcaaattgccaagttctaagtttggcggctcagttgtttaccgcagaaattgcgtcttggctttatttgcgtcgacctggagtcgcaagaggaagcgggagcagccaaacagccatatatattgcgcatactccaaaaatgttggacctacgcgcgttatcgtcgtatcgataactgtggaaaataacaagaactttggtgtggggttggaaagtgtgaggaactgaaaagggtagggatgggaggggagggtatgggagggcatcgaagggggtgcggaatagtttgatggagcaggcttatcgcgccaacagcaaacatagtattcatgttgatgtttgtttaattgatttctaatcaattatcggctgtaacgcaactctctcactatagtaattcccatttttgtgctctatttgtagatacggctgctatggatccaattttcttctcgccaacgaatggaataccgtcagagagtaaactcgccacttatatggtaagctaacttcccattccctcaattagctcttatcagagtccctccaaaataagaaactcacgaaaacagggcgataagagttgaggggagattatgataacaccactgcccatcgaaaaccacccactgaaagcagctgttggcccccaaattaacagctggccacgtttgctcaagtatttttaattatgctttatttgttttcactcaatttactcgaaccatttcagtttcaacgctcagtcgctcataatatacacttgaccgactttttcggttttattttttttttttcaattttatttttgggtccactgacacacaaagtgccatataagtcgtatatgcaagttaaatatcaatttttgtttatgcatggattttgaattctctctggggtggcaaaaactgggcgtacatacatacatatatgtttggcgaatcttaaacagctcggcaattattaactataaaatattaatgtgccagccgcataattgccatggaatcgtgctaatggaaaagtatacggaatataatggcattaagtggcatatttgtcgctcaattcatttttacaatgcgaagatcagcaaatcgaatggagcaattcaatggcaatgtcatgcaaccaagacaggcgttaaacattttagtttaagatccgaataattagttacttaatacgtacaacaatgtctgatatatgaagttgtgctattcagataagataaaaatggcatagactagacaaaaacactctggttgaatcagtagtatttttagcaaactgcactcaaacaagaaatcaaagatatttcaagcaatcctccttgaaaaccccactcatatttgtaatttgtaagatccaattattatttgctctactatctttaatttgaactcccactacaactgaatttttcacttttttctttgtatctctccgaatttcaatctatccgtctactccgatttttggtctctcatcccagaatcgacagaatgtcgccacaccgagcggttatgggctgaataacgggttctcactacttaatttggattcgcccctaaataaaaagtcccaggtaaagccgtaaatatctggttccccatcccattgttctccgtgacatccatgaactgtgttagactagtgaatgcttccgtagaggtctataccccttattagccccttagcatagtagttagtttagttacgatcccatcctaaaaagtgtacaaaagtgtcttactgtgtgttatttacaggagtgtttcaattttcgattcggcaaccccttaaattgactcctgccgaataagaaaatcgaaacaatcgcatgaaaatcgtggctaataactctcatttaatgaatttcccatcccaggtcacgccgcagtcgcccgagttcattccaacgcgccttggctcgacgcccaacttctatgcaccatatcacaacgcgcccatgcaattaagtaatgggctcaatggcgtcaatgggttaacagccgccgcagcagcagcagcagcagccgccgccgccgccgcagcagcagttccctcctccacgtcatcggcgtcctccgcctcggtgaccatcagcaaaacggccaacggtggcgcctccatgctcgccctgcaaaagaccgcatccatcgcctctgtaaccatcgcacaacagcagccacagcatccacagaaacagcaacagcatccgccgtcggtgggcggaggagctgtgtccgccgcctccgcccccattgccattagtggcgctccaccgaatcccgccgcagctccgttcgtcagcagcatgtccgctcagacgccgctcaaggggaggggcgccatgatgcgccaggaatcaccaacggcagccatgatttcgggcgcagggccaggtgagaagtcgccaccgcacgggatgacgccgcacggagcatcgcccataccatcagcgctgcccaccagcgtgcaccaggtgggttaaatcaaactgcctgctttatgtactccctaattatcctttaataattcttttacaggagaacgtaggcggcaccatatacttctatccgactgccaacgcacagaacagccagcccgtcgtcaattccatggtggtggatggaacgcatccggctctccatggcgtgagtgctgtggcgccgatgagtgcgggcgttccggcggccatgatgtacacggggcatgtgtatccgggaccgtcctccaacgtggtcaccatgcagccaaagacgctgctggagtcggccttctttatgcccgacgagatgcgcgccgaagtcctcgcccgcaacgagatctctaacctgatcatggacgcagcggaggctgcgcagcacgctctaccgctggaggtggagaactaccatgccctgtatccactggaaccgccggcgcagccgttgcacgccaagctcacgttccccgccaccacttatagggccacgcacaacacgacgggctacaagtactgcctgcgaagaatacatggtgggtagatgttactcctttctcgattgtacattagtaaacattttaattgtacttttaggtttccgcctgcagtcgaccaagtgcatgacgctggtggagatgtggaagaagctgcagcacacgaatgtggtacaactgcgtgaggtgttcacgacgaaagcatttggtgataactgtaagtggggaaaggtctttggaaccattagctattagctataagtgtgtgtttaatgctgctcctggacattaaggatgttgtcacctgtataatactggggtattgttagaaggttaatacactatatttagagtacattaaactgataggattgccaagtttgcaaggaatgtattgtatacatgtcatgcatggcggaatgttgcgattactgctcctatttatagctctgcacttcaaattgggtaatcttaactagtcagtgaatatttattacaaatcgttagtcactgataaaaagaaagttaaaagttaaccttgattcttttgcaatattatggcttcacttagtctgaagatgaagtagggtattttaggtaaattcaaacctactagttaccatgtcaataatttttatcgggcacctacagctttagtattagtgtacgactatcatcccggctcacaaacattactggccaaatacttcactccggcgccagagaccaacgggtacactgatccattccaaggcgaggcccgccccttcaggttcgtttttctttgaccatgatcatattgttgctcaaattattaattatttacttattgcagtcataagagtaacatgcagcgaacgagcaatggaccgctgctaccggaggccaccatctggtcgatcatcatgcagctgaccgccggcttaaaagccatccaccatgccggtcttgcctgcaagtatgtaacaccccgcttgttatacagccagagtctaattgatcattcatcttagggttctggatcccacaaagattatagtgacgggcaagcgtgtacggtttagctcatgctgcatttcggatataacgcaattcgatccgaatgcatccaatcccttggcgctggttaatatgcatcagcaggtaagatagttttttctactttcctgtataactaatactaattacattggttcgcatgtctttaggacgatctgaccgctttgggtcgcttagtattagctttggcctgccgctgtcttcaatccgtgcaacgcgacaatgtccagtccagcatcgatatggtcacgcgaaactactccaccgatctgcgaaactttattgtgtatgtataatctggtataggtactcaactgacgaaataacccgtgtgattttcagttacctcttcaccaccaataatcgtcgctccgtgaccgacctgatgccgatgattggtgcccgcttctatacgcaactggatgcactgcagagcaaaattgatatgcaggaggacgagttggccaaggagatggagaacgggcggttatatcgcattttggtcaaacttaatagcatcaacgagcgacccgagtaagtttgcaaattaatgcacataagcttaaaatacaatcttcatatcaatgcattcatttacagctttaatctggactgcacttggtctgagactggtgatagatacatgttgaaattattccgtgattatttgttccattccgtcactgaggatggccggccctggctagatcacgcacacattgtacaatgcctcaacaagctggatgctggctccatagagcgcgtaagtaaagtcggaaaaggtcggccagctggttcggaggtctcacaaagctaacttggcccacatttgcaggtgcaactgatgtcccgcgacgagcaatcggtactcatcgtctcctatgctgaactcaagaattgtctggagaacgccttctccgaactgatgtcaagtgcggccaactgagcaacccgagggtaaaagaaaaacagaaaacacgcgcagctcacttagccaccatccgcacgaccacaaaacgactacgataaaggattagatactaagcaaaacattcattacgactaagacattttgagaaccataaacaagtaaaatacgaagatgtttattgttaagccaaaccgaaaaaggaacttaaaagaaaaaaaaaaagtgaaaaccgatatccaatgttatgttagctcttaactaaattttaggcatttaaaacaatacaaaaagaaacaaccgcaaccacaaaaaataaaccaacaactttttgaaaccgaaatctctccaaaagaaaaaagcaaaaacacaaaaaaatgcaaacattacaaaaaaaaaaacaagaaaaacgaactaaaagcaaaaaaatttgaaaaatttgttaaaaaatgcaaaaaatacataaaaaaaaaaggaaaaaagaaatcacgaaaaagagccgagaaaacatggatctatttttacagagctaagagaggatgaaagtatttataaatatgtattaaaaatcgaaagaaaaaaattgtaaaattttgcaacaataaataactgtaatgacaaacaatggcaacagtgcagcaaatcgttgagcaacaacaaaaaaagataaattcaatgcagagtagatggataaggataaagattatgagaaacgtagagaaactaagaaagtgaacaacaaggaaccacatcaaatgtttataaagcatgtctgacaatgatcgcctgcctcttctcccctacagtaaacaaaaaatacatggaaaagaagttacgaaaccgaaaacaattggataggaacgaaaagcgaaaggcgcagacgagctagaacgacagccgataacgttttttatttttcaaactgtattttttatagcaaaatattttaaaatggaaaaacacaaattttctaaatacaatttaaaatgtttacaaaaaccaaaaacaaaacgagatg

SEQ ID NO: 28490 - DNA, 2463 bp, DROSOPHILA
taaggcaacggcccaataatcatcggttttctatgtgtaaatataaactgaatacttacatatatatgtatatataactgaagaccaaaatcgctcacgtaaaccctaaagtatagacgtgcctacatatacattatttttctgccgacgtcatgccaacaaacaagcagtggccagcgatttatgtaaactgagaaacaactttgattctggccatgttcaaatacggctgctatggatccaattttcttctcgccaacgaatggaataccgtcagagagtaaactcgccacttatatggtcacgccgcagtcgcccgagttcattccaacgcgccttggctcgacgcccaacttctatgcaccatatcacaacgcgcccatgcaattaagtaatgggctcaatggcgtcaatgggttaacagccgccgcagcagcagcagcagcagccgccgccgccgccgcagcagcagttccctcctccacgtcatcggcgtcctccgcctcggtgaccatcagcaaaacggccaacggtggcgcctccatgctcgccctgcaaaagaccgcatccatcgcctctgtaaccatcgcacaacagcagccacagcatccacagaaacagcaacagcatccgccgtcggtgggcggaggagctgtgtccgccgcctccgcccccattgccattagtggcgctccaccgaatcccgccgcagctccgttcgtcagcagcatgtccgctcagacgccgctcaaggggaggggcgccatgatgcgccaggaatcaccaacggcagccatgatttcgggcgcagggccaggtgagaagtcgccaccgcacgggatgacgccgcacggagcatcgcccataccatcagcgctgcccaccagcgtgcaccaggagaacgtaggcggcaccatatacttctatccgactgccaacgcacagaacagccagcccgtcgtcaattccatggtggtggatggaacgcatccggctctccatggcgtgagtgctgtggcgccgatgagtgcgggcgttccggcggccatgatgtacacggggcatgtgtatccgggaccgtcctccaacgtggtcaccatgcagccaaagacgctgctggagtcggccttctttatgcccgacgagatgcgcgccgaagtcctcgcccgcaacgagatctctaacctgatcatggacgcagcggaggctgcgcagcacgctctaccgctggaggtggagaactaccatgccctgtatccactggaaccgccggcgcagccgttgcacgccaagctcacgttccccgccaccacttatagggccacgcacaacacgacgggctacaagtactgcctgcgaagaatacatggtttccgcctgcagtcgaccaagtgcatgacgctggtggagatgtggaagaagctgcagcacacgaatgtggtacaactgcgtgaggtgttcacgacgaaagcatttggtgataactctttagtattagtgtacgactatcatcccggctcacaaacattactggccaaatacttcactccggcgccagagaccaacgggtacactgatccattccaaggcgaggcccgccccttcagtcataagagtaacatgcagcgaacgagcaatggaccgctgctaccggaggccaccatctggtcgatcatcatgcagctgaccgccggcttaaaagccatccaccatgccggtcttgcctgcaaggttctggatcccacaaagattatagtgacgggcaagcgtgtacggtttagctcatgctgcatttcggatataacgcaattcgatccgaatgcatccaatcccttggcgctggttaatatgcatcagcaggacgatctgaccgctttgggtcgcttagtattagctttggcctgccgctgtcttcaatccgtgcaacgcgacaatgtccagtccagcatcgatatggtcacgcgaaactactccaccgatctgcgaaactttattgtttacctcttcaccaccaataatcgtcgctccgtgaccgacctgatgccgatgattggtgcccgcttctatacgcaactggatgcactgcagagcaaaattgatatgcaggaggacgagttggccaaggagatggagaacgggcggttatatcgcattttggtcaaacttaatagcatcaacgagcgacccgactttaatctggactgcacttggtctgagactggtgatagatacatgttgaaattattccgtgattatttgttccattccgtcactgaggatggccggccctggctagatcacgcacacattgtacaatgcctcaacaagctggatgctggctccatagagcgcgtgcaactgatgtcccgcgacgagcaatcggtactcatcgtctcctatgctgaactcaagaattgtctggagaacgccttctccgaactgatgtcaagtgcggccaactga

SEQ ID NO: 28491 - protein, 742 aa, DROSOPHILA; identical to SEQ ID NO: 28488

SEQ ID NO: 28492 - DNA, 8673 bp, DROSOPHILA
atatcttgcagtgcgtaatcagaatgcgatgccctgcgatcgtggtgtataagggtcattgcaaccgagactgggggcctctcaaactgtgagcacttttgtgctgtaagagcaataaataagcaaacaaacaaacaaacaaacaacgccaatggattttcattgttcttactgctgcgcgtgtgcctccagagcttgaactttcccagtacagtggtgattagctggcccaaactacaatcgtgggagtattaaactatacgcttgataggctaattaatagaagaattgagcagttgggtaacattatggctagtcttcgtatttaattatgtacttataatccatccatgctaagcatgaatacatgaatgtgttcggaaattattatagagttatgtatgagtttccagagatttctcaagcaacccctaatctataaattctgccaactttattcagtgcaaattgaagatagcactgcttgactgtatctgcagcaatatgcaagcaacagcaccatctgcggctatgaccacatatttacagttaatcggatggacgggcgagcgagcggtccccacaccacacgcccactttgtcttcgccgctcgtctgtcatcgtcacacagtttgacacgcactgtggggctcgcgctctctgtttttttttggctctcacactctccagccagcagaggcacagtggaacgaactagtaaattcagtaaaacatgttaaaagtacagatgtggatatatttcaaaataggaatagacaatatatttaaatttaaatagattcgaacacaaatctctgcagtgtggtgaacaaatttatggaagcacaaacgaattcatttagatttcgtagcttttgcgaccactgtgcgcagtcgctgcctgccgcgtttccccaaagcaaaacagcggttgggggtttcagtttagagaacgctgcactgccgctcggttcgtggcgcgatcgatggtcttggttggtccccccattttaaccgatccgatgtgttattttcaccgcttgcatattcattacacttacacgaaaacaattacgcgcctctgctctttgaataacagcaacaaagtgagcccagctgggcggtaaatggtaggccttaagaccgctctgccacatctacatattcacttaacgtgacgtaacagcgcggtttttgttattgtttggcctgctccccaaacgtgtgactatctatatacgaattcgaaaaaatatatatgtatgtatgtatgtatacacaaacgtgtatatgtatgtatctgagtgtggcgttttcatgaacgcgttcgtgatctttgaagcaaagctgtccatttcaccgcgaaacgcagcataaggcaacggcccaataatcatcggttttctatgtgtaaatataaactgaatacttacatatatatgtatatataactgaagaccaaaatcgctcacgtaaaccctaaagtatagacgtgcctacatatacattatttttctgccgacgtcatgccaacaaacaagcagtggccagcgatttatgtaaactgagaaacaactttgattctggccatgttcaagtaagtttcggccagcccaactgtggacaacaacacctgattgaggctctcaaactgtggcccagtcctaacaggttatcgcccaccttctccgccccctaattaccctgcccagtgcacagaatataaataaattaaggcacacataataattatcattaacatatgtgggcattcaattaaatcgttttgctttctgttcgctcgctcgttcgtgtgtttgtttttcaattcgaagtcaaataaataaaatcgggctacgaattattgcttatatggccacagcatcatcaacagcaacaattatctctcaattcataatcaatatttggcctacgaattctaactacccttcaaaacaaaatttatatgattcagtgttctgatagcagcgaaattattcgaaagtaacatttcaaaaacatttgagttgttttagaattcaagcactctagccttactagcccatatcaaaaaaaaaaagtataatcctttgctacatttattatattatagtatatatctgcagtatctgataaaatgtagtcgataaacgtatcattcgtcgtcgtctccccgccgaaattgcacgaatagtgaatacaacctgctccatataaatataaaatatttgtacgtatattcgtctatatgctatatagcgaattcaaggccaatatcacttgttttctcttcgtacattggcaagaggcattggccccgtaccccgaatcaaatgctttgcttttcaaattaaatttttcactttcggtttgtcgaaggcaaattcacttgcattcgaatctcgaaacaagtcgaggggagtctgcttagcattgattcagcactcgaatatccggtggagagtcgttcgaattttagagaactttgaaagctgaccaagaacccagcatagcactcatacgtggattagtcatgacggcgctgcttccgagttgtctacataggaggaaggtatagtgattaacacctgagcagcctgaccgtagcacgcacgcatataccgattatactacatacaaatatgtatgctgttgtattattatatttcctttaaaatgtgcaaattgccaagttctaagtttggcggctcagttgtttaccgcagaaattgcgtcttggctttatttgcgtcgacctggagtcgcaagaggaagcgggagcagccaaacagccatatatattgcgcatactccaaaaatgttggacctacgcgcgttatcgtcgtatcgataactgtggaaaataacaagaactttggtgtggggttggaaagtgtgaggaactgaaaagggtagggatgggaggggagggtatgggagggcatcgaagggggtgcggaatagtttgatggagcaggcttatcgcgccaacagcaaacatagtattcatgttgatgtttgtttaattgatttctaatcaattatcggctgtaacgcaactctctcactatagtaattcccatttttgtgctctatttgtagatacggctgctatggatccaattttcttctcgccaacgaatggaataccgtcagagagtaaactcgccacttatatggtaagctaacttcccattccctcaattagctcttatcagagtccctccaaaataagaaactcacgaaaacagggcgataagagttgaggggagattatgataacaccactgcccatcgaaaaccacccactgaaagcagctgttggcccccaaattaacagctggccacgtttgctcaagtatttttaattatgctttatttgttttcactcaatttactcgaaccatttcagtttcaacgctcagtcgctcataatatacacttgaccgactttttcggttttattttttttttttcaattttatttttgggtccactgacacacaaagtgccatataagtcgtatatgcaagttaaatatcaatttttgtttatgcatggattttgaattctctctggggtggcaaaaactgggcgtacatacatacatatatgtttggcgaatcttaaacagctcggcaattattaactataaaatattaatgtgccagccgcataattgccatggaatcgtgctaatggaaaagtatacggaatataatggcattaagtggcatatttgtcgctcaattcatttttacaatgcgaagatcagcaaatcgaatggagcaattcaatggcaatgtcatgcaaccaagacaggcgttaaacattttagtttaagatccgaataattagttacttaatacgtacaacaatgtctgatatatgaagttgtgctattcagataagataaaaatggcatagactagacaaaaacactctggttgaatcagtagtatttttagcaaactgcactcaaacaagaaatcaaagatatttcaagcaatcctccttgaaaaccccactcatatttgtaatttgtaagatccaattattatttgctctactatctttaatttgaactcccactacaactgaatttttcacttttttctttgtatctctccgaatttcaatctatccgtctactccgatttttggtctctcatcccagaatcgacagaatgtcgccacaccgagcggttatgggctgaataacgggttctcactacttaatttggattcgcccctaaataaaaagtcccaggtaaagccgtaaatatctggttccccatcccattgttctccgtgacatccatgaactgtgttagactagtgaatgcttccgtagaggtctataccccttattagccccttagcatagtagttagtttagttacgatcccatcctaaaaagtgtacaaaagtgtcttactgtgtgttatttacaggagtgtttcaattttcgattcggcaaccccttaaattgactcctgccgaataagaaaatcgaaacaatcgcatgaaaatcgtggctaataactctcatttaatgaatttcccatcccaggtcacgccgcagtcgcccgagttcattccaacgcgccttggctcgacgcccaacttctatgcaccatatcacaacgcgcccatgcaattaagtaatgggctcaatggcgtcaatgggttaacagccgccgcagcagcagcagcagcagccgccgccgccgccgcagcagcagttccctcctccacgtcatcggcgtcctccgcctcggtgaccatcagcaaaacggccaacggtggcgcctccatgctcgccctgcaaaagaccgcatccatcgcctctgtaaccatcgcacaacagcagccacagcatccacagaaacagcaacagcatccgccgtcggtgggcggaggagctgtgtccgccgcctccgcccccattgccattagtggcgctccaccgaatcccgccgcagctccgttcgtcagcagcatgtccgctcagacgccgctcaaggggaggggcgccatgatgcgccaggaatcaccaacggcagccatgatttcgggcgcagggccaggtgagaagtcgccaccgcacgggatgacgccgcacggagcatcgcccataccatcagcgctgcccaccagcgtgcaccaggtgggttaaatcaaactgcctgctttatgtactccctaattatcctttaataattcttttacaggagaacgtaggcggcaccatatacttctatccgactgccaacgcacagaacagccagcccgtcgtcaattccatggtggtggatggaacgcatccggctctccatggcgtgagtgctgtggcgccgatgagtgcgggcgttccggcggccatgatgtacacggggcatgtgtatccgggaccgtcctccaacgtggtcaccatgcagccaaagacgctgctggagtcggccttctttatgcccgacgagatgcgcgccgaagtcctcgcccgcaacgagatctctaacctgatcatggacgcagcggaggctgcgcagcacgctctaccgctggaggtggagaactaccatgccctgtatccactggaaccgccggcgcagccgttgcacgccaagctcacgttccccgccaccacttatagggccacgcacaacacgacgggctacaagtactgcctgcgaagaatacatggtgggtagatgttactcctttctcgattgtacattagtaaacattttaattgtacttttaggtttccgcctgcagtcgaccaagtgcatgacgctggtggagatgtggaagaagctgcagcacacgaatgtggtacaactgcgtgaggtgttcacgacgaaagcatttggtgataactgtaagtggggaaaggtctttggaaccattagctattagctataagtgtgtgtttaatgctgctcctggacattaaggatgttgtcacctgtataatactggggtattgttagaaggttaatacactatatttagagtacattaaactgataggattgccaagtttgcaaggaatgtattgtatacatgtcatgcatggcggaatgttgcgattactgctcctatttatagctctgcacttcaaattgggtaatcttaactagtcagtgaatatttattacaaatcgttagtcactgataaaaagaaagttaaaagttaaccttgattcttttgcaatattatggcttcacttagtctgaagatgaagtagggtattttaggtaaattcaaacctactagttaccatgtcaataatttttatcgggcacctacagctttagtattagtgtacgactatcatcccggctcacaaacattactggccaaatacttcactccggcgccagagaccaacgggtacactgatccattccaaggcgaggcccgccccttcaggttcgtttttctttgaccatgatcatattgttgctcaaattattaattatttacttattgcagtcataagagtaacatgcagcgaacgagcaatggaccgctgctaccggaggccaccatctggtcgatcatcatgcagctgaccgccggcttaaaagccatccaccatgccggtcttgcctgcaagtatgtaacaccccgcttgttatacagccagagtctaattgatcattcatcttagggttctggatcccacaaagattatagtgacgggcaagcgtgtacggtttagctcatgctgcatttcggatataacgcaattcgatccgaatgcatccaatcccttggcgctggttaatatgcatcagcaggtaagatagttttttctactttcctgtataactaatactaattacattggttcgcatgtctttaggacgatctgaccgctttgggtcgcttagtattagctttggcctgccgctgtcttcaatccgtgcaacgcgacaatgtccagtccagcatcgatatggtcacgcgaaactactccaccgatctgcgaaactttattgtgtatgtataatctggtataggtactcaactgacgaaataacccgtgtgattttcagttacctcttcaccaccaataatcgtcgctccgtgaccgacctgatgccgatgattggtgcccgcttctatacgcaactggatgcactgcagagcaaaattgatatgcaggaggacgagttggccaaggagatggagaacgggcggttatatcgcattttggtcaaacttaatagcatcaacgagcgacccgagtaagtttgcaaattaatgcacataagcttaaaatacaatcttcatatcaatgcattcatttacagctttaatctggactgcacttggtctgagactggtgatagatacatgttgaaattattccgtgattatttgttccattccgtcactgaggatggccggccctggctagatcacgcacacattgtacaatgcctcaacaagctggatgctggctccatagagcgcgtaagtaaagtcggaaaaggtcggccagctggttcggaggtctcacaaagctaacttggcccacatttgcaggtgcaactgatgtcccgcgacgagcaatcggtactcatcgtctcctatgctgaactcaagaattgtctggagaacgccttctccgaactgatgtcaagtgcggccaactgagcaacccgagggtaaaagaaaaacagaaaacacgcgcagctcacttagccaccatccgcacgaccacaaaacgactacgataaaggattagatactaagcaaaacattcattacgactaagacattttgagaaccataaacaagtaaaatacgaagatgtttattgttaagccaaaccgaaaaaggaacttaaaagaaaaaaaaaaagtgaaaaccgatatccaatgttatgttagctcttaactaaattttaggcatttaaaacaatacaaaaagaaacaaccgcaaccacaaaaaataaaccaacaactttttgaaaccgaaatctctccaaaagaaaaaagcaaaaacacaaaaaaatgcaaacattacaaaaaaaaaaacaagaaaaacgaactaaaagcaaaaaaatttgaaaaatttgttaaaaaatgcaaaaaatacataaaaaaaaaaggaaaaaagaaatcacgaaaaagagccgagaaaacatggatctatttttacagagctaagagaggatgaaagtatttataaatatgtattaaaaatcgaaagaaaaaaattgtaaaattttgcaacaataaataactgtaatgacaaacaatggcaacagtgcagcaaatcgttgagcaacaacaaaaaaagataaattcaatgcagagtagatggataaggataaagattatgagaaacgtagagaaactaagaaagtgaacaacaaggaaccacatcaaatgtttataaagcatgtctgacaatgatcgcctgcctcttctcccctacagtaaacaaaaaatacatggaaaagaagttacgaaaccgaaaacaattggataggaacgaaaagcgaaaggcgcagacgagctagaacgacagccgataacgttttttatttttcaaactgtattttttatagcaaaatattttaaaatggaaaaacacaaattttctaaatacaatttaaaatgtttacaaaaaccaaaaacaaaacgagatg

SEQ ID NO: 28493 - DNA, 2371 bp, DROSOPHILA
gtccccccattttaaccgatccgatgtgttattttcaccgcttgcatattcattacacttacacgaaaacaattacgcgcctctgctctttgaataacagcaacaaagtgagcccagctgggcggtaaatgatacggctgctatggatccaattttcttctcgccaacgaatggaataccgtcagagagtaaactcgccacttatatggtcacgccgcagtcgcccgagttcattccaacgcgccttggctcgacgcccaacttctatgcaccatatcacaacgcgcccatgcaattaagtaatgggctcaatggcgtcaatgggttaacagccgccgcagcagcagcagcagcagccgccgccgccgccgcagcagcagttccctcctccacgtcatcggcgtcctccgcctcggtgaccatcagcaaaacggccaacggtggcgcctccatgctcgccctgcaaaagaccgcatccatcgcctctgtaaccatcgcacaacagcagccacagcatccacagaaacagcaacagcatccgccgtcggtgggcggaggagctgtgtccgccgcctccgcccccattgccattagtggcgctccaccgaatcccgccgcagctccgttcgtcagcagcatgtccgctcagacgccgctcaaggggaggggcgccatgatgcgccaggaatcaccaacggcagccatgatttcgggcgcagggccaggtgagaagtcgccaccgcacgggatgacgccgcacggagcatcgcccataccatcagcgctgcccaccagcgtgcaccaggagaacgtaggcggcaccatatacttctatccgactgccaacgcacagaacagccagcccgtcgtcaattccatggtggtggatggaacgcatccggctctccatggcgtgagtgctgtggcgccgatgagtgcgggcgttccggcggccatgatgtacacggggcatgtgtatccgggaccgtcctccaacgtggtcaccatgcagccaaagacgctgctggagtcggccttctttatgcccgacgagatgcgcgccgaagtcctcgcccgcaacgagatctctaacctgatcatggacgcagcggaggctgcgcagcacgctctaccgctggaggtggagaactaccatgccctgtatccactggaaccgccggcgcagccgttgcacgccaagctcacgttccccgccaccacttatagggccacgcacaacacgacgggctacaagtactgcctgcgaagaatacatggtttccgcctgcagtcgaccaagtgcatgacgctggtggagatgtggaagaagctgcagcacacgaatgtggtacaactgcgtgaggtgttcacgacgaaagcatttggtgataactctttagtattagtgtacgactatcatcccggctcacaaacattactggccaaatacttcactccggcgccagagaccaacgggtacactgatccattccaaggcgaggcccgccccttcagtcataagagtaacatgcagcgaacgagcaatggaccgctgctaccggaggccaccatctggtcgatcatcatgcagctgaccgccggcttaaaagccatccaccatgccggtcttgcctgcaaggttctggatcccacaaagattatagtgacgggcaagcgtgtacggtttagctcatgctgcatttcggatataacgcaattcgatccgaatgcatccaatcccttggcgctggttaatatgcatcagcaggacgatctgaccgctttgggtcgcttagtattagctttggcctgccgctgtcttcaatccgtgcaacgcgacaatgtccagtccagcatcgatatggtcacgcgaaactactccaccgatctgcgaaactttattgtttacctcttcaccaccaataatcgtcgctccgtgaccgacctgatgccgatgattggtgcccgcttctatacgcaactggatgcactgcagagcaaaattgatatgcaggaggacgagttggccaaggagatggagaacgggcggttatatcgcattttggtcaaacttaatagcatcaacgagcgacccgactttaatctggactgcacttggtctgagactggtgatagatacatgttgaaattattccgtgattatttgttccattccgtcactgaggatggccggccctggctagatcacgcacacattgtacaatgcctcaacaagctggatgctggctccatagagcgcgtgcaactgatgtcccgcgacgagcaatcggtactcatcgtctcctatgctgaactcaagaattgtctggagaacgccttctccgaactgatgtcaagtgcggccaactga

SEQ ID NO: 28494 - protein, 742 aa, DROSOPHILA; identical to SEQ ID NO: 28488

SEQ ID NO: 28495 - DNA, 3984 bp, DROSOPHILA
gtttgggaagcgctttggccagtttcgccctgtggcttcagttgcaaggagagccacaactatccaaagtactcctacatcatgctaaacagcgctttccgcgtttgcccagcgccgagggttggatgataagccagtgtcatgtggtcattcaggcgggaatctaccagtgtcgctggcacgatgctctgaaggcttgcgatcagctatatttgatcgatccctctgactccttattccaacgtgcctccatatatgtggccaagcgcgagtttttcaatgccaggcgcctcctggacaagttggccgtgcaggataacataccattcctccttaggatgagggttcaagtgttgcttggttattgtggcatggcgaacggtcgattttcaagtgaaacaacaatgcttctgctccgtgtgtccgaggaaatgtccgaggcccagatggattatgagttagctctggtggatctgctcttggccctgcaactattgctactcggtatgccgcagaaggcctatcaggcaataaagcgctgcatgcacgacattcacatcaacggcggtctatatgaacgagcaaaaacggatttcgtgttcgttcgctgcctgttggccgtcaatcagaatgatgcggagaaacggaaagcgcagctgcttaaatcgcaagtaatcctccagcgtgcagctcaatcattcaagaaactctccgcacatgcgaaggttttggatgtgtacgtgttcttggcacagcgatttaacgaatttggcgatcggaatttaaggaataagtacgctggagagttccgacgctactttacggatcaccccattccaagggaatatctgggtagtccttagtttccgtctgttgttaaattctaaataaacttgttcttacaacctaaggaatctcaatcttacctaaagtttttcaattcacaagcacacagctgaattattttgactattaataaacgtagttttattaattggtttaaaccgcagtggttgcttgtttatacactgtacgccaactgcaatgctaacacctatctgaagttttgcaacggctcgtttcgattgatgaggacgtcctttttttgggggccggatgttcatagagtgtggatgcgtaaatgctgcgctgtgaagtggcatttaatgggtggctgctttattggggggaatcgctggacgtcctgcaccgctcgatttcgactgggattgattggtatcgacaaacttaagctaacgtgtggcaatttccggatttccgatgccggttatcgtagagctaatatgcgtatgtggtagggggtctctcatggttaacgaatcaagggtaagctgggcgacggccctccaggacccatcgcactgccgggtccaagaagcacctgcttctgctgcgacttgtgcagctcctccatctgggcgcgctccgtctcgaagatgaccggggcgaacaggataaccgcgctggtgaagaatatccagctggcgttgcacgagaacgagtagaagcccttgacgctcttcaccgtggcgctgctcacggcgccgactgcattcctcactggctccgggaacatctcggttagtccccagaagcgctcggatgccgtctcatcgggctcctgtgtattgtgaacagaaatgagtattaataatctttaaaaggtgcttcttctaagcaattaaattatagatgtaacgccatattctattcattatttacaatcaaagtaaccttataggattttgatgaatcaatattatatacaaactacttacaagattaaatcttataatgcaatttttaaataaaaacagtgcataattatgttaaagttacaggaaaaacaagtttatgatgacaatgacctttatcgcgtgcacgttgtggctaacagctgattcatttcttggccaaaaggccaaagctaaatttgtaaataaactcatgaacctaaataagctgtttataaacttgagatcctcaagactattgctacatttggaaaacacctagaatgtccttaatgtgcgcctccctcccgaactttgaggttagatttcgtgctgtgtttacaaacagggtccacttacatcatcgtagttctcgcgttgcggatcattggaggtctggaagaaatgggagaatgaaaggtattattgaggggtatcagtggattcgttttcatgcgccagctgctttgattgaccgacaattacgtgagcacgataagaagtcgaggggattgggggctacttggttttcagcggggtgggggagccaacgaggggccaccacgtttttacttacggcagccactgcccgacgctccggcgtctcgtccttgctgccgcctaacgacgacatgccgctgtccttttcaatgaactcgatttcaggatcagagtccatcaaatcctcgattttcactgtttcggtatccacttttgcggctttcaatcaacgcacacggtcgaaaatcgcgggtttgtgctctaaagcaaccctttgaaggaacacggaagtatcttatcaccggaatcgctcacaaaatccagttcgcactggcatttaattgagcttgagcggaggattcgttcgcgttcgcttaaaatttatgtaaaaattgattttataaaatgctcctcgtgagcttagtggtgacctcacagcgatagactccaattggccatattaatcgatttatcgcggcgcattcatgagaaatctcctagcgcgtgcaagtgcaacgctttttcaaattctcttacatcttacacacttaataatttaactttaaatgtttatattctacatcttaggcttgggtcagtagaaacactcacctttccctcattgtagtcacccattgtcgttaatcaactgcgttaagagtttaaaaatgaaaatatatacaatattttgtggagcctgaaatttagaaacgttgtcaaatcgaacagcacaaatttacaagtactttgatttccgatttctggattggcaaccgaaaccagaaaggaaaaagcctactattagtaataaaacatttgttgagcgttcgtgtaccgtttttatttattatgccacatctcgttttccgaatcgaaatcgcatttataaattatgaaatctttaatacctattccaattatctaccactttaggtacgcatacagatagtgtcttagttcttgtgtgtgtttttccagtatctatacatatagaagataatattaagtatgtagtttgatcattaacataaacagtaatcgtgtatataagtagtaatattgttgggtaggtatatagtcctgcatatagttggtaagcacattaagaggtcataaaaaactacttgcatcgaagtacatacatacattatatatcaggtatattcaatgttttgggctagagtttaatttgattcggtcttcgatttttgattaggtttaaacttgctttgcctttgcagtcctgttgtaaataccatacaaaagttgtggttttttatttgctttccttgtgtttacccaattttgctatttgtacctttgacctgattatatttactccacgcaacttttatccatatagtattttaaatgtatgtaaatatatatatattttaattctcgtttcactgatttttcaaaagagcacttttttatatatataaattgtttaaattgtattttatggttttcgtttttaacttttctaaatttgtatcaaaaaagggcgataaactaattaaaacttattatttgaaaccacgatacctcaaatcgatgagttgtaattgttataaaaatcaattgatattttttgctgaattatctatgggacggcaatatgcaatggactgaatttggaaaatcaatcaaaaaggaaccgaaaacaaacaataattcaaaaaaaaaaaaaaaattacttgtctttaaacttttaaatcctagaact

SEQ ID NO: 28496 - DNA, 795 bp, DROSOPHILA
ctgttcgatttgacaacgtttctaaatttcaggctccacaaaatattgtatatattttcatttttaaactcttaacgcagttgattaacgacaatgggtgactacaatgagggaaagacctccaatgatccgcaacgcgagaactacgatgatgagcccgatgagacggcatccgagcgcttctggggactaaccgagatgttcccggagccagtgaggaatgcagtcggcgccgtgagcagcgccacggtgaagagcgtcaagggcttctactcgttctcgtgcaacgccagctggatattcttcaccagcgcggttatcctgttcgccccggtcatcttcgagacggagcgcgcccagatggaggagctgcacaagtcgcagcagaagcaggtgcttcttggacccggcagtgcgatgggtcctggagggccgtcgcccagcttacccttgattcgttaaccatgagagaccccctaccacatacgcatattagctctacgataaccggcatcggaaatccggaaattgccacacgttagcttaagtttgtcgataccaatcaatcccagtcgaaatcgagcggtgcaggacgtccagcgattccccccaataaagcagccacccattaaatgccacttcacagcgcagcatttacgcatccacactctatgaacatccggcccccaaaaaaaggacgtcctcatcaatcgaaacgagccgttgcaaaacttcagataggtgttagcattgcagttggcgtacagtgtataaacaagcaaccactgcggttta

SEQ ID NO: 28497 - protein, 122 aa, DROSOPHILA
MGDYNEGKTSNDPQRENYDDEPDETASERFWGLTEMFPEPVRNAVGAVSSATVKSVKGFYSFSCNASWIFFTSAVILFAPVIFETERAQMEELHKSQQKQVLLGPGSAMGPGGPSPSLPLIR

SEQ ID NO: 28498 - DNA, 4519 bp, DROSOPHILA
attaaaccattattcctctattttagtggcttgctagcgaggctctgcacaacaatcccaaggtggaagccagtccatgtggcaccaagttcagtttcaagccagtctacaagatcaaggatggcaaaacgctgatgcgtctgctcaagcaacatgatttaaagggcctgggcggcattttgctggacgatgtccaggaatctctaccacactgcgaaaaggtgctgaagaaccgatcagccgaaatactttttgttgttagacccattgacaaaaagaagattttattttacaatgacaggactgctaatttttcggtgggttataaacacactcttctaaaatcccagcctaatcaattgtaccgtctcaggtggacgacgagttccagaagctatggcgctcggctacggtcgatgcaatggacgacgccaagattgacgagtacctcgagaagcagggcattcgctccatgcaggaccatggcctcaagaaagcaattcccaagcgcaagaaggcggccaacaagaagcggcagttcaagaagcccagagacaacgaacatttggccgacgttctggaggtctacgaggataacacactaacgctgaagggtgtgaacccaacgtagaatagagacattagattatacaaataaaaaccactctcaatggaattaagtacactcgaaactggatgttataaatttgtttaaccactgccaatctaattaagaatccgctgtggccgaaatctcattcctcaagatttatagtaccagattgctgttctgcctgtggcattgaacttaaaaatatgacgaccggcacagggaaagataattaaaaagcaaaactatgtaatcttttcctgacattccccattgctttccacacctgatggctggtggtgtgcgtgtacgagggccagaatcgatgctggtgggcagttaaattggcaacagagggaagccgtagctttagtctgcactgaacagcagccaagttcagttggaatcgatttggaataacctatattttggtacggcggttgtgcgggcttatcaggaaaattatctatatattggactctacaaatctaaaaaaagattgtgttgctatttgtaatctattaagattataacaagagatccgatattcagtatagacaaaaatatagctcatacgactcgtaaatcagtcatattgcaaactatcgttcgtcctctaacttgttcaatttaaaagatagggtattcataagtggacttgcatgaaatccgattctttgtttacttggcttgactctttggcacggacaatgagctctctactcggcggcaaaaacttgttttgaaatactcaatttgtttaattatcattcccgaagcattcgccagttggttttgagagtttctgtgctgaggttgacgaaatgaagtcgacgcggactgcacttggagtggccctgctcctggccctggtgtctcaactggcggcccacagctcggagtgagtaaatcaaacctcgtatgctatatagattaggtcactgactttctctttgacttgattcccgcatccagtgacttggtttacggctacgagtgccgcagtggctactgccagaaggtagagctcagcgaggagaactacgtcaaggccatcagtctgcccgtgtgccggctcttctgcggcagctccatcggcaccttgtggcccaaaccgacgggcactgtgcgtctggacacgttgatgcgccaagtggacatctccttcattgatttcaatttcaatggaattgcccgccagcagaagctatggcgagcggttgaagaccgtttcatgaacatgctcgaagcccagattccggatcgcaaggttctggcacgaggtggctaccgtatgtctgtgaacatcaatactccggatgagccgacaccggccagactcaccctggatacggatgagagctatacgctggacattgatacggatgcctcgggtcatgtgctggccaacataaccgcgtccaacttctttggagcccgtcatggcctggagacactagcccagttgattgtctacgatgacatccgccgcgaggttcaggtgactgccaatgccaccatcaacgatgctcccgtgtacaaatggcgtggattgctcctggacacctcccgtaactactactctgtgaagtccatcaagaggacgttgggtaaggcaatggttcaggaaagaggcaggggagggttatgttttccgttgactctatgagtatccttttttcctccttagagggcatggccttggtcaaactgaacaccttccactggcacatcacggactcgcacagcttcccattggaggtgaagaagcgtccggagctgcacaagctgggagcctattcccaacggcaggtgtacacccgtcgggacgtggccgaggttgtggagtacggccgcgtgcgaggcatccgtgttatgccagagttcgatgcccctgcccatgtgggtgagggctggcagcacaagaacatgaccgcctgcttcaatgcccagccatggaagtcgttctgcgttgagccaccgtgtggccaactcgatcccactgtgaacgaaatgtacgatgtgctggaggacatttacggcaccatgttcgatcagttcaacccggatatcttccacatgggcggcgatgaagtgtcaaccagctgctggaacagcagccagcccatccagcagtggatgaagaaacagggttggggcctggagaccgccgactttatgcgcttgtggggacacttccagacggaggctcttggtcgcgtggacaaggtggccaatggtacgcacacgcccatcattctgtggactagtggactcactgaggagcccttcattgacgagtatctgaacccagagcgttacatcattcagatctggaccactggtgtagatccgaaggtaaagaagattctggagcggggctacaagatcattgtgtccaactacgatgccctgtacttggattgcggcggagctggctgggtgaccgatggaaacaactggtgctccccctacattggctggcagaaggtgtacgacaatagtttgaaatccattgccggcgactacgagcatcatgtattgggcgcggagggagccatttggtcagagcagatcgacgagcacacactggacaaccgcttctggcccagggccagtgccctggccgaacgactttggtcaaatcctgccgaaggttggcgccaggcggagtcacgtctgctgctccaccgccagcgactggtggacaatggtctgggcgcagaggccatgcagccgcagtggtgcctgcaaaacgagcacgagtgtcccattgacgcgtacgatgcacaagtttgaccagctattaaaccatttctcttaacggtcgctatccttgtagatgtagtcggggcagcgggcggcttgggttgatcgtcctgttgcttctcacaacgctctctgcctgaaaataaagtacagctcaaaggtggccttacgcaagtgacttgtcgtttattttgttaaatataaatgagattattggccctgctctgcgcccttttccgattcaaagcggcagaatgtcggaaatagtgagggaaatccgtacagactcgacgattttttcgaatatgaacagtagcagagttggacattttacgcttcaatgtgtggggtgaggatttgcgagtgatggtgtcctcggcctcaagcataaactccttggactcctgattatgtacgtaatgagtctagatactaaaagctgcgttcccttgtgcaataatttgaatggaagctttactcattccactcttcctcgttgcgtccaaacttgtagaccaaactggcgaacaggatgaagacgttttgcatcagcagagccacgccaaaccagccatccttcttttctgaaaaacgataagtgggtgcaattcagctaaggaatccttaaatatctgtttatttctcaccattgttgatgaagtcgtcgatcatcacccagatggcggcaatgatggaggcaaaacccattaggaagcccacaagcagccagatcttcgctatcctggcgccggactccgatgagttctcatcagaaatctgcgcacaaacaaaagaagtgagtcacttgttaagcccaatgataagtgtgtgttacatgttctcccttcactgcgttcaccatgcagaagctgatggtcccgaagatgccgatgaagacgtgtcctgtggtaatctggtgcttgccgtcgatggacatggcatcgattagaacccaccatcctgcgaaaaactaaggagaaaaagttgcactgtcaggcgggcggctctttgtttgcgggtgttagcctaccagaagtccggctattatggaggtgttcctgttcctggacgcatcccccgtgaaatgcaacgcaatattgtccaacacgcccattgtttaggttttaaaacgtaattaaa

SEQ ID NO: 28499 - DNA, 2097 bp, DROSOPHILA
ccaagttcagttggaatcgatttggaataacctatattttgatagggtattcataagtggacttgcatgaaatccgattctttgtttacttggcttgactctttggcacggacaatgagctctctactcggcggcaaaaacttgttttgaaatactcaatttgtttaattatcattcccgaagcattcgccagttggttttgagagtttctgtgctgaggttgacgaaatgaagtcgacgcggactgcacttggagtggccctgctcctggccctggtgtctcaactggcggcccacagctcggatgacttggtttacggctacgagtgccgcagtggctactgccagaaggtagagctcagcgaggagaactacgtcaaggccatcagtctgcccgtgtgccggctcttctgcggcagctccatcggcaccttgtggcccaaaccgacgggcactgtgcgtctggacacgttgatgcgccaagtggacatctccttcattgatttcaatttcaatggaattgcccgccagcagaagctatggcgagcggttgaagaccgtttcatgaacatgctcgaagcccagattccggatcgcaaggttctggcacgaggtggctaccgtatgtctgtgaacatcaatactccggatgagccgacaccggccagactcaccctggatacggatgagagctatacgctggacattgatacggatgcctcgggtcatgtgctggccaacataaccgcgtccaacttctttggagcccgtcatggcctggagacactagcccagttgattgtctacgatgacatccgccgcgaggttcaggtgactgccaatgccaccatcaacgatgctcccgtgtacaaatggcgtggattgctcctggacacctcccgtaactactactctgtgaagtccatcaagaggacgttggagggcatggccttggtcaaactgaacaccttccactggcacatcacggactcgcacagcttcccattggaggtgaagaagcgtccggagctgcacaagctgggagcctattcccaacggcaggtgtacacccgtcgggacgtggccgaggttgtggagtacggccgcgtgcgaggcatccgtgttatgccagagttcgatgcccctgcccatgtgggtgagggctggcagcacaagaacatgaccgcctgcttcaatgcccagccatggaagtcgttctgcgttgagccaccgtgtggccaactcgatcccactgtgaacgaaatgtacgatgtgctggaggacatttacggcaccatgttcgatcagttcaacccggatatcttccacatgggcggcgatgaagtgtcaaccagctgctggaacagcagccagcccatccagcagtggatgaagaaacagggttggggcctggagaccgccgactttatgcgcttgtggggacacttccagacggaggctcttggtcgcgtggacaaggtggccaatggtacgcacacgcccatcattctgtggactagtggactcactgaggagcccttcattgacgagtatctgaacccagagcgttacatcattcagatctggaccactggtgtagatccgaaggtaaagaagattctggagcggggctacaagatcattgtgtccaactacgatgccctgtacttggattgcggcggagctggctgggtgaccgatggaaacaactggtgctccccctacattggctggcagaaggtgtacgacaatagtttgaaatccattgccggcgactacgagcatcatgtattgggcgcggagggagccatttggtcagagcagatcgacgagcacacactggacaaccgcttctggcccagggccagtgccctggccgaacgactttggtcaaatcctgccgaaggttggcgccaggcggagtcacgtctgctgctccaccgccagcgactggtggacaatggtctgggcgcagaggccatgcagccgcagtggtgcctgcaaaacgagcacgagtgtcccattgacgcatgtagtcggggcagcgggcggcttgggttgatcgtcctgttgcttctcacaacgctctctgcctga

SEQ ID NO: 28500 - protein, 622 aa, DROSOPHILA; identical to SEQ ID NO: 837

SEQ ID NO: 28501 - DNA, 8778 bp, DROSOPHILA
tcgcttaatgatttcacgtgtgtgagtgttgttgtgttgcagtgttcatgttgcagttgctgtttcgtgggtgtgagttgctgctcgatgagttcggcagatgactcttaaacgctatgtgcggcaaatgtggcaggttcctggcaaatgaggaatttcgaatttggaattggaagccaatatcgctaatgctactgcacgacaaatgaatcaaatcaaatgtaaaagggaaacaatcagaacgtgataatagaatttaggtacatacccgttcaagtacaattaaacaaaacaagttggacgagacgaaacaaaaccacaaatgtaaacataataggcggcaaactcaactcaagtggtgggccaatattaacatatccatcttatccaaatttcatttaaacaaattacaatttaatcaatataaagctctgttctcataaacgctctctcaggttcacacgacgcgaaacaattatttgcatctgcagttgtaaatctgcgctttataatacgtaatcataatcataatattatcattaaggtaatcgattcttgccatatacacaatagcaataaaaactaagaagcgaaattattctacggtggaaaacgaattttggctatgaagcaacgtaatttaaaagggtattattaacaatatacactcacagccacagccacaccccgaccacccgactaccctactcttctttcccttaattgtttaatgttttttgtgtgtgtgttacggtgtgtgtggtgttaatggtgtgtgtggtgtatgtgagcagttgcgttttgttggcaaggcattcaacattacgttgcggaccctcacatccgcggcatctgtctgtgtgtgcttttctgtgtttggatgagtttgcaatgaaatctcgcttgaagctgtatactagctgccccgtccctgaccgttcaccgcctgaatccaagcgagacggcggcgtaggctccaccggaagtgccccaccgtctcctatgagcacttcacacatgcaccctcaacatcaaagtcgaggaccattagctttgtttcctccgttccgttgcgggaaccgacggcacaaatgagtttagtgtcgtttgctctgaaaagtttttagatatagttaattacatttataatgagcggatttatatcgtcttggacttacctaatccgccacacaacgccgccggatccaccagagtccagagccacaagattacgtataaagtcgcccgtcttaacgtcccacaatttcacggtgccatcgtcggaactggtcaccacaaatcgggagttaaattgcaggcaggtgaccgcagaatgatgcttatttggacctaaaggggatttaaggagtaccagattagtagtggatcttttacagcatgttagtgaaaagtaaacacggaggattcaaacttacccgacagcgtttgcagacattgtccggttgtgatgtcccacaccttgactgtcgagtcggcgttgcccgagacaagaatgttttgacgcagttccatgccagaggtcaaactctgatgacccatcagggtgtgcttgcaattgcccgtctccacgtcccacacgcgaatagaggtgtccaatgaacccgataccacatgcaggccatcaaactgtgtgaaatttagaatggtttacggcaaagtccgacaaagaagtgttgactatcttacctgcagcgagtagacgcgatttgtgtggccctgcagtgtgtgcaggcactcctggcgctccggatgccagatcttcaccatataatcatacgctccggacacaatcagcttcccatcgtactgcacacaacgcacagcagccaagtgaccaaccaaaacgtgcagacaggagccttgttcaatgtcccaaaccctcaaggttgcgtctcgcgagccactgaccactctgttgagaaattcgtcaacaatcagcattggttagtggatagttgtgtgtggttttaacttacttgctgccatgcaaatgcatacaccgcacagtggacgtatgcccctgaagtgtgtgcacacatgcgccgctgtccatgtcccagactttgagcgtgcgatccgtgctgcctgaaatgatgatatttccggacatttgggaagaccaaacaccaccggtgtgaccaaccaaagtgcgcaggcactacagttgttgagaaagatatctcgttagcagggaaacattaaatgattgcttgttcgatttactcacctttccgttcaccgctgaccatactttaagtgtattgtcatcggagccggacacaatgcgattgccagagaactgcaggcacgtaatcacatgatcgtcgtggcccttgagtaccttgggcttgcgcacaggtcgcgaccgccagttcatttcgatgatgtgctgacgcatgtaggcggccttccagggcgaagcaattggcggcatgttgccatcgcgtccccgtttcgggcgatcactacgcggctcggcgaggatctgggctttgcggcacttctccttccacaacagattgtcgtcgcacaggaagcgccagctgcggcaggtctgcgctgccctcagcaagtctttgggctccaagtacgagagcacaaagagggctagctctcttggcagcagggagatgaagtcccgctggaactgcggctcaatcaccttcatcatgtgccgcacctgagacggatcgcagtgatcgatgagacggtccagggccagcaatcgctcgacatgggaccatcgttggaattgtgccaaccagtgctgcagctctggtggcggattgtcacgagacggcacggaacgtggggtgcgacgacccaaagccgatcccggcgtggagctagtcagatgcgatgagggcgtcaccgatagcactgccgtgggtcccaaatgttgcgaggagcgcggcgtagatgcaaaatcataggcaatccgcttgcggcaattatcgctcacacctgaacccggtccgcccacttcgccgctggaagatatagtcaccgagtagtcgccgccatccagcagacgtccctcgttgaactttcgtttgcgctgatgagacattagcgagctgggattggtcagcgagtattcggtgaagccagctgaggcagaggacagcgacaaggaaatgggctcatcgggatccatggcgtccatgtcgaaagtctcgctgagactggcattgcttccgccgtagctgcttccgttaccgttctggcatgtgcaaatctcctccagatcggaacagttgttctcctcatcgcagttggcccaaggttcctcggcactaaagtcgccgggctccaccacgccgccgtcccctccgccagctccctcttccaccaccacttccaggtggacaacatcgctggaaccgtttcgccgttgccgaacagatgctgtcgggtttgccccaaccgaccccgctccactagcagctggaggattgctgcgagtcaggaaacgctcctgggtttgggcgctggcattaacctggcgagctgcctttgtcgtcgatgtagtggcatactggcaacggttggacgctccggctccggacgaggtagaagccgatgtcgaggcctgagagtcacccaagcaggccgatccggtggagcaggcagctgttggattgatggcagtggtgcgactgcaaccactttcctgagaggtctgcgatcccaccgagctatacgagacggatgcactcacattctcctcctgatcctgttgacagcttcccccggatgtggacgaaccagacgtggttggagccagactggggtaatcattcgagttggtgtttgtgtaaacgtccgttcgggcagctccagtgcaactggtcgatgactccatggattttgaagtggaactggaaccactccggtgctggctgcagctggaggcgcccaacgaggatcccagatttaatttggcagtggacttgcttagccggctattcgtgtacttgcgactgctcgttggagtcgtggacagatccttgtaggtgtacttgctgtccgatgagacggtccgcccattgctgctgctgggccagtcgtcactgttggccgtacccgatccattggccgccttgcttccccccgccatggacttgatcagacttagattcagtttgttctggctcaccatggagctggtacgcaggattatgccgcccgtgagacgctgctccgtctcaaagtcgcgacgctcgatcagatccatggactcaatgtctgccctcgacaaggcagagctggaggttgagctggagttggaagtggaggcctcctctggggcggcggcgttggcagaggctgctggcgagggattcgaaacggtgttggccgtgaggctcatctgcttcaggcgcactgacataagacggtcatgtagtgagaagcaagtagccccatcgtcgccttcagatggattgtcgtccacgggattaaccggctcagacttaatacatcttcccaaagccaggttctctgcttggtcttcctcacccagcaagaactcatcgctcaatctttttggcttgcctgtgagctccgactgggatcccgttgtgactacctgaccgggatgcggctgggcctcctccacgacgggcgtctccaggaagatcttagatccatcggccgccatgatggtgccgtcggctaaagccaactgtgatgtgttggggcagctgatggcgcccgttacaatgtccactgcgtcctcgtcctcgtcttcaatcagttcctcctcatcgtcctcctccggctcgggttcctcatcatcgtcatcgtcgtttataaggcatacaaccggaggatcttcattatcctcattaaaaaagccctgacgactgtgttccgatgaggcggggtgacctaagtcaggatgaccaccgttcaaggtatccgtggaggagctgtcgtcgacggccaccactcccactgtggacgccgcccccgcactggtgggcagtgagttggaagagctaatctcaaatgtgctggactcgtcgtccaaaactacggcgaaaccatgttgtgagtttgacgacacacacacgtcctccacatcctcccgcagcgttgacatagatacaaaggcttctctgccggctcctacttctgcgtctactgctcctaatcccgattcttctgatgcttctgtttttcggctggttgaggcctgactcttgacccacgtggaggtggagctggtgactgctgactgagtacgctcccctgcactggtcacggattcactgctagcagctgggcatcctctttccataatactttacaggcattcaaaagtgggtaatgcgttctcctgcaaatgttaaagattggttatcgaatggttggaagctggtaacacgaggaagcacttatggaaaagtgaataatagtgttgaaaatagacgctatgaaaatttcaaacccaaggtatgacaaattttacaccgcttacaatgaacgatccttttgtgccctgagaatccaagatgatccgaaattcccacgcaacaagcgcaaactgatggttgcaaaaaaaaattaaatccaagggaatgaaaagcagtgggaaaaatttgttgtaacgacgctgcctctgccggcgtcgttggaactcgaaaaaggaaatcacaaaagtgcatcgaggaagaggctaaaacggcgcgaagtagaatgggcaaaagaagacgaaacgggtattacaacaaaaacaccacaaacagacacacacacataccctaaaaagagagacaacagcaaaaggtattgtaaagagagtgaagagcgagaagtaacggacgtgagaagaagaagcaccaaagatacacagcagccgcagcaccaaacaagaacaacaataacaacaacaccacgtacaccttgcaattcaagccgctatcttttccctccgctttttactgactttcagagatgatcaacgcgggaaagtcactggtgatcgggaaacagtcaccgaactaataggaaaagccttccaaataatttttatactaaagaagtgtatgaccatattcaaatagtttcgacacccaactaaagttaaaatgtacattagtaaatcgttttaataaactgcgttggttgttactaatagaactgtgaaatctatagtcacgaaacatttcttgctgactagagctgagccaagcccaagctaagattacttctgccaatatgctgagtcacagagttgttgactttccaaaatacatacgtattagtcatccattttaaaaagttacattaaaacgtgagttttttacatgggctatataaaatcgcaaacatttagtcgaaaccgaaattccaaataacaagatattagtcattctgtaaaacaaattatttgtgcaaactgactttcttttcctggagaacggaaagaaatcattaattattagggctaagatgtttgtaaattgtatgatagtagtccctattctctagaaattcattgatcctagccagcttccattcaccgtgactgaaaaatcgcagctgcgcatctctgatgtttgacagcagcttgactggccatcacatcctaccagcgcacagacacacacacgcacccgagagagtagaaaaagggatcgccgtaggcagagattggaagatccaggggaggggacaagaaaaccaaggagaaggagaagaagcaaagatcagccattgcagcgcagcatccgcagaacaaaaggggcgagatcacaaaggaattttcagcgctcctgctgttgcatcactgccgaaacagatcagatgtgcaggcatttctcccgaacattttcccatattcgtattcattctcttcccaccctccttctactgcttctcctcctcctcctccttccccacccctggctcgtggcctttggctgttgacctcccgaaaaaacgtaaaatatgtttttagggtctccgctttcacaccgcatttcgatacgcgtttttacctgtgccacacaggacactttggtcgaacatcggggatgcgctcgagaacattttctctctgtggatttagccacgggtgtggagtcgtcataatcgctgcatacacacagacgcacaccaacgcggataatgggcagagacctgtggtcccaaatcccccaaaaatagattactttcgttgcaaattcagagcagcgattgcagcacgctgagcgttccttacggactctttgaccatcctaaccccacttttctgcacctgcaaatgcagcggttggaacacggaggggatagccccataattcgtggagcaaacaacaaaagaaaaatgtggacattgttgtacacacaggcagagtcacgcacacagacgaacccactcgctcgctcgctcgcagctaaagtttgagttcgcgtggtgccttgcacattgtttataaactttaagggcagccaacgtggagggggcactaaaaaaacacaccccactttagcgggcacaatttgttttcaggttttcaactgcacatttaacgcgtgtaaaactttttgcgtttggggcccactctcacacatacaggcgcaacacagcacacacacgttcaatcgaatttttcacatacgttttaaggacgttgctcctcggagattgcctaatttttgcgtttttcagatgactctgtacccagtctatctaaatttctggttttcagatactagaatatgcgtgcaatttgcggatttggacagattttggacccgaaaaaaaactaatgcggatccagtgtgaccaccgctcgaccgttcaaatataccatgggaattcacggcttaagttagggatgtgatggtctccgcgtgactcgagcttggttttaaaaaatgtgatactctgcaagttgtttatatgtatggatttcatgaattatttatgtgttgtaataataaacgtgtttcttacacaatttaattgctcagcaattctacttttcttttttgattgcttatattttatattatatttttgattgcttaattactaaaattattatatgtttaaaaaacttgtttctattttcatagtttttaatttttatacttatattttataacttatagaaatttcttgaaaaccctaaaaatgacatgagtttgttatttattgctatgttataaaataattagaaaccattacagcaaatatcgttaatttgtttactagtgatagagtgtggtaacactagcatttccgtccacacaatgttaaggtcacactcagaagctgcaaatttcgaatttcgacggtcgctatgagtggagctctcggagatgtggtgtccgaatacctggagcgcggcccagtgctcgtggtggcggacctccttagcctgataacggtctcgtcctgcctggtgatcaaggttccgcagataaacacgatacgggcgaacgagtcctcgaaaggtgagcaccgcccacacaacatctgcaacctatcctcccactcatatgatacggatttatgaattaggcatcagtgttttgggactgtgcctggagctgttcagttatacggtgatgttgtcgtacaactacaccagtggctacgacttcctctcgtacatggagtatcctgttttgctgctgcaggagtacgccctgatttactacgccttcaagtaccaggatctgctgggaaggaggacgcaagtggtggccatactgtatagtatagtggccactctcata

SEQ ID NO: 28502 - DNA, 4146 bp, DROSOPHILA
tgtccaaatccgcaaattgcacgcatattctagtatctgaaaaccagaaatttagatagactgggtacagagtcatctgaaaaacgcaaaaattaggcaatctccgaggagcaacgtccttaaaacgagaacgcattacccacttttgaatgcctgtaaagtattatggaaagaggatgcccagctgctagcagtgaatccgtgaccagtgcaggggagcgtactcagtcagcagtcaccagctccacctccacgtgggtcaagagtcaggcctcaaccagccgaaaaacagaagcatcagaagaatcgggattaggagcagtagacgcagaagtaggagccggcagagaagcctttgtatctatgtcaacgctgcgggaggatgtggaggacgtgtgtgtgtcgtcaaactcacaacatggtttcgccgtagttttggacgacgagtccagcacatttgagattagctcttccaactcactgcccaccagtgcgggggcggcgtccacagtgggagtggtggccgtcgacgacagctcctccacggataccttgaacggtggtcatcctgacttaggtcaccccgcctcatcggaacacagtcgtcagggcttttttaatgaggataatgaagatcctccggttgtatgccttataaacgacgatgacgatgatgaggaacccgagccggaggaggacgatgaggaggaactgattgaagacgaggacgaggacgcagtggacattgtaacgggcgccatcagctgccccaacacatcacagttggctttagccgacggcaccatcatggcggccgatggatctaagatcttcctggagacgcccgtcgtggaggaggcccagccgcatcccggtcaggtagtcacaacgggatcccagtcggagctcacaggcaagccaaaaagattgagcgatgagttcttgctgggtgaggaagaccaagcagagaacctggctttgggaagatgtattaagtctgagccggttaatcccgtggacgacaatccatctgaaggcgacgatggggctacttgcttctcactacatgaccgtcttatgtcagtgcgcctgaagcagatgagcctcacggccaacaccgtttcgaatccctcgccagcagcctctgccaacgccgccgccccagaggaggcctccacttccaactccagctcaacctccagctctgccttgtcgagggcagacattgagtccatggatctgatcgagcgtcgcgactttgagacggagcagcgtctcacgggcggcataatcctgcgtaccagctccatggtgagccagaacaaactgaatctaagtctgatcaagtccatggcggggggaagcaaggcggccaatggatcgggtacggccaacagtgacgactggcccagcagcagcaatgggcggaccgtctcatcggacagcaagtacacctacaaggatctgtccacgactccaacgagcagtcgcaagtacacgaatagccggctaagcaagtccactgccaaattaaatctgggatcctcgttgggcgcctccagctgcagccagcaccggagtggttccagttccacttcaaaatccatggagtcatcgaccagttgcactggagctgcccgaacggacgtttacacaaacaccaactcgaatgattaccccagtctggctccaaccacgtctggttcgtccacatccgggggaagctgtcaacaggatcaggaggagaatgtgagtgcatccgtctcgtatagctcggtgggatcgcagacctctcaggaaagtggttgcagtcgcaccactgccatcaatccaacagctgcctgctccaccggatcggcctgcttgggtgactctcaggcctcgacatcggcttctacctcgtccggagccggagcgtccaaccgttgccagtatgccactacatcgacgacaaaggcagctcgccaggttaatgccagcgcccaaacccaggagcgtttcctgactcgcagcaatcctccagctgctagtggagcggggtcggttggggcaaacccgacagcatctgttcggcaacggcgaaacggttccagcgatgttgtccacctggaagtggtggtggaagagggagctggcggaggggacggcggcgtggtggagcccggcgactttagtgccgaggaaccttgggccaactgcgatgaggagaacaactgttccgatctggaggagatttgcacatgccagaacggtaacggaagcagctacggcggaagcaatgccagtctcagcgagactttcgacatggacgccatggatcccgatgagcccatttccttgtcgctgtcctctgcctcagctggcttcaccgaatactcgctgaccaatcccagctcgctaatgtctcatcagcgcaaacgaaagttcaacgagggacgtctgctggatggcggcgactactcggtgactatatcttccagcggcgaagtgggcggaccgggttcaggtgtgagcgataattgccgcaagcggattgcctatgattttgcatctacgccgcgctcctcgcaacatttgggacccacggcagtgctatcggtgacgccctcatcgcatctgactagctccacgccgggatcggctttgggtcgtcgcaccccacgttccgtgccgtctcgtgacaatccgccaccagagctgcagcactggttggcacaattccaacgatggtcccatgtcgagcgattgctggccctggaccgtctcatcgatcactgcgatccgtctcaggtgcggcacatgatgaaggtgattgagccgcagttccagcgggacttcatctccctgctgccaagagagctagccctctttgtgctctcgtacttggagcccaaagacttgctgagggcagcgcagacctgccgcagctggcgcttcctgtgcgacgacaatctgttgtggaaggagaagtgccgcaaagcccagatcctcgccgagccgcgtagtgatcgcccgaaacggggacgcgatggcaacatgccgccaattgcttcgccctggaaggccgcctacatgcgtcagcacatcatcgaaatgaactggcggtcgcgacctgtgcgcaagcccaaggtactcaagggccacgacgatcatgtgattacgtgcctgcagttctctggcaatcgcattgtgtccggctccgatgacaatacacttaaagtatggtcagcggtgaacggaaagtgcctgcgcactttggttggtcacaccggtggtgtttggtcttcccaaatgtccggaaatatcatcatttcaggcagcacggatcgcacgctcaaagtctgggacatggacagcggcgcatgtgtgcacacacttcaggggcatacgtccactgtgcggtgtatgcatttgcatggcagcaaagtggtcagtggctcgcgagacgcaaccttgagggtttgggacattgaacaaggctcctgtctgcacgttttggttggtcacttggctgctgtgcgttgtgtgcagtacgatgggaagctgattgtgtccggagcgtatgattatatggtgaagatctggcatccggagcgccaggagtgcctgcacacactgcagggccacacaaatcgcgtctactcgctgcagtttgatggcctgcatgtggtatcgggttcattggacacctctattcgcgtgtgggacgtggagacgggcaattgcaagcacaccctgatgggtcatcagagtttgacctctggcatggaactgcgtcaaaacattcttgtctcgggcaacgccgactcgacagtcaaggtgtgggacatcacaaccggacaatgtctgcaaacgctgtcgggtccaaataagcatcattctgcggtcacctgcctgcaatttaactcccgatttgtggtgaccagttccgacgatggcaccgtgaaattgtgggacgttaagacgggcgactttatacgtaatcttgtggctctggactctggtggatccggcggcgttgtgtggcggattagagcaaacgacactaaactcatttgtgccgtcggttcccgcaacggaacggaggaaacaaagctaatggtcctcgactttgatgttgagggtgcatgtgtgaagtgctcatag

SEQ ID NO: 28503 - protein, 1326 aa, DROSOPHILA
MERGCPAASSESVTSAGERTQSAVTSSTSTWVKSQASTSRKTEASEESGLGAVDAEVGAGREAFVSMSTLREDVEDVCVSSNSQHGFAVVLDDESSTFEISSSNSLPTSAGAASTVGVVAVDDSSSTDTLNGGHPDLGHPASSEHSRQGFFNEDNEDPPVVCLINDDDDDEEPEPEEDDEEELIEDEDEDAVDIVTGAISCPNTSQLALADGTIMAADGSKIFLETPVVEEAQPHPGQVVTTGSQSELTGKPKRLSDEFLLGEEDQAENLALGRCIKSEPVNPVDDNPSEGDDGATCFSLHDRLMSVRLKQMSLTANTVSNPSPAASANAAAPEEASTSNSSSTSSSALSRADIESMDLIERRDFETEQRLTGGIILRTSSMVSQNKLNLSLIKSMAGGSKAANGSGTANSDDWPSSSNGRTVSSDSKYTYKDLSTTPTSSRKYTNSRLSKSTAKLNLGSSLGASSCSQHRSGSSSTSKSMESSTSCTGAARTDVYTNTNSNDYPSLAPTTSGSSTSGGSCQQDQEENVSASVSYSSVGSQTSQESGCSRTTAINPTAACSTGSACLGDSQASTSASTSSGAGASNRCQYATTSTTKAARQVNASAQTQERFLTRSNPPAASGAGSVGANPTASVRQRRNGSSDVVHLEVVVEEGAGGGDGGVVEPGDFSAEEPWANCDEENNCSDLEEICTCQNGNGSSYGGSNASLSETFDMDAMDPDEPISLSLSSASAGFTEYSLTNPSSLMSHQRKRKFNEGRLLDGGDYSVTISSSGEVGGPGSGVSDNCRKRIAYDFASTPRSSQHLGPTAVLSVTPSSHLTSSTPGSALGRRTPRSVPSRDNPPPELQHWLAQFQRWSHVERLLALDRLIDHCDPSQVRHMMKVIEPQFQRDFISLLPRELALFVLSYLEPKDLLRAAQTCRSWRFLCDDNLLWKEKCRKAQILAEPRSDRPKRGRDGNMPPIASPWKAAYMRQHIIEMNWRSRPVRKPKVLKGHDDHVITCLQFSGNRIVSGSDDNTLKVWSAVNGKCLRTLVGHTGGVWSSQMSGNIIISGSTDRTLKVWDMDSGACVHTLQGHTSTVRCMHLHGSKVVSGSRDATLRVWDIEQGSCLHVLVGHLAAVRCVQYDGKLIVSGAYDYMVKIWHPERQECLHTLQGHTNRVYSLQFDGLHVVSGSLDTSIRVWDVETGNCKHTLMGHQSLTSGMELRQNILVSGNADSTVKVWDITTGQCLQTLSGPNKHHSAVTCLQFNSRFVVTSSDDGTVKLWDVKTGDFIRNLVALDSGGSGGVVWRIRANDTKLICAVGSRNGTEETKLMVLDFDVEGACVKCS

SEQ ID NO: 28504 - DNA, 8577 bp, DROSOPHILA
tcgcttaatgatttcacgtgtgtgagtgttgttgtgttgcagtgttcatgttgcagttgctgtttcgtgggtgtgagttgctgctcgatgagttcggcagatgactcttaaacgctatgtgcggcaaatgtggcaggttcctggcaaatgaggaatttcgaatttggaattggaagccaatatcgctaatgctactgcacgacaaatgaatcaaatcaaatgtaaaagggaaacaatcagaacgtgataatagaatttaggtacatacccgttcaagtacaattaaacaaaacaagttggacgagacgaaacaaaaccacaaatgtaaacataataggcggcaaactcaactcaagtggtgggccaatattaacatatccatcttatccaaatttcatttaaacaaattacaatttaatcaatataaagctctgttctcataaacgctctctcaggttcacacgacgcgaaacaattatttgcatctgcagttgtaaatctgcgctttataatacgtaatcataatcataatattatcattaaggtaatcgattcttgccatatacacaatagcaataaaaactaagaagcgaaattattctacggtggaaaacgaattttggctatgaagcaacgtaatttaaaagggtattattaacaatatacactcacagccacagccacaccccgaccacccgactaccctactcttctttcccttaattgtttaatgttttttgtgtgtgtgttacggtgtgtgtggtgttaatggtgtgtgtggtgtatgtgagcagttgcgttttgttggcaaggcattcaacattacgttgcggaccctcacatccgcggcatctgtctgtgtgtgcttttctgtgtttggatgagtttgcaatgaaatctcgcttgaagctgtatactagctgccccgtccctgaccgttcaccgcctgaatccaagcgagacggcggcgtaggctccaccggaagtgccccaccgtctcctatgagcacttcacacatgcaccctcaacatcaaagtcgaggaccattagctttgtttcctccgttccgttgcgggaaccgacggcacaaatgagtttagtgtcgtttgctctgaaaagtttttagatatagttaattacatttataatgagcggatttatatcgtcttggacttacctaatccgccacacaacgccgccggatccaccagagtccagagccacaagattacgtataaagtcgcccgtcttaacgtcccacaatttcacggtgccatcgtcggaactggtcaccacaaatcgggagttaaattgcaggcaggtgaccgcagaatgatgcttatttggacctaaaggggatttaaggagtaccagattagtagtggatcttttacagcatgttagtgaaaagtaaacacggaggattcaaacttacccgacagcgtttgcagacattgtccggttgtgatgtcccacaccttgactgtcgagtcggcgttgcccgagacaagaatgttttgacgcagttccatgccagaggtcaaactctgatgacccatcagggtgtgcttgcaattgcccgtctccacgtcccacacgcgaatagaggtgtccaatgaacccgataccacatgcaggccatcaaactgtgtgaaatttagaatggtttacggcaaagtccgacaaagaagtgttgactatcttacctgcagcgagtagacgcgatttgtgtggccctgcagtgtgtgcaggcactcctggcgctccggatgccagatcttcaccatataatcatacgctccggacacaatcagcttcccatcgtactgcacacaacgcacagcagccaagtgaccaaccaaaacgtgcagacaggagccttgttcaatgtcccaaaccctcaaggttgcgtctcgcgagccactgaccactctgttgagaaattcgtcaacaatcagcattggttagtggatagttgtgtgtggttttaacttacttgctgccatgcaaatgcatacaccgcacagtggacgtatgcccctgaagtgtgtgcacacatgcgccgctgtccatgtcccagactttgagcgtgcgatccgtgctgcctgaaatgatgatatttccggacatttgggaagaccaaacaccaccggtgtgaccaaccaaagtgcgcaggcactacagttgttgagaaagatatctcgttagcagggaaacattaaatgattgcttgttcgatttactcacctttccgttcaccgctgaccatactttaagtgtattgtcatcggagccggacacaatgcgattgccagagaactgcaggcacgtaatcacatgatcgtcgtggcccttgagtaccttgggcttgcgcacaggtcgcgaccgccagttcatttcgatgatgtgctgacgcatgtaggcggccttccagggcgaagcaattggcggcatgttgccatcgcgtccccgtttcgggcgatcactacgcggctcggcgaggatctgggctttgcggcacttctccttccacaacagattgtcgtcgcacaggaagcgccagctgcggcaggtctgcgctgccctcagcaagtctttgggctccaagtacgagagcacaaagagggctagctctcttggcagcagggagatgaagtcccgctggaactgcggctcaatcaccttcatcatgtgccgcacctgagacggatcgcagtgatcgatgagacggtccagggccagcaatcgctcgacatgggaccatcgttggaattgtgccaaccagtgctgcagctctggtggcggattgtcacgagacggcacggaacgtggggtgcgacgacccaaagccgatcccggcgtggagctagtcagatgcgatgagggcgtcaccgatagcactgccgtgggtcccaaatgttgcgaggagcgcggcgtagatgcaaaatcataggcaatccgcttgcggcaattatcgctcacacctgaacccggtccgcccacttcgccgctggaagatatagtcaccgagtagtcgccgccatccagcagacgtccctcgttgaactttcgtttgcgctgatgagacattagcgagctgggattggtcagcgagtattcggtgaagccagctgaggcagaggacagcgacaaggaaatgggctcatcgggatccatggcgtccatgtcgaaagtctcgctgagactggcattgcttccgccgtagctgcttccgttaccgttctggcatgtgcaaatctcctccagatcggaacagttgttctcctcatcgcagttggcccaaggttcctcggcactaaagtcgccgggctccaccacgccgccgtcccctccgccagctccctcttccaccaccacttccaggtggacaacatcgctggaaccgtttcgccgttgccgaacagatgctgtcgggtttgccccaaccgaccccgctccactagcagctggaggattgctgcgagtcaggaaacgctcctgggtttgggcgctggcattaacctggcgagctgcctttgtcgtcgatgtagtggcatactggcaacggttggacgctccggctccggacgaggtagaagccgatgtcgaggcctgagagtcacccaagcaggccgatccggtggagcaggcagctgttggattgatggcagtggtgcgactgcaaccactttcctgagaggtctgcgatcccaccgagctatacgagacggatgcactcacattctcctcctgatcctgttgacagcttcccccggatgtggacgaaccagacgtggttggagccagactggggtaatcattcgagttggtgtttgtgtaaacgtccgttcgggcagctccagtgcaactggtcgatgactccatggattttgaagtggaactggaaccactccggtgctggctgcagctggaggcgcccaacgaggatcccagatttaatttggcagtggacttgcttagccggctattcgtgtacttgcgactgctcgttggagtcgtggacagatccttgtaggtgtacttgctgtccgatgagacggtccgcccattgctgctgctgggccagtcgtcactgttggccgtacccgatccattggccgccttgcttccccccgccatggacttgatcagacttagattcagtttgttctggctcaccatggagctggtacgcaggattatgccgcccgtgagacgctgctccgtctcaaagtcgcgacgctcgatcagatccatggactcaatgtctgccctcgacaaggcagagctggaggttgagctggagttggaagtggaggcctcctctggggcggcggcgttggcagaggctgctggcgagggattcgaaacggtgttggccgtgaggctcatctgcttcaggcgcactgacataagacggtcatgtagtgagaagcaagtagccccatcgtcgccttcagatggattgtcgtccacgggattaaccggctcagacttaatacatcttcccaaagccaggttctctgcttggtcttcctcacccagcaagaactcatcgctcaatctttttggcttgcctgtgagctccgactgggatcccgttgtgactacctgaccgggatgcggctgggcctcctccacgacgggcgtctccaggaagatcttagatccatcggccgccatgatggtgccgtcggctaaagccaactgtgatgtgttggggcagctgatggcgcccgttacaatgtccactgcgtcctcgtcctcgtcttcaatcagttcctcctcatcgtcctcctccggctcgggttcctcatcatcgtcatcgtcgtttataaggcatacaaccggaggatcttcattatcctcattaaaaaagccctgacgactgtgttccgatgaggcggggtgacctaagtcaggatgaccaccgttcaaggtatccgtggaggagctgtcgtcgacggccaccactcccactgtggacgccgcccccgcactggtgggcagtgagttggaagagctaatctcaaatgtgctggactcgtcgtccaaaactacggcgaaaccatgttgtgagtttgacgacacacacacgtcctccacatcctcccgcagcgttgacatagatacaaaggcttctctgccggctcctacttctgcgtctactgctcctaatcccgattcttctgatgcttctgtttttcggctggttgaggcctgactcttgacccacgtggaggtggagctggtgactgctgactgagtacgctcccctgcactggtcacggattcactgctagcagctgggcatcctctttccataatactttacaggcattcaaaagtgggtaatgcgttctcctgcaaatgttaaagattggttatcgaatggttggaagctggtaacacgaggaagcacttatggaaaagtgaataatagtgttgaaaatagacgctatgaaaatttcaaacccaaggtatgacaaattttacaccgcttacaatgaacgatccttttgtgccctgagaatccaagatgatccgaaattcccacgcaacaagcgcaaactgatggttgcaaaaaaaaattaaatccaagggaatgaaaagcagtgggaaaaatttgttgtaacgacgctgcctctgccggcgtcgttggaactcgaaaaaggaaatcacaaaagtgcatcgaggaagaggctaaaacggcgcgaagtagaatgggcaaaagaagacgaaacgggtattacaacaaaaacaccacaaacagacacacacacataccctaaaaagagagacaacagcaaaaggtattgtaaagagagtgaagagcgagaagtaacggacgtgagaagaagaagcaccaaagatacacagcagccgcagcaccaaacaagaacaacaataacaacaacaccacgtacaccttgcaattcaagccgctatcttttccctccgctttttactgactttcagagatgatcaacgcgggaaagtcactggtgatcgggaaacagtcaccgaactaataggaaaagccttccaaataatttttatactaaagaagtgtatgaccatattcaaatagtttcgacacccaactaaagttaaaatgtacattagtaaatcgttttaataaactgcgttggttgttactaatagaactgtgaaatctatagtcacgaaacatttcttgctgactagagctgagccaagcccaagctaagattacttctgccaatatgctgagtcacagagttgttgactttccaaaatacatacgtattagtcatccattttaaaaagttacattaaaacgtgagttttttacatgggctatataaaatcgcaaacatttagtcgaaaccgaaattccaaataacaagatattagtcattctgtaaaacaaattatttgtgcaaactgactttcttttcctggagaacggaaagaaatcattaattattagggctaagatgtttgtaaattgtatgatagtagtccctattctctagaaattcattgatcctagccagcttccattcaccgtgactgaaaaatcgcagctgcgcatctctgatgtttgacagcagcttgactggccatcacatcctaccagcgcacagacacacacacgcacccgagagagtagaaaaagggatcgccgtaggcagagattggaagatccaggggaggggacaagaaaaccaaggagaaggagaagaagcaaagatcagccattgcagcgcagcatccgcagaacaaaaggggcgagatcacaaaggaattttcagcgctcctgctgttgcatcactgccgaaacagatcagatgtgcaggcatttctcccgaacattttcccatattcgtattcattctcttcccaccctccttctactgcttctcctcctcctcctccttccccacccctggctcgtggcctttggctgttgacctcccgaaaaaacgtaaaatatgtttttagggtctccgctttcacaccgcatttcgatacgcgtttttacctgtgccacacaggacactttggtcgaacatcggggatgcgctcgagaacattttctctctgtggatttagccacgggtgtggagtcgtcataatcgctgcatacacacagacgcacaccaacgcggataatgggcagagacctgtggtcccaaatcccccaaaaatagattactttcgttgcaaattcagagcagcgattgcagcacgctgagcgttccttacggactctttgaccatcctaaccccacttttctgcacctgcaaatgcagcggttggaacacggaggggatagccccataattcgtggagcaaacaacaaaagaaaaatgtggacattgttgtacacacaggcagagtcacgcacacagacgaacccactcgctcgctcgctcgcagctaaagtttgagttcgcgtggtgccttgcacattgtttataaactttaagggcagccaacgtggagggggcactaaaaaaacacaccccactttagcgggcacaatttgttttcaggttttcaactgcacatttaacgcgtgtaaaactttttgcgtttggggcccactctcacacatacaggcgcaacacagcacacacacgttcaatcgaatttttcacatacgttttaaggacgttgctcctcggagattgcctaatttttgcgtttttcagatgactctgtacccagtctatctaaatttctggttttcagatactagaatatgcgtgcaatttgcggatttggacagattttggacccgaaaaaaaactaatgcggatccagtgtgaccaccgctcgaccgttcaaatataccatgggaattcacggcttaagttagggatgtgatggtctccgcgtgactcgagcttggttttaaaaaatgtgatactctgcaagttgtttatatgtatggatttcatgaattatttatgtgttgtaataataaacgtgtttcttacacaatttaattgctcagcaattctacttttcttttttgattgcttatattttatattatatttttgattgcttaattactaaaattattatatgtttaaaaaacttgtttctattttcatagtttttaatttttatacttatattttataacttatagaaatttcttgaaaaccctaaaaatgacatgagtttgttatttattgctatgttataaaataattagaaaccattacagcaaatatcgttaatttgtttactagtgatagagtgtggtaacactagcatttccgtccacacaatgttaaggtcacactcagaagctgcaaatttcgaatttcgacggtcgctatgagtggagctctcggagatgtggtgtccgaatacctggagcgcggcccagtgctcgtggtggcggacctccttagcctgataacggtctcgtcctgcctggtgatcaaggttccgcagataaacacgatacgggcgaacgagtcctcgaaaggtgagcaccgcccacacaacatctgcaacctatcctcccactcatatgatacggatttatgaattaggcatcagtgttttggga

SEQ ID NO: 28505 - DNA, 4135 bp, DROSOPHILA
aagttttacacgcgttaaatgtgcagttgaaaacctgaaaacaaattgtgcccgctaaagtgggtcaagctgctgtcaaacatcagagatgcgcagctgcgatttttcagtcacggagaacgcattacccacttttgaatgcctgtaaagtattatggaaagaggatgcccagctgctagcagtgaatccgtgaccagtgcaggggagcgtactcagtcagcagtcaccagctccacctccacgtgggtcaagagtcaggcctcaaccagccgaaaaacagaagcatcagaagaatcgggattaggagcagtagacgcagaagtaggagccggcagagaagcctttgtatctatgtcaacgctgcgggaggatgtggaggacgtgtgtgtgtcgtcaaactcacaacatggtttcgccgtagttttggacgacgagtccagcacatttgagattagctcttccaactcactgcccaccagtgcgggggcggcgtccacagtgggagtggtggccgtcgacgacagctcctccacggataccttgaacggtggtcatcctgacttaggtcaccccgcctcatcggaacacagtcgtcagggcttttttaatgaggataatgaagatcctccggttgtatgccttataaacgacgatgacgatgatgaggaacccgagccggaggaggacgatgaggaggaactgattgaagacgaggacgaggacgcagtggacattgtaacgggcgccatcagctgccccaacacatcacagttggctttagccgacggcaccatcatggcggccgatggatctaagatcttcctggagacgcccgtcgtggaggaggcccagccgcatcccggtcaggtagtcacaacgggatcccagtcggagctcacaggcaagccaaaaagattgagcgatgagttcttgctgggtgaggaagaccaagcagagaacctggctttgggaagatgtattaagtctgagccggttaatcccgtggacgacaatccatctgaaggcgacgatggggctacttgcttctcactacatgaccgtcttatgtcagtgcgcctgaagcagatgagcctcacggccaacaccgtttcgaatccctcgccagcagcctctgccaacgccgccgccccagaggaggcctccacttccaactccagctcaacctccagctctgccttgtcgagggcagacattgagtccatggatctgatcgagcgtcgcgactttgagacggagcagcgtctcacgggcggcataatcctgcgtaccagctccatggtgagccagaacaaactgaatctaagtctgatcaagtccatggcggggggaagcaaggcggccaatggatcgggtacggccaacagtgacgactggcccagcagcagcaatgggcggaccgtctcatcggacagcaagtacacctacaaggatctgtccacgactccaacgagcagtcgcaagtacacgaatagccggctaagcaagtccactgccaaattaaatctgggatcctcgttgggcgcctccagctgcagccagcaccggagtggttccagttccacttcaaaatccatggagtcatcgaccagttgcactggagctgcccgaacggacgtttacacaaacaccaactcgaatgattaccccagtctggctccaaccacgtctggttcgtccacatccgggggaagctgtcaacaggatcaggaggagaatgtgagtgcatccgtctcgtatagctcggtgggatcgcagacctctcaggaaagtggttgcagtcgcaccactgccatcaatccaacagctgcctgctccaccggatcggcctgcttgggtgactctcaggcctcgacatcggcttctacctcgtccggagccggagcgtccaaccgttgccagtatgccactacatcgacgacaaaggcagctcgccaggttaatgccagcgcccaaacccaggagcgtttcctgactcgcagcaatcctccagctgctagtggagcggggtcggttggggcaaacccgacagcatctgttcggcaacggcgaaacggttccagcgatgttgtccacctggaagtggtggtggaagagggagctggcggaggggacggcggcgtggtggagcccggcgactttagtgccgaggaaccttgggccaactgcgatgaggagaacaactgttccgatctggaggagatttgcacatgccagaacggtaacggaagcagctacggcggaagcaatgccagtctcagcgagactttcgacatggacgccatggatcccgatgagcccatttccttgtcgctgtcctctgcctcagctggcttcaccgaatactcgctgaccaatcccagctcgctaatgtctcatcagcgcaaacgaaagttcaacgagggacgtctgctggatggcggcgactactcggtgactatatcttccagcggcgaagtgggcggaccgggttcaggtgtgagcgataattgccgcaagcggattgcctatgattttgcatctacgccgcgctcctcgcaacatttgggacccacggcagtgctatcggtgacgccctcatcgcatctgactagctccacgccgggatcggctttgggtcgtcgcaccccacgttccgtgccgtctcgtgacaatccgccaccagagctgcagcactggttggcacaattccaacgatggtcccatgtcgagcgattgctggccctggaccgtctcatcgatcactgcgatccgtctcaggtgcggcacatgatgaaggtgattgagccgcagttccagcgggacttcatctccctgctgccaagagagctagccctctttgtgctctcgtacttggagcccaaagacttgctgagggcagcgcagacctgccgcagctggcgcttcctgtgcgacgacaatctgttgtggaaggagaagtgccgcaaagcccagatcctcgccgagccgcgtagtgatcgcccgaaacggggacgcgatggcaacatgccgccaattgcttcgccctggaaggccgcctacatgcgtcagcacatcatcgaaatgaactggcggtcgcgacctgtgcgcaagcccaaggtactcaagggccacgacgatcatgtgattacgtgcctgcagttctctggcaatcgcattgtgtccggctccgatgacaatacacttaaagtatggtcagcggtgaacggaaagtgcctgcgcactttggttggtcacaccggtggtgtttggtcttcccaaatgtccggaaatatcatcatttcaggcagcacggatcgcacgctcaaagtctgggacatggacagcggcgcatgtgtgcacacacttcaggggcatacgtccactgtgcggtgtatgcatttgcatggcagcaaagtggtcagtggctcgcgagacgcaaccttgagggtttgggacattgaacaaggctcctgtctgcacgttttggttggtcacttggctgctgtgcgttgtgtgcagtacgatgggaagctgattgtgtccggagcgtatgattatatggtgaagatctggcatccggagcgccaggagtgcctgcacacactgcagggccacacaaatcgcgtctactcgctgcagtttgatggcctgcatgtggtatcgggttcattggacacctctattcgcgtgtgggacgtggagacgggcaattgcaagcacaccctgatgggtcatcagagtttgacctctggcatggaactgcgtcaaaacattcttgtctcgggcaacgccgactcgacagtcaaggtgtgggacatcacaaccggacaatgtctgcaaacgctgtcgggtccaaataagcatcattctgcggtcacctgcctgcaatttaactcccgatttgtggtgaccagttccgacgatggcaccgtgaaattgtgggacgttaagacgggcgactttatacgtaatcttgtggctctggactctggtggatccggcggcgttgtgtggcggattagagcaaacgacactaaactcatttgtgccgtcggttcccgcaacggaacggaggaaacaaagctaatggtcctcgactttgatgttgagggtgcatgtgtgaagtgctcatag

SEQ ID NO: 28506 - protein, 1326 aa, DROSOPHILA; identical to SEQ ID NO: 28503

SEQ ID NO: 28507 - DNA, 15165 bp, DROSOPHILA
ttggcaaaactagccgattttaaatcggtcattcttgttttttaaatatctcagctaaaaagtgtttttctgcgtgtattcatgatctcgaagttgtgctcggcaaataaacaggcacacgcaaagattttcctcggcatcatagttctaataaaagtgtgtagtatacttttgaacacaggtttatgatcattagttagcaaattcaagatgatcgtattttatattcctatttgcctcgcttgtatgacaatgcgaaccatattattctttattctattcattcgttttgccaaacttgttttgtttataccaaaacttccagtcacggccaacacaagggctgttatcaaagccccccacacaaacatttcatcacactgataaagtttgcattagctttgtttgcgtttccttatcagtcgttcccaagctccgataatcagaggtactattagaacgcattaaaacacttgtcgcttaataaaagtaaactttttattatttcgcagctatcaaataaagtaataaataaataatttaatatatacatttgctatattaacttattgtaaacgattttctgcctttccatgtttgccgcttcattacttcgtttgtgtttattttctcgatattattaacttgcatattgtaacattcgaggctaatctgttcgttcagatggcctcaaatcccgcgtaggtataactgaaacttaacaagtctgacaattcaatttcgctttgcctaaaactagggaaacatatgaaggatagagcgtagtggtaaagtaggaaaccatttgaaagtggcggattgtgggatctcaataaataaccaaagaataaatagttatgggatggggggtgcctatggggaatgggtttggaatgagtgtttctgaagtgcacataaaactgatttggttttctgttcacgccgatcggtcgctgttgatggtgatgatggtccggtcctctggcccgatttcagatccttagttcacataggccatgcccgctcccttgcgatcgaagtgacgcacgcggacgaagaggaaggcggcgactagagaggcgacggccaggacgagcagcagcatcaccaatccgcccacaaagctgggcaccgacatgcagatggtctccgcatccgcggacctggccgactggatgaccaccgtctcgttgctggcattgctgttcagcgcaaagttaacgtctccgggcgccaccacctggataattcggctggtgttcacatcggtcatctcctgcgcgttcctcttgtagatcctctgtggcttcaccacaatgtccatggtgtctctgcgccttcgcacgccgcgcagatcgtccagtccctccacggagcgtgggcgtccgcccaaggaaaccaggttgccaccggcactcaggtcatccttgcgcttcaccgtgctgtactgaccgctctgtcctggcagtggtggtggcggcagacccagttcgttgctgccagtgggctgaggctgtggcgactgggagctggcaggtccggaaacggttcccgagtcagcagtgggcactgccgccgatgtctgagcctggggcgagggcaccacatccggttggttctcagagtacgctccagtggcatcggaggcagggtgacgtggatcaggataggctgctggtggcagaactccgggcccgcccagggcgaaatcgttgcgctcatatgcctctgggggaccatactcctcggacagaccgttggctccaatctggggcagaccgtactcgccacccggcaaaccgggaccgcacttgggctcgggacagttgtagcggcacacctggatgacgcactggaagtgcacattcatcgagtcggggaacttgaaggcctggaagtaggcgaagctaaccaccgatgcggagggtccgaagttcttgatcttctggaacttgctcatgatcttgggcctgacaacgcagccattctgatccaccagctggatgggagcccgcttgccgtcgtgggccacacagttgcgcactagcatatcgaatttgttttcatcatccttgatggccagcaccatggtcatcgtctgtccgatcttgacaatgcccgaaacctcggaggcccagggtcccttgcccacctggatttgcatccagcactgcaggttgtcgcccaggaagttagcggtcaccgcatgcagcatgtccacctggaagggcctgaaggtgacggccttctcgtagaaatcgtaccaggtgcagcgcagcttcctggcctgatcccacacctcctgcacatagggatcgtactggatgatgatcgtgttctccacatagctgcccgatggcgtgggcgctccatagccggcggcattgtggttggccgagctggtcatgccgcagctattcaggaagatctcaaaggtggcgctcaggtggccggtgccgggcttcaggtgcacgcagtgtggatcactgtagaatcccttggagaagatcatgccgtagaaaggtcggtcgaactcgatgttcacccgcatgtgggtcttctcgcactgcacctgcaggtgcttgatctgcggactgtcgttggtgctggcgaggggccatgcctcctcggacacatcgttggtggctccggtgctcagtggtccctggggcgcaccgtaaatgggcgccggtggaccgtagccggccctgtgttcgagtggcagggcggcggactcaatgtgcgaggcatcgccatgcaccgacaggtgctgtggatagagaagaaggggaaattcattagaaaagggaaccaatacagttaattttttatttaataagctctcatcaagcgaaatgtactgcaacagtgcagtatgagcaatttgcaatgaagtcatcacagatgaaaatcacttatacgcagtgttgcacatttaagacatgtgccaactcaaaagttttcctcttgcttttcaaaacgatgtcaaaacactccgccccctaaaaacgtttcgattagagcctaggttatggctcagatcacaggattgcggaaagctctcgtttcgggttatcttttccgcgatatataattggatttgggttatgcaatcgcaatctcagcgacagacaccgaaatcactctcgacgacatttggcaagaagcgatgcgaagcgttgaaaattacacgacagctggagtatttcaaaattaaatggttgacagagcggcacgcttaacaaacccaagaaacacaaaactaaaagctccaaatggagtttaacccattgcgtaagacaacggagaaagagccacgcccccacgtttcccccgcagggctttgtcactttctttctgtctttcggtttggccgtgtcttcgcatctggctcataattttatgggcttgtggctgcgcacgggaagcggatgtatctcaaagtccggcggggggcaccacgaaaaccgaaagttaaatccagcacgatgacggtgtggatttttctgtggctgctgttgctgctgttatatttgtttatttattattatatttgtgcttttctactttcggtggctggtgaccacgcgttgagatgtcgtgagatgattttgaaagtgaaatgaccaaaggaaaacgagctggccaacaaaagaagcaacgtacctaatggaaaaatagagagacaaaaacacaacgtctcgactattttcttttttttttttttggacattccacgcacttggcaatggagatatcaatataaacacatcgatcgatcgattcgatcgcctcgatggcattggtaatttttcttctctcttttttccaacgttcaacgctttggagaaagaaaactgacaataaataaataataaagcaatctctgtgaattaatgcgccataaacaagaaagtcaaaactggtacaaatcagagcataactgcaatttcttcgccgcctcagcacccagacacgcagttggttagttggatgcctggatgcttggacgacactcgcttggccatccaactggccaacagtttctttggccagcttgcgtttgagttttccttgacgtgattgcagcgtctaaaatgcgctgattgtgtgagtgtgtttctgttttccatcggccaccagtgattgatgcgctttaaatagcccactgaaggctgccactttttcgagggggaagaggcgagtttgtcttggccttgcttatcaatcgaaagcgtgcggcagcgcgccaaagaaatccgccaaatttatggctcatctcatattgattgacagtccatcgcggtgatgcatatgagaggtatttaaatttaatacctctctttagctatgtaagaaatcatgttactgtcatattcatgtatttaactaactgctcgttactttaatgttttctatatccacgagatacattggacatctgtaagattgaaactcacttctacgaaaatgttcactcaaccactgtaaaataaagtctaatagtaatatatgtacttcctcgcttctattcggagtaatctctttacttttctctctctctctcaactaattttccaactctaattgcaatgattagcaaagtgccgtttagttgctacattgtccgccattcctcaccagccaactagccaactctctcgattcgatattgatattgatctgccagcaatccgctatatgcatagtcttctgacttcccaacttccaacttccaacttaagatcgcagccagctcaatccgtcagtgatttgcattcgaattggtattgatcgaacggtagtctatctttgagtcgaaagtgaagagatccgctacaggttgggtctgcatacgaaatgagctgctccaaagtgggccacaccgcagagatcttctaactgtacgacgcctgctggatgaaaaccagcgcttcatgcccagcactttcatgtggaactacatcatctataaggtatgcccaccacccaccgccggccaactcacctgtgtgttgagtaccaggcacaggactatggccattaggctgctgcgtcgcgtcaggtgtcccattttgatctggttgtgtgtgtgtgtgtgtgtgtggtggttggcttgaaattgaaattccaaattgacgccctggaaaccaaaaatgtggatttttggatttcgctactcggcctcgctctgcggctttcttcttcgctgctgctggtgtgctgctgtttgatttttggtgtggcgtctgcaagaaagaaagaaaggggaacaagggtaaacaatgcgaccgatttgcatacgaatatttttcgaggccagtagttgtaaaggcgctgttatttggcacattctgtaaggccgttagaaaacactgttatcgaaccacgcagcttatctcacttatgcataatgctcaagcaaaatcacaacgttttggtcaaacatattcatatagctaaacataaacatatacgcatacgactttatggtcgtcattaagcggccaaattaatagccacaattgcccgtttgctggcttatggtgtcagttgatacgagtacacgcgctgtgaaagaaaactgcatttgatgttaagcaaatgaaaactcgcgcgcaccaaacaggaaccactttctattttcactataacagtactccgctagcatttggcttcttccaatccgaatgcgactacgacatacgaatccatacgaatccgagtacaaatccgagtccaaaacgccaacgcagcgtctggttttccacacggtggctgcactttacgaccatccattaatttcgactgtttttccttacgtttaacagtcgcactctagcattactcggccatcggcttaacagtggcccaaaagcgtcttggcctggctaacagagctcagtgtttgtagtttttggactccaacgattccgaatccgatgccgacgatgcgcctgcgttcgagtgccgataaagactgaagactggaagactgaagaccggagagactggaagaccgaagactgacagctttcacacagccgccggagcgatggaaaagtaagcggctgctctgcctcgaacgcatttcacttgctctcccgcttctttaccctaactgtctctctgtttttatcatttcatagttttgtttttgacttcaacttgcagtcttaggttttacttttacacacaacggctaaagacgggccacagtgctgggtgcccaggtcttattccgaaaaataacacatgtaaatgggtttttaacaagccgcggccataaagtccgtcgagatgccgctgaaaaccggcttgctggcgttgagcaagtgtaccattaacccactgaaacagtaacggatgccactaaactggctgacaattgtttttggcaacaggaggggaccatgtcggtggttggggcaggtacttcaaactaattgccctaatggcccttcagctgatcggattatgcaatcatggttttctaattttcagtagctcaacggtaaaatataccgattaggtagtttcctgcaaaactaaccctacaattattttataatattggtattgttttaagcccattgagaatgtgatagttcataaaaagtctatacaaatattgtgactttcacgagtttcaagaagattgaaatatttaaatgatagatgcctcccagtgtgcccataaaaacaaagtctataagctgtactcaagaaatgggttaggtcagtgctgatcacaattagcgatatttttactggcagaagacatcgtaaaattagcaaagaactcgcaaatgtcttgttcgtttaagtgcgctggccatttaacggcgctttacccatttatttgactaggtattttcaatttgattttctcggccactttcttgcccaggaaatggttgcaaatttgcatataaaactagaaatctttggcaattagcaaaatgcggcgaaacttttggtggttttcttaattttgtacccagctaattgctggcacccctgcaaatgccttatcaagcgacttcaatcgccaccaaagaagccaacaacaaatctttctttttcagcagctgatggtgcttgtttaaagctcattgttgctgctgttggctgttatgtgtaactgccaaatggaattgtttattgtggctgtttggcaagtgaaagtttttcaccgccttcttcttttagttttttgttttttttttctggctctgctcgagcccgcttcttacagatgccgcatataagggcatatttatttttctcttgttttgtttgccagctttaattaacactataaagttatttgctcacatatcgcgggcgaaaggtgcaactggggacttttgttttcagctaattagcttacgatttgggtttagcatttttcatttctctgtcatatatttacagtatcggcgcattaaatcatgtgaaaatcatggctggcaagtgaaaatgcaacgaaaaccagctggctgactactggcgatgtctccactccgccgattgattgaatgacaatgcgtgacgctatataaacaatatggtgcatggcatggcatatggcagtggtccattgcaaactaggtgaaccactggggcactcacataactcgcggttggatcgttctaattctcggtaatttacgtggcttacatttcggggtcccccaagccggatatcgatacgaatcggacaactcaatggttggtcgtgtgtccccaggattcgttgatttgaatagccgacattagcacacgacatttcctgcgactcaaagtcaaacaaagccatgttggcactataatttctttgattgtaaggcacttttcgcacatttcagcccctcgggctggtctaattcgataataactctcattgcttcgctgtactattttcatctccaaaatttccttgtaaggcacacacacatatgtatataagagacacgcattcattgacatcggttgtcaattaaaagaaaacgaaattgcatttaatgccatggccgagtaattatttatcagcactcgcgctgcatttattttttggttttggcatttgccaaaacggctgcttgcagtccattaatttaattgaacgctttcacaaatcccccgtcgtcgtaactaaaactcacatctttttcgttttcattcatctttggcgtttcgcagccccggggattaaggcgtatacatatatataaaaacgtttctatatgtcttcataaatgtcttggatatttgcttaattgagtagctgacaaatttgctgctcttgacacgggatggctgatgtctggagatggggttcccagaggaaaggggcttccaaaaataaaaaaaaaaacgctttatagatgtcagaggtgcggtcgccagcgcaaacacttctttggttaacaaaacagaacttggaatggagttttatgcgttggaatgtgtttcgttgtttgtcgatcgattccgagaggcggttgttgttgctcggtaaaagtttcactattgcagatgctgtggaactacttttaatacaccgaaaacaattaaatgcgctcttagctgcttacattttgtacacttgctttgattaataagtgctatcatgttatttattgacatagaagcgtgtcatatttcacgttaagattggttgataaacaatatgaaacgaattcataaaaacctgaattaagttatctaatctgaggagcaataaatttacagatagcacttactttcaaattttacagcagttttgtgaatgcttatttgtttattttactataaacattaccattaaattaaagctgttaaagcttataactaagcgttaatgcaaagacaaactattctggccagctccatatatatatatatgtacatatatatgacatttcataacacgcttcttgcagtgcagcatttcgaaattgtaacggtaagaccagcgtttccactcaatttaatgtcatttgtggctgccgcggcttttgtggccgtaaacgatcgatattatttgccatagtggcatagaaaccgaagtcggcccccaaccgcttccagataacccccttcgatcccccgagcgtatcatgcgtaattaactacacatgtccatatcacgagcctcggatgctgtgaaagtgaaatttgttcgcaccgtcagcgagcagcaacaatggagaaggagtgtggttgaaaaagcgcaaaaatgttaacagccgtcgagggtttttttcttgtaaaggggcaatttactttcgtttactcgcgcaagtgtgtgcgtgtgtgtgagtgcctagttaactgtgtttttttttatggttattaagtaacttctttcttgcagataagcagatggcaacagagggtaaagcgattagctctgaagcgtgctcgaatgttgaaagaggtcttcgctgatgaaatgcccatatatatgtttccacactaatttaattttcttcctataactttttaatttgcatcggtaactgtttcagttagtggttcgtaaatttaattccatgattaaatcggttcgggcagtttggtcataccattaatgagggttacaagctcgataatcgtttggttgtttctgatggttttggtaattttggtgtgtgtttttcaacaacaagcaaacttccttaaatacaaaagacttgggcaacaaacttccttgaatacaaaagactagagcagcaagcatgcaaaaaaacaaaagacttaggcaacgaacttgcaccaatatgggaggaacccgcagtttttcgcaacttaagaccgagctggcgataagatgagccccacagcccggacattatgtaaaatagagcaaacaattaattttctatgctccacttcggcgacaaggcgacaattaaccaatgagataaggcaaaggcgcccgcagacttgcctcaggtcttgtctgagtggcaaatgaaagtaaattgttgcagccgcaacttcgacggcattccattcacttggtcgtcgctgttgggaaattgccttgccttgccgcaccgcgcatgtgcgtacaaaaatgataacgcaatttatcgcaaaatagggaaagtgaatttagaaatgggcctcgcgagcaatttgcatactaatctggcacgctgcgggttgaaggccagggaaaagatatgtgggcatacgagatatggggtgtgaaatatgctaattgagaggaaattgcaatcatgccaaaggaaacgaaaaaataccaacgtaaacggcattttgtgcaagctattattaactgcgtttggctgttttttttttttgtttagctaaatgcaccaggagcttaactcactattactcattttaataattattgtaagacttgaaagcctcacgcttaaaaaatacaaaacaaaatattctaaaatggcccaacttcgtgatgataaaaaattaattactttttttttacaatttcccccagctcgcactgaaccataacttttcccaaaaaaaactccgaaaaattacgaattcccgttacctgctaactgtttccgttaactgcccaacagttgtggcaagtaacccctcgcggatcattagtggaatgccgttagccaggatcagagatgcagatgcagataaaaggaaacaagacaattaacataattcacaaaaccccctatattctcctgcccattttggcttccttttgttgctggccatttttactttccatttcttttaacggtaaactcgaaatccgccaaaaacgactccaattgcaaaaaaggcgggagggggtgatggggccgcatcggatcgcgatcggatgccattgaatgggcagaaccggttgccgctgctgccattgccagcccaacgaaagtaaaaactcaagggcttgcactttctgcccaagttgtccggtccagttcagcgccgatcggtgaaagaacgatggagggtgaaagaaagcaagtaaaaaaagcgacaaggtgatcaacggagaaaggggcagagtagagaggggcgacagagctgagctgcaggcatatcctccagttgcaacttgcaacgcatcgttagccgaagccaacctgaaaccgaagttgcagtggcgccagcgtttcgtgcactctgagaaaaggcaagtgcaatgtaatgtcaatgtaatttaaaatataacaacagtttatgatctcacgaataacaaatcaatttttatgtgaccatagcctaaattgttttaagatattcacatatcttaatattttttctccgtgcagaaacagatccaacgaagttggcgaagcccaagccggttgcattttgctctgaaataattagtgacccaatttcgggctgcggcggctgtcgccacggagcggcctgttccgcttgcctgcccgccgcaccactgagccaccaccgcaccacttgcaactggcggatcgcagtggtgcaagcaaattgctcgactctggggctccgcttgctggtggtagtggtgcagtgttggcgtactcgtactttgtggcatgcatgcaaagaaagtggttttcatttcttttcagcgcaccgctcaggcacacatgcagtgctatatagcatatagcattacttgagatgtttcgtttatgctgctcgatttttggagtgactctcgttgagttaatgtgcggctcaatcaaaaaaaaaaaaaaaaagtggaggaaaaacgaaatacgaatggatctctgggcgggcattgatttgactgattttccatgatttccatgataatttcaaatcaactttgattgcgtctaatgaagagcttttgggtgcaacttgaaatgggcagtgacgtgcagcggatggtgccaaatgagattttgtggtcaacaagccgaaaaacgctaagctggctggcgagatttagagggttaacagagttaaccaagtgaaaaggaaagaaatcaaaacagatggaagtgaattgaattatttcttgagaataacatttgaaatgaaatatgagaaattgacttggcggtctcattaaaagtggattgaaagtcaagtgaaggtgttaaaagaaaattgttattcgaatggaatcatttcgggtgtataagattaattttaaaatctgaatttggtttgcaattttaacaactactcttacatttttctatttcaattctatttcatttctcttcgcagttaatgaaaatcgcgttttcacaactcctggagctgccaatgaaagttcggtcgcttttcttttttctttctatcccgttgttgtttgacattttcacgctgccatgaaaaactgcgtgaaaattgcacaaggcggcgagacaattgccgttaatttgaaattgtcgccaagtcccagagccagttgccgcgatcttgagccagggttttcagagattcaactggagatgcaagccgcagtcgagagcgagaaaccagtaattatttcagcaagtggtgcagcttctttcactatgagaatgtctgcgtctgcggcgtctgtctgtgtggaatcaattaaaagtattgccaggcgctatgtttgggcagcaatgacaagcggtggcccacacggcgtatgagcaatgcaacccagttggccgagagcgcgcgtgctaagagatcccgagatgcacctcagatactttgttacatagatacagatacggaaagtatatctgcaagatagagcgcacccagcgaaattgttttcatgcgctgcgggcccaaagtggagcagtttttgaacaaagcaattcgcaatattaatcaacagagaagctgcaatacatgtgtgtatggaaaactcagcgactgcaacagcagcagaagcagaagaagaagccacgattgcgaatgagaagcggcacaagataatttcagactttcattcgcgcgaaacgcgatgaaatttcaccagcagaaaaatcagcaacatgagacacacagaacgagcgccggctactgcatcaccgaaccactcgaatctcgtttcaagtgggtggttgggtggtgggtggctggatgtcttctttctctggccaattgagagctatgagtatgcaaatccaaattaagcttaatgagccaagggttccacatcagttttatgcgcttcacgcctcagcggcgccctaactattattaataatagttatatttccgcataatgcacgacgacgaaagttgttttttggctttcttctgcactcatttttttttttaacgaaaataacaaacatttacgggtattctctctgtcggcgaagtgattgcaacgcttttgtaagcaaatggaactgtgggttgagtgtttgaacgttttttacaagttatgtgaatggggcaggtgtttatatggtcggcagacagaccatagacagttaggtggcccactgctaaggatgatcattaatttagtttgaggagtgaaaacacggcatcaatgtaacaatggttctttgaaatactttagcgcaagaacagcattttaattatcaattttacaaataacatgtatatattttaaacatactttaattacgctttgtactttagttgaacacattcccatcaagttcgtttcctaagtcttttgttttcggtacaagtttgtgtgatacattcacaattcactatatttatgacacccaagatcttattagcaattcagtaagcttttcatttaatatcacaatcctgtgacactaagatccgttcattgatccctaaactgggttaactcatccggcaacccagatatttttctatttcgtcacactttcttacctttagtcagtttaaatccttggcattgggttcggttaatccctttcagctggagtcaatggcacagcggcggatcacgattgcttttttatgttcggcgttccactggaatcgaggattcggttgtgttcgttgcacaaattgaaacaagagcaagtctcgagttgctcacttgattttgtagcttgtttttatatattcgaaatttccaaaatatattccaattgatatagatattcgattccgagcactgcgatcacggaacgaagggacgcgctgcggacgcggaggtggctaacaggacgcgactggagagacaactcgtcgcacacaaagttgaaatgaaaatgcggcccggccgtatcgctaaccaagattttatatcgcgtgaaagttttgacccctttaccattggagctgtcgctccgctcgagcgcccgatgccttgaaaagcgtcgaagagagctcacgaagattggaagactcgctcttttgctcggcagcagctcgccgaatgcaaaatatgcggttttcgggtattccaaaaacaagttttcggccaacttttcatttcaggccgctttctgctgccgctacgggccacctttttctctttctcttgcggttttcaagtaagtgatatatataaatccaatctttttttttgcccaccgtctgtgtggtgtcaaggtaactggtgacgtagatcgttggtggtggtggcctgccggataccgagcgaactacctcaacgattgcctaatttcgattgttattccaaaagggttcgcgtccggctgtgagtcagctaacggcttttttggccacgcttgttattctggccaatgcattggaaaattaaattatgatcgccagccgcttatgcaatccctaatgacataatgcacacacttaacggggcacgaggtgtgtacaaaatgggcggtgtgtttttttccattgtattgacctttgtgtgtgcgaggcgtaaattaatttaattcggttatcaagtcaatttttgtttctctcatgagattagaaaaggtttcgattttaattgagtcatttacagtttcaagttcgttgcctaagtcttttgtttctagggtaaacgaatttaaagtaaatcaaataacaatgtgttgattgtgcatcttgagccattgttcatgcataatgatattcactgctgctgtaagaataaattgtgaaagtttcatattgttattaaaaatagcttgaagaatttgtaggtattcaattcattgcaatatactggcaatttcataaaaaaaatgtatctcaatttgggttatattttttaat

SEQ ID NO: 28508 - DNA, 2340 bp, DROSOPHILA
tgcgacgagttgtctctccagtcgcgtcctgttagccacctccgcgtccgcagcgcgtcccttcgttccgtgatcgcagtgctcggaatcgaatatctatatcaattggaatatattttggaaatttcgaatatataaaaacaagctacaaaatcaagtgagcaactcgagacttgctcttgtttcaatttgtgcaacgaacacaaccgaatcctcgattccagtggaacgccgaacataaaaaagcaatcgtgatccgccgctgtgccattgactccagctgaaagggattaaccgaacccaatgccaaggatttaaactgactaaagacgccacaccaaaaatcaaacagcagcacaccagcagcagcgaagaagaaagccgcagagcgaggccgagtagcgaaatccaaaaatccacatttttggtttccagggcgtcaatttggaatttcaatttcaagccaaccaccacacacacacacacacacacaaccagatcaaaatgggacacctgacgcgacgcagcagcctaatggccatagtcctgtgcctggtactcaacacacagcacctgtcggtgcatggcgatgcctcgcacattgagtccgccgccctgccactcgaacacagggccggctacggtccaccggcgcccatttacggtgcgccccagggaccactgagcaccggagccaccaacgatgtgtccgaggaggcatggcccctcgccagcaccaacgacagtccgcagatcaagcacctgcaggtgcagtgcgagaagacccacatgcgggtgaacatcgagttcgaccgacctttctacggcatgatcttctccaagggattctacagtgatccacactgcgtgcacctgaagcccggcaccggccacctgagcgccacctttgagatcttcctgaatagctgcggcatgaccagctcggccaaccacaatgccgccggctatggagcgcccacgccatcgggcagctatgtggagaacacgatcatcatccagtacgatccctatgtgcaggaggtgtgggatcaggccaggaagctgcgctgcacctggtacgatttctacgagaaggccgtcaccttcaggcccttccaggtggacatgctgcatgcggtgaccgctaacttcctgggcgacaacctgcagtgctggatgcaaatccaggtgggcaagggaccctgggcctccgaggtttcgggcattgtcaagatcggacagacgatgaccatggtgctggccatcaaggatgatgaaaacaaattcgatatgctagtgcgcaactgtgtggcccacgacggcaagcgggctcccatccagctggtggatcagaatggctgcgttgtcaggcccaagatcatgagcaagttccagaagatcaagaacttcggaccctccgcatcggtggttagcttcgcctacttccaggccttcaagttccccgactcgatgaatgtgcacttccagtgcgtcatccaggtgtgccgctacaactgtcccgagcccaagtgcggtcccggtttgccgggtggcgagtacggtctgccccagattggagccaacggtctgtccgaggagtatggtcccccagaggcatatgagcgcaacgatttcgccctgggcgggcccggagttctgccaccagcagcctatcctgatccacgtcaccctgcctccgatgccactggagcgtactctgagaaccaaccggatgtggtgccctcgccccaggctcagacatcggcggcagtgcccactgctgactcgggaaccgtttccggacctgccagctcccagtcgccacagcctcagcccactggcagcaacgaactgggtctgccgccaccaccactgccaggacagagcggtcagtacagcacggtgaagcgcaaggatgacctgagtgccggtggcaacctggtttccttgggcggacgcccacgctccgtggagggactggacgatctgcgcggcgtgcgaaggcgcagagacaccatggacattgtggtgaagccacagaggatctacaagaggaacgcgcaggagatgaccgatgtgaacaccagccgaattatccaggtggtggcgcccggagacgttaactttgcgctgaacagcaatgccagcaacgagacggtggtcatccagtcggccaggtccgcggatgcggagaccatctgcatgtcggtgcccagctttgtgggcggattggtgatgctgctgctcgtcctggccgtcgcctctctagtcgccgccttcctcttcgtccgcgtgcgtcacttcgatcgcaagggagcgggcatggcctatgtgaactaa

SEQ ID NO: 28509 - protein, 611 aa, DROSOPHILA
MGHLTRRSSLMAIVLCLVLNTQHLSVHGDASHIESAALPLEHRAGYGPPAPIYGAPQGPLSTGATNDVSEEAWPLASTNDSPQIKHLQVQCEKTHMRVNIEFDRPFYGMIFSKGFYSDPHCVHLKPGTGHLSATFEIFLNSCGMTSSANHNAAGYGAPTPSGSYVENTIIIQYDPYVQEVWDQARKLRCTWYDFYEKAVTFRPFQVDMLHAVTANFLGDNLQCWMQIQVGKGPWASEVSGIVKIGQTMTMVLAIKDDENKFDMLVRNCVAHDGKRAPIQLVDQNGCVVRPKIMSKFQKIKNFGPSASVVSFAYFQAFKFPDSMNVHFQCVIQVCRYNCPEPKCGPGLPGGEYGLPQIGANGLSEEYGPPEAYERNDFALGGPGVLPPAAYPDPRHPASDATGAYSENQPDVVPSPQAQTSAAVPTADSGTVSGPASSQSPQPQPTGSNELGLPPPPLPGQSGQYSTVKRKDDLSAGGNLVSLGGRPRSVEGLDDLRGVRRRRDTMDIVVKPQRIYKRNAQEMTDVNTSRIIQVVAPGDVNFALNSNASNETVVIQSARSADAETICMSVPSFVGGLVMLLLVLAVASLVAAFLFVRVRHFDRKGAGMAYVN

SEQ ID NO: 28510 - DNA, 5997 bp, DROSOPHILA
tgcttcgacgacctcctggttgactaccagaccaggtacaaaatcgaaaagatcaaggtaatgggttggacctatatggtggcctgtggcctcgaaacggaccactacacggacttctccatcgacattccggtcaagcaaccggaagctgattccgaaattagacgaggatccagcggtgactatttcccacgactagattagagtacaattgtaaaaggtacatctattcagttctgactgtccattttggaagtaccgaggacgatgagatgagcggcgataatgtcagccagccctacgcccaagtgcaagatgtcgccgtcctggtgatgaccgagtttgccctggacttacttcgcatcatgcacgacattcggtacaactacgtgttctcggagtacgatacattcttaacggggagcttgaagataggtgggctgcattaccttcaccgttatcctaatccatccaatgatatctaaggcatctcccatggatccgtgatggccggcgttgttggactctcgaaaccacactatgatatctggggtcataccgtcaatatggcctcccggatgtcctccactggattgctggacaacatccaagtaactcggcacacggcaaaggtgctgcgacaatttaacatccgctgcaactaccgagggcacacggaggtaaagggagtgggcaaggtgcccacctacctggtggtcgtagacccggatctcacattccaagatcacgaccaagtgagcatgagtatgaaggactcaaaaagctgggtcatcgacactctttcactgtcattcaccccgagcttcgtgcccccaaagtcttccacttcggatgaagaggaggctgaaggagagctcgaggaaaatgtatctgaaggcgatgaactggaggtctcgatacatgagcgccaaaagggaggcatctttctggccgggaaccttcattaatttaaatttattttaatagatatatatatatatatatatttatttaagcatatataacacacatatatagatgtattcgtacagttcaaagcaaatgtttttcttgaggttaaatacgttatgatttgagcactcgctgaaatcattgcacaactggtgaccaaagtatacgtatgttcataattcagagtcatacatagtcgttaggttatgtacatgctacagataatacactcatcttgacgaatctccatctccatcactaagaaagcaccatccgtgtgatcaggttcggtttcgtttggttttgtgcacagtttttagcttaagtaagcattgcagttgatttggggcatgggcatagcccttactcgttgacagaactggagttcagcagagccgtgtcctcgggaatgggcttccgcttgtaggagggctcagtggctaggtagacaaccagcgccccgaagaccacgtacattactccaatcacattggccaacacaccagccggtggaagagtggagtaagccggagttttgctagaaatgtcgtcatggattagtcaagtgatcgatctagaatgcatatacacctacatggcgaagatggccttctcggttatgcccatcagggcactagcaatagccagaacgaatccaaagagtccgaagtagatgtgcagcggcatcatggcgatcctgtagttctccctcaaccccggcgccaaaaaggccacaaatccggccacatactgcagcgagaagacgatcaccgcggagagccccagccaagagtgcagggagtacatgttgggaatgggcggattggccaagttgtgggaatcgaagaccgtcttcagggcaatcaccgtcagaatgaatgcacccatgtggatgccggcgtgggtaagcttcagagtcttcttgcgcgtggtgcggaaaccacgatagatcagaatggctgtgggattgaattgagttggattaccatttcgaagctagtcaatgggagtggcgtggcacctcttccgctgcatttactcacagttgccatacaggtaaatgaagccaatggtcatgaacagcggatgccagttgaactccacgccgggatttgaggtgccggccagaccgccgaagtgctggccaatccaggtggccaccaggacgatcatggtcaggccgcacagctgggtgagcacatagagcaccttaaagttgatcagcgctggatccatgttggccttgccgctgcctgaaaaatccaataaaagctggggatgagctaaaaatagaggccattttacgcacagcacgcattggcgatctaatcgcataactcattcaagggtagagatatcggggcatcgaaaggggaaggggatctcaagcactcgtttatattttccatacttttggtttatagcctctgctacgtaaacatgattcaattacatgttccacctgcccgcagattaaaataacccccaagcacttgctgataacatgcgaccagaagtttagggagccaataggcttcccaaaaacccactttaacagttgtacatctgatccgcttcgatggcagctgcactcgttgggtaaacaaacagttcctttgccgccagccatccgatactgcgataaacaagatctcatcatatcgactgggccctgagttaatgggaacggcctgttcccaggcactgggacacacccacgacccctttcgccggccactcaccaggcgtaatttggctaattcatgcgtaaacatttgcgcttgtttacccaacattaattttcaacgccagagcgttctgcccactttatctgtcgccttatcagtatgttctccagatagtccgaacatctgatattaaatcgctttaaatagcatcgtacaagttcctcgtgcttgatgttgcagcatgatacattaaataaattaaagttcgattcattttacggaacgtacgggtagtgaaagtagccgtgttcatagtttggtatagtatagattggacttgactaagatagtttaaaaggctagtaaacttgtaggtgcagatgcactcgataagggccgctatcagccgccctaattggcgtttggtatgcaaatggtgttttaatttcgactcgggcgaataataagcaaatgagccaaactgccaagtgttggcttgtaaattggctgataagtgcgccggagacacttgtagctggcaatcgcaattataaatgctggtaactggcagcagccacgcgtccccggttactcaatgggctccagttggagtgctccatttcgacgcagctctgggttccgagtgaaattaattggcacattagctgtgactatgactgttaattattagggttaagtgggcgtgccaaagacgctgaccagcaaagcgttgcagcagatcgtgcgcaaaatttgaaataaacaatccacataggcgcaccaaaagaccgaaagtaaaacccgggcagatgactttggatgaatttggaaaagcgtacaagtccgaagacagcggagcaaaataaataaagtctggaaaaccaaagtgaaattcagctggttactggttactggttactagtggctgcttgctgatcgcggatcgtgatgccgatggtgatggtgaaaaccgcggcggggaaaggggacggctgcagtctgtctttcggtgcgttttgctttaacttttactataactaaacactcggcttgttggtttattttacttggcactaatcaaacttgcagccaaaatccaatgccatgcacagtctacctgttggtggtgaagttgccgccgccgttggagtggccaactcaatgccagcgatggttgttgcaggttgcacttgttctgctgtcgcaggtgttgcagttgttgctggtgtcgctgccgctggcttttccccattagtcaccgcgatcactgtggtcgccgtggagatggtggtcggaacggcggcctgtggctgctccggaatcgctggctccacctggacaactccgctctccggcttggtcgcctgctccacgtccgcgtccttcgacatggtctgtgcactttaaatcaataattcaccaatggttcaaccacaaaaagacatgcaacgtataatggacggtgttaattgccctaagacacagcacaaaaacactggtaaatgctagtaactaactactagtaactaatccgcacgacaccccgttaatacaaccgaacacttcggcgtgcaatgcgcaactgaatttaaagttttccagccgccgcccggcgatggttaggaaaagctttttccgctcgcaaatctctcgcatgcgacatcgcacacacatattgctcatttcggtgtggataattgtttggttctcgatgcggataggattccagtggggttgggtttgcttttgactttgcctttggctttgggtgccaacgaatgctggttagtatgccggaccaggtcgatcgcttctggttgggaagggggtgcattgatgattatttgcatttcgcattcctcggatctattcaaaccattgtcactgcgcggcatttcaattgcgactttgactttgatgttctgtgcatagtaatgggatggtgcagtggaactgcttcaattggaactactttttgccagaaggagtggaatccaaaacgtaaaagggtttacaaaaagtttttgggtaaaatttgttagtaacaactatttcaatattgttcttagtttcgaaagtacatctacagtaaagtgaaacctttaaggacaacaagtagctttccctcttaaagagcttaagttcatgctgtgcaataatgactgtatgtgcacttcaactcacccagtgagaacaacatggcgtatacttgattgatgcttcactctgctcagataatgcctgtttcaataccgcctgctcttatctttagcagcaattagtgactttaaagcgatgacgatgggtttttcgcgattacttctgattttcgtggctactgccacgcactttactctacttgttgaacaaactgcttaaaatgcaggaagctgggccttccatatggaggaaaagccgtggaaattctgcacaggctgcgtgggcgtgaaagccctaaagccccgcccactctgccgcacttggccatttcatttggcatttccacgagcttttcgttggaagctcagaactgtaaacgccgaagcacacatgcaaacaaactttcgggctcacaccactgtagaaaaaccacttgttggatattatattaatggaaagccacaaccaaattataactgtttgtaaactacatttaaagacgtagttgaaatagaaacaggtaaacttacagatttgaaatgaatcagtaatccaataatgtgttttgtttggaatatttccaaaatgtcttcaacggaagaggcaagaacacaaacagaaacggcacaaacacaaagagataatttggcagcataagagagcggaatgctgtgcgaatttactacgtcagcattattattaacaagttaaacttaaagcggcacattcattgatacttaatttagtacagcaagtcaaggacacggtcaaactttcactatcaaagggttttaaactgtaactcgatctgttaaccgcttcgattttctgtttactcatttggaaaaaagcgggacaaccagggatgcgagaatcatactgtagctgcgtgtgctgaaaaaatagtgtgcatttaatatacgttcacatgatgatagaaagtactgactgtgtgagttttaattttaaaaatttacaaactttatattcatatttaactagagcttggaaaacatttacttcgagaccctggattcccttatgccgccagtgtggcccattgagcacgactgaaacacgctaacgcctttagctcggcagcactggcagctccaacaaaaagcttcaatttaaaataatatttaggtagtcccacaataaatgctaacaaaatgct

SEQ ID NO: 28511 - DNA, 1237 bp, DROSOPHILA
agccacgaaaatcagaagtaatcgcgaaaaacccatcgtcatcgctttaaagtcactaattgctgctaaagataagagcaggcggtattgaaacaggcattatctgagcagagtgaagcatcaatcaagtatacgccatgttgttctcactgggcagcggcaaggccaacatggatccagcgctgatcaactttaaggtgctctatgtgctcacccagctgtgcggcctgaccatgatcgtcctggtggccacctggattggccagcacttcggcggtctggccggcacctcaaatcccggcgtggagttcaactggcatccgctgttcatgaccattggcttcatttacctgtatggcaactccattctgatctatcgtggtttccgcaccacgcgcaagaagactctgaagcttacccacgccggcatccacatgggtgcattcattctgacggtgattgccctgaagacggtcttcgattcccacaacttggccaatccgcccattcccaacatgtactccctgcactcttggctggggctctccgcggtgatcgtcttctcgctgcagtatgtggccggatttgtggcctttttggcgccggggttgagggagaactacaggatcgccatgatgccgctgcacatctacttcggactctttggattcgttctggctattgctagtgccctgatgggcataaccgagaaggccatcttcgccatcaaaactccggcttactccactcttccaccggctggtgtgttggccaatgtgattggagtaatgtacgtggtcttcggggcgctggttgtctacctagccactgagccctcctacaagcggaagcccattcccgaggacacggctctgctgaactccagttctgtcaacgagtaagggctatgcccatgccccaaatcaactgcaatgcttacttaagctaaaaactgtgcacaaaaccaaacgaaaccgaacctgatcacacggatggtgctttcttagtgatggagatggagattcgtcaagatgagtgtattatctgtagcatgtacataacctaacgactatgtatgactctgaattatgaacatacgtatactttggtcaccagttgtgcaatgatttcagcgagtgctcaaatcataacgtatttaacctcaagaaaaacatttgctttgaactgtacgaatacatctatatatgtgtgttatatatgcttaaataaatatata

SEQ ID NO: 28512 - protein, 254 aa, DROSOPHILA
MLFSLGSGKANMDPALINFKVLYVLTQLCGLTMIVLVATWIGQHFGGLAGTSNPGVEFNWHPLFMTIGFIYLYGNSILIYRGFRTTRKKTLKLTHAGIHMGAFILTVIALKTVFDSHNLANPPIPNMYSLHSWLGLSAVIVFSLQYVAGFVAFLAPGLRENYRIAMMPLHIYFGLFGFVLAIASALMGITEKAIFAIKTPAYSTLPPAGVLANVIGVMYVVFGALVVYLATEPSYKRKPIPEDTALLNSSSVNE

SEQ ID NO: 28513 - DNA, 5232 bp, DROSOPHILA
tgcttcgacgacctcctggttgactaccagaccaggtacaaaatcgaaaagatcaaggtaatgggttggacctatatggtggcctgtggcctcgaaacggaccactacacggacttctccatcgacattccggtcaagcaaccggaagctgattccgaaattagacgaggatccagcggtgactatttcccacgactagattagagtacaattgtaaaaggtacatctattcagttctgactgtccattttggaagtaccgaggacgatgagatgagcggcgataatgtcagccagccctacgcccaagtgcaagatgtcgccgtcctggtgatgaccgagtttgccctggacttacttcgcatcatgcacgacattcggtacaactacgtgttctcggagtacgatacattcttaacggggagcttgaagataggtgggctgcattaccttcaccgttatcctaatccatccaatgatatctaaggcatctcccatggatccgtgatggccggcgttgttggactctcgaaaccacactatgatatctggggtcataccgtcaatatggcctcccggatgtcctccactggattgctggacaacatccaagtaactcggcacacggcaaaggtgctgcgacaatttaacatccgctgcaactaccgagggcacacggaggtaaagggagtgggcaaggtgcccacctacctggtggtcgtagacccggatctcacattccaagatcacgaccaagtgagcatgagtatgaaggactcaaaaagctgggtcatcgacactctttcactgtcattcaccccgagcttcgtgcccccaaagtcttccacttcggatgaagaggaggctgaaggagagctcgaggaaaatgtatctgaaggcgatgaactggaggtctcgatacatgagcgccaaaagggaggcatctttctggccgggaaccttcattaatttaaatttattttaatagatatatatatatatatatatttatttaagcatatataacacacatatatagatgtattcgtacagttcaaagcaaatgtttttcttgaggttaaatacgttatgatttgagcactcgctgaaatcattgcacaactggtgaccaaagtatacgtatgttcataattcagagtcatacatagtcgttaggttatgtacatgctacagataatacactcatcttgacgaatctccatctccatcactaagaaagcaccatccgtgtgatcaggttcggtttcgtttggttttgtgcacagtttttagcttaagtaagcattgcagttgatttggggcatgggcatagcccttactcgttgacagaactggagttcagcagagccgtgtcctcgggaatgggcttccgcttgtaggagggctcagtggctaggtagacaaccagcgccccgaagaccacgtacattactccaatcacattggccaacacaccagccggtggaagagtggagtaagccggagttttgctagaaatgtcgtcatggattagtcaagtgatcgatctagaatgcatatacacctacatggcgaagatggccttctcggttatgcccatcagggcactagcaatagccagaacgaatccaaagagtccgaagtagatgtgcagcggcatcatggcgatcctgtagttctccctcaaccccggcgccaaaaaggccacaaatccggccacatactgcagcgagaagacgatcaccgcggagagccccagccaagagtgcagggagtacatgttgggaatgggcggattggccaagttgtgggaatcgaagaccgtcttcagggcaatcaccgtcagaatgaatgcacccatgtggatgccggcgtgggtaagcttcagagtcttcttgcgcgtggtgcggaaaccacgatagatcagaatggctgtgggattgaattgagttggattaccatttcgaagctagtcaatgggagtggcgtggcacctcttccgctgcatttactcacagttgccatacaggtaaatgaagccaatggtcatgaacagcggatgccagttgaactccacgccgggatttgaggtgccggccagaccgccgaagtgctggccaatccaggtggccaccaggacgatcatggtcaggccgcacagctgggtgagcacatagagcaccttaaagttgatcagcgctggatccatgttggccttgccgctgcctgaaaaatccaataaaagctggggatgagctaaaaatagaggccattttacgcacagcacgcattggcgatctaatcgcataactcattcaagggtagagatatcggggcatcgaaaggggaaggggatctcaagcactcgtttatattttccatacttttggtttatagcctctgctacgtaaacatgattcaattacatgttccacctgcccgcagattaaaataacccccaagcacttgctgataacatgcgaccagaagtttagggagccaataggcttcccaaaaacccactttaacagttgtacatctgatccgcttcgatggcagctgcactcgttgggtaaacaaacagttcctttgccgccagccatccgatactgcgataaacaagatctcatcatatcgactgggccctgagttaatgggaacggcctgttcccaggcactgggacacacccacgacccctttcgccggccactcaccaggcgtaatttggctaattcatgcgtaaacatttgcgcttgtttacccaacattaattttcaacgccagagcgttctgcccactttatctgtcgccttatcagtatgttctccagatagtccgaacatctgatattaaatcgctttaaatagcatcgtacaagttcctcgtgcttgatgttgcagcatgatacattaaataaattaaagttcgattcattttacggaacgtacgggtagtgaaagtagccgtgttcatagtttggtatagtatagattggacttgactaagatagtttaaaaggctagtaaacttgtaggtgcagatgcactcgataagggccgctatcagccgccctaattggcgtttggtatgcaaatggtgttttaatttcgactcgggcgaataataagcaaatgagccaaactgccaagtgttggcttgtaaattggctgataagtgcgccggagacacttgtagctggcaatcgcaattataaatgctggtaactggcagcagccacgcgtccccggttactcaatgggctccagttggagtgctccatttcgacgcagctctgggttccgagtgaaattaattggcacattagctgtgactatgactgttaattattagggttaagtgggcgtgccaaagacgctgaccagcaaagcgttgcagcagatcgtgcgcaaaatttgaaataaacaatccacataggcgcaccaaaagaccgaaagtaaaacccgggcagatgactttggatgaatttggaaaagcgtacaagtccgaagacagcggagcaaaataaataaagtctggaaaaccaaagtgaaattcagctggttactggttactggttactagtggctgcttgctgatcgcggatcgtgatgccgatggtgatggtgaaaaccgcggcggggaaaggggacggctgcagtctgtctttcggtgcgttttgctttaacttttactataactaaacactcggcttgttggtttattttacttggcactaatcaaacttgcagccaaaatccaatgccatgcacagtctacctgttggtggtgaagttgccgccgccgttggagtggccaactcaatgccagcgatggttgttgcaggttgcacttgttctgctgtcgcaggtgttgcagttgttgctggtgtcgctgccgctggcttttccccattagtcaccgcgatcactgtggtcgccgtggagatggtggtcggaacggcggcctgtggctgctccggaatcgctggctccacctggacaactccgctctccggcttggtcgcctgctccacgtccgcgtccttcgacatggtctgtgcactttaaatcaataattcaccaatggttcaaccacaaaaagacatgcaacgtataatggacggtgttaattgccctaagacacagcacaaaaacactggtaaatgctagtaactaactactagtaactaatccgcacgacaccccgttaatacaaccgaacacttcggcgtgcaatgcgcaactgaatttaaagttttccagccgccgcccggcgatggttaggaaaagctttttccgctcgcaaatctctcgcatgcgacatcgcacacacatattgctcatttcggtgtggataattgtttggttctcgatgcggataggattccagtggggttgggtttgcttttgactttgcctttggctttgggtgccaacgaatgctggttagtatgccggaccaggtcgatcgcttctggttgggaagggggtgcattgatgattatttgcatttcgcattcctcggatctattcaaaccattgtcactgcgcggcatttcaattgcgactttgactttgatgttctgtgcatagtaatgggatggtgcagtggaactgcttcaattggaactactttttgccagaaggagtggaatccaaaacgtaaaagggtttacaaaaagtttttgggtaaaatttgttagtaacaactatttcaatattgttcttagtttcgaaagtacatctacagtaaagtgaaacctttaaggacaacaagtagctttccctcttaaagagcttaagttcatgctgtgcaataatgactgtatgtgcacttcaactcacccagtgagaacaacatggcgtatacttgattgatgcttcactctgctcagataatgcctgtttcaataccgcctgctcttatctttagcagcaattagtgactttaaagcgatgacgatgggtttttcgcgattacttctgattttcgtggctactgccacgcactttactctacttgttgaacaaactgcttaaaatgcaggaagctgggccttccatatggaggaaaagccgtggaaattctgcacaggctgcgtgggcgtgaaagccctaaagccccgcccactctgccgcacttggccatttcatttggcatttccacgagcttttcgttggaagctcagaactgtaaacgccgaagcacacatgcaaacaaactttcgggctc

SEQ ID NO: 28514 - DNA, 1539 bp, DROSOPHILA
cacgccgaagtgttcggttgtattaacggggtgtcgtgcggattagttactagtagttagttactagcatttaccagtgtttttgtgctgtgtcttagggcaattaacaccgtccattatacgttgcatgtctttttgtggttgaaccattggtgaattattgatttaaagtgcacagaccatgtcgaaggacgcggacgtggagcaggcgaccaagccggagagcggagttgtccaggtggagccagcgattccggagcagccacaggccgccgttccgaccaccatctccacggcgaccacagtgatcgcggtgactaatggggaaaagccagcggcagcgacaccagcaacaactgcaacacctgcgacagcagaacaagtgcaacctgcaacaaccatcgctggcattgagttggccactccaacggcggcggcaacttcaccaccaacaggcagcggcaaggccaacatggatccagcgctgatcaactttaaggtgctctatgtgctcacccagctgtgcggcctgaccatgatcgtcctggtggccacctggattggccagcacttcggcggtctggccggcacctcaaatcccggcgtggagttcaactggcatccgctgttcatgaccattggcttcatttacctgtatggcaactccattctgatctatcgtggtttccgcaccacgcgcaagaagactctgaagcttacccacgccggcatccacatgggtgcattcattctgacggtgattgccctgaagacggtcttcgattcccacaacttggccaatccgcccattcccaacatgtactccctgcactcttggctggggctctccgcggtgatcgtcttctcgctgcagtatgtggccggatttgtggcctttttggcgccggggttgagggagaactacaggatcgccatgatgccgctgcacatctacttcggactctttggattcgttctggctattgctagtgccctgatgggcataaccgagaaggccatcttcgccatcaaaactccggcttactccactcttccaccggctggtgtgttggccaatgtgattggagtaatgtacgtggtcttcggggcgctggttgtctacctagccactgagccctcctacaagcggaagcccattcccgaggacacggctctgctgaactccagttctgtcaacgagtaagggctatgcccatgccccaaatcaactgcaatgcttacttaagctaaaaactgtgcacaaaaccaaacgaaaccgaacctgatcacacggatggtgctttcttagtgatggagatggagattcgtcaagatgagtgtattatctgtagcatgtacataacctaacgactatgtatgactctgaattatgaacatacgtatactttggtcaccagttgtgcaatgatttcagcgagtgctcaaatcataacgtatttaacctcaagaaaaacatttgctttgaactgtacgaatacatctatatatgtgtgttatatatgcttaaataaatatata

SEQ ID NO: 28515 - protein, 340 aa, DROSOPHILA
MSKDADVEQATKPESGVVQVEPAIPEQPQAAVPTTISTATTVIAVTNGEKPAAATPATTATPATAEQVQPATTIAGIELATPTAAATSPPTGSGKANMDPALINFKVLYVLTQLCGLTMIVLVATWIGQHFGGLAGTSNPGVEFNWHPLFMTIGFIYLYGNSILIYRGFRTTRKKTLKLTHAGIHMGAFILTVIALKTVFDSHNLANPPIPNMYSLHSWLGLSAVIVFSLQYVAGFVAFLAPGLRENYRIAMMPLHIYFGLFGFVLAIASALMGITEKAIFAIKTPAYSTLPPAGVLANVIGVMYVVFGALVVYLATEPSYKRKPIPEDTALLNSSSVNE

SEQ ID NO: 28516 - DNA, 2762 bp, DROSOPHILA
aagtgctgtcgtaccgtttaaattacatatttaatgtaatgtaatacaatgtttataatgtatgtatgtatgtgttttcgtgagtgttcgtgtgaatgcagttggtataaatataaatatatgtggcgtgtagtagcaactaaaataaaatccatgtgtgatcaaaggactccaacaggccgccaccgctcgcatccttgcttctcgcttgcttcacacgtaagcacacaccgggttgatgaatatcatatatataatatatctgcagttgcagagggcaggcgatcgggcgtcgttttgtggggctacacgcgttacatggatttacaccaactaaggaatttaaattacagatttgcaatggggtggtggtggtgttggtagtgataggtttgggtgcaacgccgccttctaaaattggttgattaattctcatctgggaagcgtatcgtactattgcatctgcagatcgttgagcaattgctattctctcgcttaattattcgttggccatcatgtcctactttcgtgcctttcgattttctgacctggatacgggagtgtagggttttatgcgtatattagatgggtagtatgattttttttgcttgttttgttggttttttttttttcttatagtgtctcgtcccgccatcggctcctcaattgcttgtgctgggatctgagcaattccggctgtcattaccacaggcccgacgagtagccgcctgggggaatgcggttcttgttgatcaccggagtgccgccattggacgactcctggcgctgggaatactcgttggctacgaccttgtagccctcgcctgtgacggggttgccctctgtgaaaacaaaggaatatcattagaaaatttgactacttagaatgcaaactaggtgtataaaatcaaattggtttctaagaatccgaaattaaagcgcaactaataaaagtacttggggattggctatgttcgtttggagtttggagtatggaatttcagacggaagcgacaaccagaaccaaacgcccacctcggatctttagcttcttgggcttgaggccgccaacaccatctccgttgaggccgaggcccgtgatcggattgcgtgaatcgagtttggagcacgcctgctgctcctccttaatctcgtttggacagagcccaaggggctcctttacattgctcacgcctgccatcttgttcagcgagtatggctgttcgggattatttccagagtctcgccgagtttgacagccctcgttcacctgatcggactttgtgactgtgctgttatctgccggcacgtctccaacttcgctatctcggcacgagttatcaatggatagggcgtcgtcagccggtggaattggcgtttcggttcgagccggttctgggggacacaaggatacgcgtggggatgtttctttggtgtctggtcttgctgttggaagaaggagcggggaggcaggcgaatcggggatgaggatgagtccttaaaggacactggacactacaagtactcactgctcatattgcggaagactgacgcgatacgattcaacagacacaattggttattgttcgtggattggtcggttggttggttggttggtttgacacgattttgagatttaacgtttatagtgcgtgcgtgtgcagtaaaaaatatatatatatatagatatttataaatgcacaacttatttcgttgaatacaattttgttttcaagcgctttggttttgatcggtgtagcaactgcgtgatctaagttcgtactgaatggaaacccagtcgttggatggctccccaatctgacagctgagttcttcgatcgagttcaaatccagcgactactactacttgccagcccaagttagggctaagcgcttctcacctgatctcgagccactgttcatcttgaggttctcggtggaggacgacaccgaagacgaggccgaggacaccgatccgctcttgccgttgtagtggccattggtggtcagcagcttctgggcggcaacggcctctgtgttctgaccaaagggaatgctgctcttcatgtggttcttgccgggggtgatcgggcgggtgggctccccaaacagccgagagtgggagtcgacggtcttctggccgcgacgtggtgcatcacctggtcatcacggttgcggggagttgtaacaaatccaaagaaatcaaataaattgagggaaaaccaaagaaaataaaacattcaaattagtggaattgtgttggagtagaattttaaaattagtttctcaacggtgttttaaaaacttgtacgtaatttcgacagtggttgggtgagtacactgagaaaaatcataaaatgcgtagttcattaaaaggaataatgtattcccctttacttttcttttagtcaaatttgctttaataattaaaatttttaaagcaaacttgatttcgtattttctttcgttgtgtgtgtattgtatggcaaaggttaggcaaaaattgaatgagaggagcagccttgagttcttttcggcttttatctgctcgagctcgaaatgtcatcggcggcaggtggaaaaaggaagcaggccaaccggttgggaataatgcaacttctcgagttggagtgggtcagtatttctgtgggaagtgggtgagctgtgttctgggtttagtcgagacgagtgtgagtgtcagtgcaactgcgttgaatttgcgttgaaacataaattagcacaaaactgacgacaacacaaag

SEQ ID NO: 28517 - DNA, 679 bp, DROSOPHILA
ttgctacaccgatcaaaaccaaagcgcttgaaaacaaaattgtattcaacgaaataagttgtgcatttataaatatctatatatatatatattttttactgcacacgcacgcactataaacgttaaatctcaaaatcgtgtcaaaccaaccaaccaaccaaccgaccaatccacgaacaataaccaattgtgtctgttgaatcgtatcgcgtcagtcttccgcaatatgagcacaagaccagacaccaaagaaacatccccacgcgtatccttgtgtcccccagaaccggctcgaaccgaaacgccaattccaccggctgacgacgccctatccattgataactcgtgccgagatagcgaagttggagacgtgccggcagataacagcacagtcacaaagtccgatcaggtgaacgagggctgtcaaactcggcgagactctggaaataatcccgaacagccatactcgctgaacaagatggcaggcgtgagcaatgtaaaggagccccttgggctctgtccaaacgagattaaggaggagcagcaggcgtgctccaaactcgattcacgcaatccgatcacgggcctcggcctcaacggagatggtgttggcggcctcaagcccaagaagctaaagatccgaggtgggcgtttggttctggttgtcgcttccgtctga

SEQ ID NO: 28518 - protein, 150 aa, DROSOPHILA
MSTRPDTKETSPRVSLCPPEPARTETPIPPADDALSIDNSCRDSEVGDVPADNSTVTKSDQVNEGCQTRRDSGNNPEQPYSLNKMAGVSNVKEPLGLCPNEIKEEQQACSKLDSRNPITGLGLNGDGVGGLKPKKLKIRGGRLVLVVASV

SEQ ID NO: 28519 - DNA, 12816 bp, DROSOPHILA
aacggcctctgtgttctgaccaaagggaatgctgctcttcatgtggttcttgccgggggtgatcgggcgggtgggctccccaaacagccgagagtgggagtcgacggtcttctggccgcgacgtggtgcatcacctggtcatcacggttgcggggagttgtaacaaatccaaagaaatcaaataaattgagggaaaaccaaagaaaataaaacattcaaattagtggaattgtgttggagtagaattttaaaattagtttctcaacggtgttttaaaaacttgtacgtaatttcgacagtggttgggtgagtacactgagaaaaatcataaaatgcgtagttcattaaaaggaataatgtattcccctttacttttcttttagtcaaatttgctttaataattaaaatttttaaagcaaacttgatttcgtattttctttcgttgtgtgtgtattgtatggcaaaggttaggcaaaaattgaatgagaggagcagccttgagttcttttcggcttttatctgctcgagctcgaaatgtcatcggcggcaggtggaaaaaggaagcaggccaaccggttgggaataatgcaacttctcgagttggagtgggtcagtatttctgtgggaagtgggtgagctgtgttctgggtttagtcgagacgagtgtgagtgtcagtgcaactgcgttgaatttgcgttgaaacataaattagcacaaaactgacgacaacacaaagcaaagtgaacacaattttgggttaacttcggggtgaggggacaactgtgcaattgttgacatgaattaggaaagggcagacatagttcaagtaccaatgaaatagaatctgtgagctccttgtcgtactgcaaagatacgtagaaaagaaaagatatagagcgggggtaggaaaaaaaagaagaacgagaacgggaagaaaacgatacacatttaataagcatttaatagaccagaatccacggcaatatctaaaaacatatcacatcatgggcacaatttccaattaaatgatagaacaagcaactaagattgatttaattttcattttttttcgattgctagggatcacacatcatcacatatacatatggggggttcgataatggatggtactcaagcttaccgttgtttttcactccattatctttctcggcagcgaatatgttggacgccatgcgattcttcacgttcctgggggtctgcggcatctccgatccaaagatgtcgctcgatccgccgcccgggggcctcagcaccctgcaaaaaacaaaaacagaaagggggagactcgttaattacaagctcattcttttacggtcggtaattgatatggcacagtgcataattcacaaatttccacacgctcaacgatgaggaaagcacatcgagcctaagcgcggggaaatgcatttaatgtctgtgtctaatcatcatcactgcggctgaaaatggcaaaaggagctggggatggagttgcaattggaattgccggaggaggcggaggagctggctgcactcatcgagtttaagacggagctggctgggtgagcactcaatgggcattagaagtcacgccaagatgcatctcccatcctccggccgcatcgcaattaagtggaaaccctggcataaagaattgcaaccgagacaaaaggctggccaaaaatgttatgctttgtggcattcaccagccactcagtgcccgctgctcactgctcactactcagtcaagtcaagtcagtcagtccgtcgccgtccacgcaacgctgcccaaaaccaaaaccaccagctacagtgccggacggtggtgtaaggcacaaatggtgccacaactctgcgggcaatcgttgtttattaaaattggcccaggcaacgcagcaggactaaatgaaaataattgttataataacagtattaaagtatcagggggtggggaatataataatatcacactttcccacgaggtttaagattgcgtttaagtagtttacaagaatttcaattataattatagaagccagaattgttgacaagtgcagttctattttccttcctttttttttttataaaccatacttgtttcattacaaactgcatagttcctcaatttcttcgccatcaagtgtaatatttccgcagtttttcttccccgccataacagagacatttgatcttttaatttggccaaaatcatggctgtcttgcacacgtgaaccgcactgtcagccatcgaaggctaggctatccgagtgtatctgaggtttctgtgaatgcattttaccgccgccagcatgagacgttgcaacagttagctgaactgtggatgctaccaactccagcttcgccagcttctgcagcaacttccatctcctggtggtggacggatttgcccctaggctcggaaagccaaagaccattcacttgtcaacatttgcttttggtcgctctcttggccatttgcgattgctagtttaccactgcgagacgccttcctcggggcgtcaatcaaatcagcggcctttcagtgggctaaaatattgcgtttttaatgcaccatctgcacgcactcctcctcttcacctattcgcaggaaagtgagagtcgtcaagcgattccagctactgttgttacacttttctgataattaacaaaattgcattgtaattacgcccgattgctgttggcctaaacaaagcgttaggctcaaaaaaaaaaagctgcggctaaaatgtgtggagcgccacaaacaatgagcataaataatagggggcaattcccagtttagcattcatttcgggtattaaaactttctatggctagaattgaattgagtgcagcggaaaagggaaaagtgggtgcttgcagctgaaggtgcgtcgtcttcctgctagaaagtgcaacccaattcgcgtgcccccgacggaagaggaaggtggctgttgctgttgctgcggctgcgcctaattaattataccacactacaccggcggcagcgcctctgctgtgttggccaggccaacacttcttggccctcggaacatgacaaagagtccaaagcgcagccgcaaaggcaaaacaaccgttaaacggccgccgcaagtgtgtgaactgcttgacgggcgggcagcaggtgcaaaagggggaggcaatttacctacacagagagaaaaatgagaaacaatgtagcatgaaaaactgggagtgcgttcatcggactatagatagctagttggctagaatttgtacaatttttatttgattttttgatttgagttaaagaagctgtactaaagtaataacgatatcatatttcctttacagatctcttgctaatagaactactttccagtgtagtggagctttgcgaagtggcgtcgcgtggggaaatcgctggaataactcgggctcgcaatcgcagttcgggttgggttggtgtgtggggtaattgcgatcataactgtcgcacactctatttataagacctggcctccgtgtgcaaagtgttcttattaaaatgtcttcgggcttgttagcatagtcagcggagcgtaaaactcttcttttctttttttttttaactctttcgtttttgacaaagacttgtttctcctgctttgttttcattattttcttttggatctttttttcatgttttttcagtttttttttttttttttttttttgtttagaccggcagggttgagtggaaaaactaacaaagcaacggtaaatgggcaatttttgcgcaagtgacgaacaagtaataattatttaaacagttaagccgccggacatgcatgtgaacttacaacttaccaacttaccgaatgcggcccgatcaaatggaaagcgaaagttgcgtttgactttagcccatgccacatgcggcattcgggcacaatatccatgcacttattgctaaagcggcaaagcggcgaagatatgccgaccatcttaatggccgccagttagccgagcctagactaattaccatccatacgccgaactaaaccagctaaaacaagcgaatagcacaacaaaagaaagaaaaaaaaggtcaccaaattgggaagctttgctcttttaatgaccactggttgtacacatctcaatccgccaggcattattgtccccggaaagtgtcgcagtttattttggcatggcttccgtttgagctggttttgtccatttactttccacacgcactgtggacgcgcaagtctggcttccccggaatcctcctcgtcaatgggctaggctaattcgcaattaacccattttcgccgcctgaacgtcgctattttagtggttttcccttaactgaagctattaaatgccaacactatggcttaaacatgaacaagaactgagctttaaggtgattgttataaataaattaggaaatataggcacagaaaacctatcaagtgtctatgttttgtgttccactacggttggcttgccattttcctgggcacttaatagcgtggcactgtttgaaatatgagccaaatcgaatggaccaatcttgcggcgcacccctaccctcaagttccctccctgtccaccatttgatctccggatcactggaaaacctttcacacaccaggcgccgcgggcaaatgttgaccaagtcaggagatcggcgacaaaacaagaccgccggtcggtcagccagcgagtaagctagtcagccaaacagccaggtggagctgggagtgcgcaggtggctcccagttggaggagtccacggagccttggcttctcccgtcctggatgatgacaaaaattaatgtacatcgaagagggtgggggggtgcaaagaaaggagccagcggcagggaggaagaggccaatccgagcgaaaggtaatgtggcatgctgcttgctgcaacaacaggcgaaaagaaacaacaacagcggcgaaatttgaaaacaaccttttcgggtaaaagttgttcgggttgtgcatatagaaaatacttggctcaaagtgatagttgtcgctctgatttagtttgggtttagttttttgatttttcactctacgttcatggcctttcttcatcgacacggctctagggtattttccctgcctctcccccccccccccctctttttcaaccaaatgttgctgcgataattgttttatgtttgcacacataacataacatatcgaggggctttttcagatttcccttttacccgccgtcatcaattaattacaacaccaagggggcgtggcgggcccaaagtgcaagccagccaaatcatggtcaatatccatccagcagcactttgttgtaggcctctcgattttaaattatgaaattaaatataactttctactacgctcgcttttagttcgattttcatttggcaatgtagagaggtgtgttattacaactaagcatgacgaaagttaatgaaacaaaataagaacttatttataagttagcttatccatagaaagaattctatacactctgtagattgcttgtaagtgtaagtaagagtatttccgtttcgaattatcttgcacttgcgttgagcttcataaacttcaacgccaaattcatttcgacagttttctaattaaccaactgtcaaaattcgtctttgctcagcgcacaagtaaaagttgaaatcggagatcgccttccttcctctgcttttgcgaaaagctgttggaaaactttttgtgtattgacagtgtgtgggaaagcgaagtcaaaaaaacagaaaactaaagaaattaaaaactaatgcatttggagcataagaagcttatttccgtctcgttttctaaatgcattccctatgactaatgcctcaaaatttcgtaatgaaaatgcctggtggtgtgtgaaaatctctgtcgtttttttcccgatctgtctgtctcgctgtcaagctgctgctgccgctgctgcttctggccacgacgacaagggggtgccaaaggcagtaaaaaaaaagccaagaaaaaatccgagagacaagagaagacaaggctgaaacggttgtctgttgtccgttgccaagccaaagttaatttgtttctttttctctatgtttttttttttggctaattcccgattttggtggaaaagaaggtggcggggaatggatgttggtggctgggtggatgcctcatgtcgttttataatgaagttgctgctatttgggtggagctgcggggaggcggcggtacatgcagcttgattaattgcaattgatttttatgactttgtttaaactctgcaaacggccggcttaattcgctcggtgtatgcacataaaggggagtggaccgaccatggctttcccgggaaaagaaaagaaacgaaacgagacgaaaagaaaagggtcgggtcaaaccgattttcactcggtctcccgtctgtggaatgtcgaggagtcttctccggactatccctgctcatttgttagttggtttttctgttgatttgtttgcctgctgagagcaatcatgcaataaaaatgcacaatttactgccagtcagtcgcgatgcctcagctttatggtttagtccataaagcttcagctatgtatagtccgtccagccgatcgttatgctgcactgcacctgtacatcacatcatcgtggtcatagtgatgcagatggaaatgaaaatggagttggagctggagatggagctccagctggagttcggagtttggagtaggctgttccagttgattcggcttgattcgaatgtccgggtaattgtttatcggacgagtacacttgatgtgttactgtttgaatctttttactacattttttgctgcccatttattattgagttttgggtttgttcggctcattatgcttgctgctcgactgcatcgcattgcagcggtggctgcgttgctgcttcctctttgtttcatttaaaacgtgtcccgtccgattcgtgcaaccgcaaaatgtgaagggagcgagggggacgtattaaaaacctaatgaaaatccaactgaagcacgaaaattgtgtgcggttttcttctattgttgctgccacttttgttatgattgtctctccctcccatttttgatttacctaaaaacgttgattagtcgattccattataattgccgcttcggacaaagccaaatccaaatcaaacaaaacacaatggaacacaaaaccgaggcgggcaaatacctaagtcgaagaatctactactttccccgcggatcgcaaggaggaaggggaggagctactctctttttccagggggagggaggcgtggcggcggagatcactcgagcgcggtatgtttaccgttgctttccactcaaaagcttttcaaatccaatcagctgtggccggccaacatatgtacatatatctctatcaatcggatcggcatagtcgggcattccacaaaggtgattggaggaatgataataattggtagcaaggaatttacactcatcccaaaatggaggccttgcttaattgtttcaattggaaaagacactacagacatttttcatactaaataaggtgagatcggacttcagtgtgttatatcttatattcatttacattgctgacgatttcaaaaagatatttttcagaccccactaatggataacccaccgagggaatctcctgctgcgcctcccaattaaaaccgacttcctttgcccatgattcaactacaatttgagtgtcagttccacgcgcttttcccatttccccctttcccgggctcaatcaaggcaatagcatttaaattgatatgttttcctggtcagtcacggtcgtgaaaagtgtcagatgacagcgggcatggaggattggctcctccaccgaagacatgatgaccaggaagacacaagagggcaccaaatcaaaaccgcagcgggtggtgtttcttcttattttttttttccttttttttttttcttttttggaggtgtgattaatggtcggtgcgggatttgatgaaaattcataattggacaatgctgggaagaaggagttttttttttgtgcggcacaggcaaaccatagattgtcaattatcgatagtgctggcctgagcccgatgaataattatcgattagccgtgtgcggttgcagttgccgtttccgaggaaagtgtgctgtgctcgagaggaaaggaaaagctggcttggaaaagccgcatgtatgtagatgccgatagtgatgctggcatttttattattatgtatatgcgtacgtaagctgggattggcttcgtaaattgtgcatttcagagccagagagcaaaaccgaaaccaaagccaaagtcaaaccataccagaattgctgacacactcatcgcagcgaaagttgcagatctgccgcttttaaatatgtaattaataaatttgtattgattaatttgcggctttgtgaaaagcgaaaggactttctaatatattcacacacagctcctcccgacgagaggataaccaaaatactcctctttctccttctccttcaattttcgcccgatcgatgcgaattgaatactgaacagcctcattcatcgtatcaggcactctaaggtacactagggttccatcaagagtccatataatgtacataccatatacattttggggttgccaggggaacacactttcaccaagggccgaaaagtttttcttcacttttcctgcccgatttccgtgtcaacaggaattacattgacgcaggcattacggtaaaatgtgtttgatttccttttcggttctgtcaataggtcatgctgatactgggtatgtggtggggttgtggtgtagatttctgttgattattccttataacgactttggctcgttttccgcatgttctgcaatcatttgcataaatgttgacttggcaacgccaaaaaaaaaaaaaaaaaaacattcccatcgcggtatattatatatggttataaatatatggaaattcttgatttgtttgccgactttccttgcagaatgaggttaacttcaggttgtaaacagtagatatgcgggcattgtgcaaaggaattcaagcgtataatgatcgtcagatggatagacaatgccataaacaaaatgaattgtcatgatttccgccgcttatacaacgcaacaaagagcgacaattcaatccgatatcttggcgcgtcgcacctttgagatttaatttgattgtttacaataataagtcatggctttgccgaagaaaggagaacacacacacacacacacggcagacaaaacgctgcatcgaaatgcagaggaaaagtatattaatcattttccccccagccgccggcgggaaagtccaaggcggtatgttacacaatcgcaatcaatgacaatgattaacacattttccacactttatccccagcagccagccacccatcgatggaccataaaatccagcaaattgtttataatgcacatggcacacataaggaaaattgtttctatttggtttctgccgcgaccaaaactaatctccgatcccaacggccgcgaagagaggcggggttcaatgtccgccacggaccagcggacgacggacaacggacaaacggacagttgaacggacggacggacagacggtcggaacagcggacagggaagcggacttggacacgaattcaaactcggaacaggtacgagagcgtaagagtggtatacggaatagacataagcgaaaaacatttcgataacgattttgttgttgtttccccactcgaaaggcgaaaaatgggtggtgctgggcacatggggcttggtcaaagaattgcatgcaaaaacaaatgccgaaactaactgaaaaagaaaggcgggccatagttgagagaagtcgatgggggaaataccctcgtcgtacaagcggcgataaacggtaataatataatgatttatttttagcggtaataggacgtgattgttcaataataaacattttattatatttcgtatcatttggataatgggcgaatctaatcagtttttatgtttaacaaatctgtttgattgccgaaaagtgagttgaagctaaaattgaattttcataataactgcataaccaatgtttttagtacaccataggcggctattatggattttagtatgccataaaaaatcataagcttcataactgtaaaaatgccattctacactttgaactttcaaagtctatgtactaataaaacaagttttaataaactaaaaatagtttaataaagccaccatttttttttatgcaaagactgacagagcggtttggcagttactccttgaaattaaatgaaacacagatgaagccgagaaatcacttttgcttagatgtgcaaacattattattattagtagtagtgtcacgtcaaatagtatatttcgttaacacctcgtaattaaaattgcgcattgttttgatggcacgaaaagagattgtcatacgcctcggagcaagaaagggtatattcccaaagaacgccggtcggtccctttgactttggtgcggtagcatcgagtggacgactgcagtggtggtgtcgcgggtggtgctttgtgcggtgggttggcgtggggcaggtggccgttgggttggcaaaggaaaatcaatgagacgacatccaaagacatgccaacaccggcggcttggcttggcttggctttgctgggtggtggtggttcacttgctaggtggtttcggttttgtgggaagtaggcgcttgcaaaagtggtgctccccagattacacatacgccccgtgcacacgcgactgtatgggtagtattagttagtcagtcagtcaggcggcggcgaggtgaatgaacgctaaattaatctacacacataaccaaatgaatatgtaagtgtgcggtgtttgtgcggcccgacagctcagacaatgggataaagatggaaatggagatgttgatgcagatcacgatgaggctgctgccttccgaaatgtttgccaatcaaagttcactcgagcgatggcaaacaataacagaatgtgcagtaggcacgtaacagttgttaaacttcagggaaaatgagtcggtcggcgaataacctcaatataagtcaaacacattgagtaacatcgtgtaagttacgttattatgatacacagatttttaaacaaatacagaatatattgattgtcctagctgtaatgatttacatgagaacattatttgttaataaagaacctactaatcattgttcgtcattgtcaaaacaatattccttcaattctttgcagcttgtcataattagtgagactcattttgaataaatattgataatatatctatttactgaaattaccagccatatgattctctttgtgcgtcatggtgatttatacccttttaaaacctcagaagatggtttttgacaaaagcattattaacaaaggccactttttgtactcgtattaaacgacttttcttgcatggggacatgcattgacaaaaactgatgaactcccttttccgtgtaaaaatgtgtaataaatccggacaacgaatttatcgattcattttttgacatgcaaattctttgttctgaagtctttaaaaatgtcactttaactgtatcctttaggaatttcttacctcttctttgctttgccaacattgtaaagctcaacgtgtttgaaagcagcgtaggcggccatttctgtttctatttgtttggcgaaaggataatctctctgttgaatggatgcaattgctttacttttcgcactggaaaaatctaagcgcacgcggatgtgggggaaaacggagattaggcacgtgggggaaaatgttgcaggacgaatgatgatgactcatagatggggatgctgcatgtgcgtaaaatcaataaaccctactcaactgcgagagaatgcaaggagcatcccgggagagaacggacaagagatatgcggagaggggggtgcagtaagagcggacagaaaacggacgaaattcctttagttggataagccaggatatcttgcaacgttttcccaaccaactaccgaaaaaattcccaaaaaacacttcactcacaaagaaagctaaaaaacttttgatttgcactcgcgtgggtttttttcgattcgaaggatattttgttgggatagcaatatatatatatatatatatatatgcaatatgtttgagtgtgcgaccgctggtgatgtgcacgtttcgataaatgtctggcgactaaagtgcagtgggaaaagtgaaaagcattttataccacggcagcgcgagaagttttatcgatccaaaaacaacgaccgaaacccaactcactcagagcgcaaaagctgcacgggaagagagcgggagcgcaagagagtgagtgcccgccatgtggcgcatcaaaacaaaaacaaactacagctgatgctgattagagttggagcccgctctcttccatgctctctccctctctctatctctcacttgtggggcagaacccaactcgtggtgagttcttcactccgcttgtaggtcacaaaaaagtttaaaatacgccaggaactgaagcgaaaataaaacatatacttaagccgtgtttaagacacttgcgggattaacattctgcatttatttatctcattttatgtgccccaccggcgagaagtgtgcgcagatatgcttcagttatgccgtgccattgcaaaaagcgctagaaaagcgaaaaaatagtaatagttcaggtctagtgcacttcagggttcctatgcaattgtttcttttctcagcttcttctgcttga

SEQ ID NO: 28520 - DNA, 441 bp, DROSOPHILA
cccccacatccgcgtgcgcttagatttttccagtgcgaaaagtaaagcaattgcatccattcaacagagagattatcctttcgccaaacaaatagaaacagaaatggccgcctacgctgctttcaaacacgttgagctttacaatgttggcaaagcaaagaagagggtgctgaggcccccgggcggcggatcgagcgacatctttggatcggagatgccgcagacccccaggaacgtgaagaatcgcatggcgtccaacatattcgctgccgagaaagataatggagtgaaaaacaacggtaagcttgagtaccatccattatcgaaccccccatatgtatatgtgatgatgtgtgatccctagcaatcgaaaaaaaatgaaaattaaatcaatcttagttgcttgttctatcatttaattggaaattgtgcccatgatgt

SEQ ID NO: 28521 - protein, 86 aa, DROSOPHILA
MAAYAAFKHVELYNVGKAKKRVLRPPGGGSSDIFGSEMPQTPRNVKNRMASNIFAAEKDNGVKNNGKLEYHPLSNPPYVYVMMCDP

SEQ ID NO: 28522 - DNA, 2696 bp, DROSOPHILA
cgcattgttttgatggcacgaaaagagattgtcatacgcctcggagcaagaaagggtatattcccaaagaacgccggtcggtccctttgactttggtgcggtagcatcgagtggacgactgcagtggtggtgtcgcgggtggtgctttgtgcggtgggttggcgtggggcaggtggccgttgggttggcaaaggaaaatcaatgagacgacatccaaagacatgccaacaccggcggcttggcttggcttggctttgctgggtggtggtggttcacttgctaggtggtttcggttttgtgggaagtaggcgcttgcaaaagtggtgctccccagattacacatacgccccgtgcacacgcgactgtatgggtagtattagttagtcagtcagtcaggcggcggcgaggtgaatgaacgctaaattaatctacacacataaccaaatgaatatgtaagtgtgcggtgtttgtgcggcccgacagctcagacaatgggataaagatggaaatggagatgttgatgcagatcacgatgaggctgctgccttccgaaatgtttgccaatcaaagttcactcgagcgatggcaaacaataacagaatgtgcagtaggcacgtaacagttgttaaacttcagggaaaatgagtcggtcggcgaataacctcaatataagtcaaacacattgagtaacatcgtgtaagttacgttattatgatacacagatttttaaacaaatacagaatatattgattgtcctagctgtaatgatttacatgagaacattatttgttaataaagaacctactaatcattgttcgtcattgtcaaaacaatattccttcaattctttgcagcttgtcataattagtgagactcattttgaataaatattgataatatatctatttactgaaattaccagccatatgattctctttgtgcgtcatggtgatttatacccttttaaaacctcagaagatggtttttgacaaaagcattattaacaaaggccactttttgtactcgtattaaacgacttttcttgcatggggacatgcattgacaaaaactgatgaactcccttttccgtgtaaaaatgtgtaataaatccggacaacgaatttatcgattcattttttgacatgcaaattctttgttctgaagtctttaaaaatgtcactttaactgtatcctttaggaatttcttacctcttctttgctttgccaacattgtaaagctcaacgtgtttgaaagcagcgtaggcggccatttctgtttctatttgtttggcgaaaggataatctctctgttgaatggatgcaattgctttacttttcgcactggaaaaatctaagcgcacgcggatgtgggggaaaacggagattaggcacgtgggggaaaatgttgcaggacgaatgatgatgactcatagatggggatgctgcatgtgcgtaaaatcaataaaccctactcaactgcgagagaatgcaaggagcatcccgggagagaacggacaagagatatgcggagaggggggtgcagtaagagcggacagaaaacggacgaaattcctttagttggataagccaggatatcttgcaacgttttcccaaccaactaccgaaaaaattcccaaaaaacacttcactcacaaagaaagctaaaaaacttttgatttgcactcgcgtgggtttttttcgattcgaaggatattttgttgggatagcaatatatatatatatatatatatatgcaatatgtttgagtgtgcgaccgctggtgatgtgcacgtttcgataaatgtctggcgactaaagtgcagtgggaaaagtgaaaagcattttataccacggcagcgcgagaagttttatcgatccaaaaacaacgaccgaaacccaactcactcagagcgcaaaagctgcacgggaagagagcgggagcgcaagagagtgagtgcccgccatgtggcgcatcaaaacaaaaacaaactacagctgatgctgattagagttggagcccgctctcttccatgctctctccctctctctatctctcacttgtggggcagaacccaactcgtggtgagttcttcactccgcttgtaggtcacaaaaaagtttaaaatacgccaggaactgaagcgaaaataaaacatatacttaagccgtgtttaagacacttgcgggattaacattctgcatttatttatctcattttatgtgccccaccggcgagaagtgtgcgcagatatgcttcagttatgccgtgccattgcaaaaagcgctagaaaagcgaaaaaatagtaatagttcaggtctagtgcacttcagggttcctatgcaattgtttcttttctcagcttcttctgcttgatcttcttcgttttttaaaactagtttctcttaaaaaaatcaagtgcattcaaagttttaaacccaaatgtacccatagcaaaaatcaaatttatactttattgaatgattgcaaaaaatacacaattcactaaaattcaactaccaggcttataaacccaaaccttattataatctaaatccaagctctacaaacaaatcgcagttgaatgccgaaagaaaggctcatatctatttcagtttgtactaaaacattatgaacttagccccccccatttccaacacgcttcttatctttgattacagggtgtggacagcacagc

SEQ ID NO: 28523 - DNA, 350 bp, DROSOPHILA
aaaacccacgcgagtgcaaatcaaaagttttttagctttctttagagattatcctttcgccaaacaaatagaaacagaaatggccgcctacgctgctttcaaacacgttgagctttacaatgttggcaaagcaaagaagaggtaagaaattcctaaaggatacagttaaagtgacatttttaaagacttcagaacaaagaatttgcatgtcaaaaaatgaatcgataaattcgttgtccggatttattacacatttttacacggaaaagggagttcatcagtttttgtcaatgcatgtccccatgcaagaaaagtcgtttaatacgagtacaaaaagtggcctttgttaa

SEQ ID NO: 28524 - protein, 76 aa, DROSOPHILA
MLAKQRRGKKFLKDTVKVTFLKTSEQRICMSKNESINSLSGFITHFYTEKGVHQFLSMHVPMQEKSFNTSTKSGLC

SEQ ID NO: 28525 - DNA, 3416 bp, DROSOPHILA
ataatttacaaaaaaacacagtggaaattcttgatgcctgtgtgccggagcgtgtgctcttgaaagtttgacttattgttaatgatccttccgcaatcagggcatacatatggaccagtacctcctccaattgacttttgatggttcaaactagtcggtgctgagaccttttcagcacttggcattggaagatctttgacttcaggacatagaatggactcgtccaactcactctcaatttggttatcatcgatgtcttcgtatattattggatctgtggagcaatccttgctgtcgcactcaatcctttccagattctgtttctcggcaatgatgcagcgctggcggaacttaatggctgcctgcagattgtccaggcaagtcgtgcacatttggccggatatttctttcttgcagcttagctggaaagtataaatagcaaattaagtgccatgattaaggaatatttttagacatattacctccaccccagtaatggagtgaatttgacgaactagatgaccgtttcctggaccaaaaaggtctattggggcatctgatctagagcaaatgcggcaattcagaattcgcatctcgactttgatttgtttttgaataattgtttactgtttacgtttcgagcagcttatgcgaaatgtgtcgttaagctatttgcatggtcactctaacttttgcacgcataaacgctgtttagagtttttgcacagggattagtaccttatgaagtaacataaatacaaatatgttttataatctcatttaataagagtaccataatggtttactgcactttttaaatcatttaagtcacacaatggcattgccgcacttatcgattttgtcgataataaaaccagctgttgcatcacaatatatatacatacatatgtgtagtggatgcgtttacaaaacaattggttgtttatattcgaattaaactgaagttgggctaaacttcggttgattttcaactaacattatggcgctccagtgccggacctgcggcagcatcatctacaataaaatgcccaagaatctctttcatattgagaacgagaagatgctgcaagacataaatcttgtcactggcacaacagtatgtaagaaaaatggtttccatttgatttgtgcagcattttctgtgattgcagctccacaacgatccagagctgcccagcagcatatgcgcctgctgcacgcttgacttgaaccaagcgattttgttccgggagcggtgcatcctaacgcagaagcagctcgtccatcgtcgtagatctcccgaagcgaaggaaccggctgaagatgttgaggagatggcatcaccgccggattgtctgaacgatccattcggggaagtcgatgaatacattgtggaatccccagaagaagttttggatcatgatagtgatgctcatcatgatctggatgaggataattatattgattctgttgaagatgttgatgcgcttcaagatatggctgaagtagccgaagaggattctcaagatgtcgaatctctgatctcaagtgtacagaaagaacttgagagcatttgcaacgacgacagcaactcggataacaacgattacatggagccccaaaacggttcctatttcaatgaaactataaacgaatatgaagtatcatcgaacccaaacacaccgctgcccgaatcgaagagtgcagcaggtcggtcaacgaagccagcgaccacaaaacccaagcggaaaaaacagtacgttacgtggaaaaatatgaccgaggagcagatcatagagcgtaagcgactgcagcgtaaacgcgagtgtgtttgcgaacagtgcggccggcaattcaccgaccaaagcaatttcaagcttcacatgctgcggcacacgggcaataagaacttcgcctgccagcagtgtggcaagcggttctacaccgaccatctcatgacgctgcaccaacgaatcattcaccagggcgagaagccatacgactgccgcttttgcaccaagtcctttcacaatagcaacactcgcctcatccacgaaaggtaagggacgtatccttgtatccactacggattcggacatttctgagctcaaaccaaaaaaaatcctttctaggactcacaccaatgccaaaccctacagctgtcatcattgcgataaatgttttaagtcagcttcgggacgcaagcggcacgaactaatccatacaggagtgcgagcctttgcgtgagtattttttgactaggcgttggtattccaaaatttaatacaattccctttgcagctgcaccatctgcaaacaatccttccagcgcaacactcacttaaaggcccatctgcgatctaaatttcacactgcaaaagcgaaaaccattggtgcggaggtactacaattataagctgatatagtatttaaattaaaaaacaagtattagatataagaaataaagcaatgttttcatttaattggagtgcaaacatttaaattgcgataaaattttattaacccgatttaataatcgacacatgctgcagtgcagccctgccaataagtatccaaggtggcaatcctgacatatttcaatataaatttggagtgaaaataagaatttttattcaagtttacacgtctgcccgaaacttccaaatacatttgacggagaaagtattaaacattattttttatctttaatcgtttatttagccaaaggcttaaagattttggtatattttggcgcttcaccaacggtcacacagtaaccatttcctatgaaattcacattgcatttctctttagaattaataaaactaaaaaaagaaagaaacgagattgcacacaatcgtttacgacgaagcttgattcacccgccaaaagtgttcccctccgcccgactgcactgtgagaataccggttgttgaccttcggcagcatggagcgtcgtcgctttaacatgagcagcatgtcacccatggcggattccacgcggattgacgcgtcgctgttgtaagacaccacctgtccaactggattctaagcggttactaatcaaatttgctctcctttgttcagaaacaatcgtccggcggccagtaatttcctgaggggactgagtcccaaggggtcgaatacctcgctcaatggcacacgcactccggagcggtccttgatgaatcgctctgccacatcgtccagtaccataacgcgacagaaactgaacctcagtcaggttgatcccaggtaagtcaaagcttgtgtgccatttcacgatgtgacgaaagtgcaatatcaaattttcatacctttcagaacctttgccgatgtgcatagcagcggactgtcatcccggatcgtggccttaagcgaacgcagtggtctgcaacgcagcatgtccgccagca

SEQ ID NO: 28526 - DNA, 1230 bp, DROSOPHILA
atggcgctccagtgccggacctgcggcagcatcatctacaataaaatgcccaagaatctctttcatattgagaacgagaagatgctgcaagacataaatcttgtcactggcacaacactccacaacgatccagagctgcccagcagcatatgcgcctgctgcacgcttgacttgaaccaagcgattttgttccgggagcggtgcatcctaacgcagaagcagctcgtccatcgtcgtagatctcccgaagcgaaggaaccggctgaagatgttgaggagatggcatcaccgccggattgtctgaacgatccattcggggaagtcgatgaatacattgtggaatccccagaagaagttttggatcatgatagtgatgctcatcatgatctggatgaggataattatattgattctgttgaagatgttgatgcgcttcaagatatggctgaagtagccgaagaggattctcaagatgtcgaatctctgatctcaagtgtacagaaagaacttgagagcatttgcaacgacgacagcaactcggataacaacgattacatggagccccaaaacggttcctatttcaatgaaactataaacgaatatgaagtatcatcgaacccaaacacaccgctgcccgaatcgaagagtgcagcaggtcggtcaacgaagccagcgaccacaaaacccaagcggaaaaaacagtacgttacgtggaaaaatatgaccgaggagcagatcatagagcgtaagcgactgcagcgtaaacgcgagtgtgtttgcgaacagtgcggccggcaattcaccgaccaaagcaatttcaagcttcacatgctgcggcacacgggcaataagaacttcgcctgccagcagtgtggcaagcggttctacaccgaccatctcatgacgctgcaccaacgaatcattcaccagggcgagaagccatacgactgccgcttttgcaccaagtcctttcacaatagcaacactcgcctcatccacgaaaggactcacaccaatgccaaaccctacagctgtcatcattgcgataaatgttttaagtcagcttcgggacgcaagcggcacgaactaatccatacaggagtgcgagcctttgcctgcaccatctgcaaacaatccttccagcgcaacactcacttaaaggcccatctgcgatctaaatttcacactgcaaaagcgaaaaccattggtgcggaggtactacaattataa

SEQ ID NO: 28527 - protein, 409 aa, DROSOPHILA
MALQCRTCGSIIYNKMPKNLFHIENEKMLQDINLVTGTTLHNDPELPSSICACCTLDLNQAILFRERCILTQKQLVHRRRSPEAKEPAEDVEEMASPPDCLNDPFGEVDEYIVESPEEVLDHDSDAHHDLDEDNYIDSVEDVDALQDMAEVAEEDSQDVESLISSVQKELESICNDDSNSDNNDYMEPQNGSYFNETINEYEVSSNPNTPLPESKSAAGRSTKPATTKPKRKKQYVTWKNMTEEQIIERKRLQRKRECVCEQCGRQFTDQSNFKLHMLRHTGNKNFACQQCGKRFYTDHLMTLHQRIIHQGEKPYDCRFCTKSFHNSNTRLIHERTHTNAKPYSCHHCDKCFKSASGRKRHELIHTGVRAFACTICKQSFQRNTHLKAHLRSKFHTAKAKTIGAEVLQL

SEQ ID NO: 28528 - DNA, 6349 bp, DROSOPHILA
gatcatagagcgtaagcgactgcagcgtaaacgcgagtgtgtttgcgaacagtgcggccggcaattcaccgaccaaagcaatttcaagcttcacatgctgcggcacacgggcaataagaacttcgcctgccagcagtgtggcaagcggttctacaccgaccatctcatgacgctgcaccaacgaatcattcaccagggcgagaagccatacgactgccgcttttgcaccaagtcctttcacaatagcaacactcgcctcatccacgaaaggtaagggacgtatccttgtatccactacggattcggacatttctgagctcaaaccaaaaaaaatcctttctaggactcacaccaatgccaaaccctacagctgtcatcattgcgataaatgttttaagtcagcttcgggacgcaagcggcacgaactaatccatacaggagtgcgagcctttgcgtgagtattttttgactaggcgttggtattccaaaatttaatacaattccctttgcagctgcaccatctgcaaacaatccttccagcgcaacactcacttaaaggcccatctgcgatctaaatttcacactgcaaaagcgaaaaccattggtgcggaggtactacaattataagctgatatagtatttaaattaaaaaacaagtattagatataagaaataaagcaatgttttcatttaattggagtgcaaacatttaaattgcgataaaattttattaacccgatttaataatcgacacatgctgcagtgcagccctgccaataagtatccaaggtggcaatcctgacatatttcaatataaatttggagtgaaaataagaatttttattcaagtttacacgtctgcccgaaacttccaaatacatttgacggagaaagtattaaacattattttttatctttaatcgtttatttagccaaaggcttaaagattttggtatattttggcgcttcaccaacggtcacacagtaaccatttcctatgaaattcacattgcatttctctttagaattaataaaactaaaaaaagaaagaaacgagattgcacacaatcgtttacgacgaagcttgattcacccgccaaaagtgttcccctccgcccgactgcactgtgagaataccggttgttgaccttcggcagcatggagcgtcgtcgctttaacatgagcagcatgtcacccatggcggattccacgcggattgacgcgtcgctgttgtaagacaccacctgtccaactggattctaagcggttactaatcaaatttgctctcctttgttcagaaacaatcgtccggcggccagtaatttcctgaggggactgagtcccaaggggtcgaatacctcgctcaatggcacacgcactccggagcggtccttgatgaatcgctctgccacatcgtccagtaccataacgcgacagaaactgaacctcagtcaggttgatcccaggtaagtcaaagcttgtgtgccatttcacgatgtgacgaaagtgcaatatcaaattttcatacctttcagaacctttgccgatgtgcatagcagcggactgtcatcccggatcgtggccttaagcgaacgcagtggtctgcaacgcagcatgtccgccagcaatctttacaatcccttgacgcagccgcgcagagcgcccgcttccccgttgccctacaagtcaagggcgccgacgctttcgatcacgcagattgcaccaccggagcgcagcttttattccggaaacacgctgtcaagcctgttgcgatccaactccttggtagggttagtgccaaagaccaccgaacaggagcagctttcgagagagaatcgacccatattgcacccacctcatccacagcatgagagcgagccaactagaagcgtgttggaggagcttaaggagatctcccgaaagcgcatcaacactgaagtaagtataagccatcaatcatcctatgagaagatcaccggcttacacttggcttgctttcaggatacgcaacaggctcaagactacacgaaaaggagttgccagcaaaacgtggactttgtggactttgtggctcatcaccgtcagcaacagaaactacgtaatttgcagcaacaacagaatcagtcctttaaaaggcaacgagagctgacggtatcggttccgctcaggcatcattcgacatctttgtcggctgcttctcctgcattgcaacatatgaactcgaatggaaccatctccccaacacaatctccggagcaggtagccaaacgtcccaattgtagctacagcaacgacatcacttcctcgctgagttccagttgccgtcacagcaacaagaggaagctgttggacatgcgagaaaggtttcagcacagcaaaaacgacacactagctagtggaggaagctcgcctgagaactcgcccgaaaatgttgccaaaattcaacgtaaagttgatgcagaagctgttagcaaggcaatgagcatgcccgtcgtgactgtggcggcagttcctgcttcacgagccatttcggctcctgccattcaaaaggcagttccgcaggtgacggaaaaacctaagcttacactcttcaatgcgcgacaatctcaaacgatagcggaacagccgcgacccgatttgagtagcccggaagtagatgccggcgaatatgcaggcattcagttcgtgaagcctaaacagcagaattccatgctggctgccaagaaccctagcgtagaacgcacacacaagaccaaactagccattatgctaagtggattgaagggcgaactgtacctgggtgagccggacgaactagatgccccagcgccgaagtcagcgccagcgcctgtgacgcttcctactcccgtcaaacccatcatcatagctcctgtaaccacatccactacgaccgttacgtccaccgcaaccatatcaacttctgcgcccagcaagccgataatactaagtaaccaggttataaagccagcagatgtgccaaatacgaatagcactggctcagtgcccaaacttgtgcttggtcagcctgcgccgcccgctaaaacggaacaaacaccaccaaaacccatcgacaaggtcccggcagcacaagcagatatcccacccaagtttgagctatcaaccaaacccgttactccagcaacatcatctcaaccactaatcagttttggcacaccaaaatccacagcagcaccatcattctcgtttggaagtgcgaccaataccactagtagcactattgctaatatcaccaatactaccacatcaaagcccatattctcgttcggacaaacgcctgccaatggtcccacagtaggcggcctttctggattcaaaactgaagctccagcaacaacttcggttagcacaactaatcctgggacacaggttacatcaacaactactttcggagtgacaccacccaaaacgacgactacagttgctccgactacaactgtatcgctaaatttcggccagccgatgccatcatttggagcagcagacacgggggtgaaaccgatgttctcctttggtaaatcgaacaatttaagttcaggaactccgacaacaaatggcagcgatgcagctgccgccaagcctgctgtattcagttttggaggtagcaccactcagcccgctgcagctgcaccgacaccggtattcggaagcctatcgaaacccctaggcgaaggttttgcatcgcccggggctaacaaatccgagacaactaagccgagcatttttggcaatttggacaacggacttggaaacgcaatgaagtcatcaactaatgtagcagccacaaccgccgccgagcttcccaagccatttggcttcgcagctacaacaaccgctgctggcggaggatcaactgccacaaatctcttttcatttggagggacggccacttcaaaggcagcggaaccagctccagctagccaaaaaaacctttttggactaaatgcaaccacaactacgccctttgcattcggaggagcagcagcgggcgccgcagataaaagtgaaaataaggacaacaaaccaattgcatttgcatttggtgcaggtaacaacagtgcggtagccaacccaagtggagtatttagctttggtggcacggacaagagtgcaccaccagcctttggcagcggaacaacatctgttacatctgccacagcaacaccgacgaacaacacctttgggtttagcacgactcagaagcctgcaacaccaatgttcggaagtggatcaacgcaacagtcttcgacaccggcagtggcagccaccaaaccttttacacttggtggtggggctcctactacaccgtcagcatctccagcatctggaggattctcgttttccgccgttgcgaccaaaaatactacggcgccaacagcaggaacaaatttgtttggcagccccgccagcgccagcaagccaagcttcaactttggaggaaacaccgccacccaggcggcggcagcaggatcaccagctggtggcttctcattcgccacgaccaccaagaaggaggactcagcaagcaccaatatgtttgggagccccaacaccggagtggtgaagcctaactttagcttttcaagcaacaatccaactccagcgcctacctttggcggattcggtgctccagcagcggctgcaccaacagcaacttcaactaatcagagcaagccctttgcatttggggctagcactccggctgctgccccccagccgcccttgggcggcaatctttttgccaacgcagtgtctgctacccaaaaccaaacaaagccgtcaggagtcttctcatttggtgcggctaagagcaccgccggcaccacagccggcaatgctcccttctcgtttggaggcgcatctgctggcggaatcgcctcgccgcccagcaatcagggtttaaataccgcaaagccattcagctttggtggcgctggcggcactccagccccgaatgtctttgggagcccagcccctgcaccgccagcaagcaatccaaccgggggcttcaactttggcggcgtcagtccggcccagcaggcgaatgccggcaacatgtttgcccccacaccggagagtcgtccgatacgaaaggccactaggcgtctgcagaaataagtccgcttcagaagtagcttaatattgtgttgctagtaaaattattaattataccgaaaagtgaatggctaaaaacaagtagtaggcagtacgctttttaatatataaatattaatcgactctggttcgttctgtgaaatgtaattgacagacttcttcttaaattgtcactaaataaaaataaataatttataactattataagtaacgcaaaagcaaatacatgttattgaaacgaatatgaagattttcaacgtatcaacgttcaaacactttgaatttcatttggaatattttcccgtgactgatgaactaaaaaagaaacgcaacattaatttcatgcttgtattctttacttttattaaaagttttagaactctctgccctcctttaatcaccgcgtttaagttttgtgtgttggtgcatatttgtgttgctttctccagggtttcactaacgcatagaactttcgtttacaatgtggattgaagtgtgtttgtaaaaaaataataactttaaaattaattaaatatataccatgtggacgtggatgtgtgtttgtgagggggtgtgtgttgttggtgtattaggtgtgttttacataaagtatactaaaattatgtgttaaagcaaagtggctgcccttaaacgaaaattaaaacgcataaatgtacaatttgcttaaagggaactttaaaatagacattatttgttaagttaattagggggtaggtttttaaaaaataaattacaattttcctttgccttgccgccagatgcattggatgggttcgattaaagtacagagaaggagattccttgttagaagaatggaccgaataatgaacaaatccacgaactttgcgcgtaataatttatatttgtatattattaatcgatttataagctaaatacgtaggtaatgtgtattgtattatgtatatgtagacgttttaatgtaatgcatattttcacaagtgtttttctctttttcgttttcttgagtttaaggacacgcagcctatcagccgccttcgtttatttatgcttaggtttcgcttgcccatgttgcataatttttgctggctttgttttcgttttatttttattcttttaatacaaataaatgtaacgaaatttaactaattctcagcgtgatctctttgccaacgacttgttggacaagttcttt

SEQ ID NO: 28529 - DNA, 4214 bp, DROSOPHILA
aaattcacattgcatttctctttagaattaataaaactaaaaaaagaaagaaacgagattgcacacaatcgtttacgacgaagcttgattcacccgccaaaagtgttcccctccgcccgactgcactgtgagaataccggttgttgaccttcggcagcatggagcgtcgtcgctttaacatgagcagcatgtcacccatggcggattccacgcggattgacgcgtcgctgttaaacaatcgtccggcggccagtaatttcctgaggggactgagtcccaaggggtcgaatacctcgctcaatggcacacgcactccggagcggtccttgatgaatcgctctgccacatcgtccagtaccataacgcgacagaaactgaacctcagtcaggttgatcccagaacctttgccgatgtgcatagcagcggactgtcatcccggatcgtggccttaagcgaacgcagtggtctgcaacgcagcatgtccgccagcaatctttacaatcccttgacgcagccgcgcagagcgcccgcttccccgttgccctacaagtcaagggcgccgacgctttcgatcacgcagattgcaccaccggagcgcagcttttattccggaaacacgctgtcaagcctgttgcgatccaactccttggtagggttagtgccaaagaccaccgaacaggagcagctttcgagagagaatcgacccatattgcacccacctcatccacagcatgagagcgagccaactagaagcgtgttggaggagcttaaggagatctcccgaaagcgcatcaacactgaagtaagtataagccatcaatcatcctatgagaagatcaccggcttacacttggcttgctttcaggatacgcaacaggctcaagactacacgaaaaggagttgccagcaaaacgtggactttgtggactttgtggctcatcaccgtcagcaacagaaactacgtaatttgcagcaacaacagaatcagtcctttaaaaggcaacgagagctgacggtatcggttccgctcaggcatcattcgacatctttgtcggctgcttctcctgcattgcaacatatgaactcgaatggaaccatctccccaacacaatctccggagcaggtagccaaacgtcccaattgtagctacagcaacgacatcacttcctcgctgagttccagttgccgtcacagcaacaagaggaagctgttggacatgcgagaaaggtttcagcacagcaaaaacgacacactagctagtggaggaagctcgcctgagaactcgcccgaaaatgttgccaaaattcaacgtaaagttgatgcagaagctgttagcaaggcaatgagcatgcccgtcgtgactgtggcggcagttcctgcttcacgagccatttcggctcctgccattcaaaaggcagttccgcaggtgacggaaaaacctaagcttacactcttcaatgcgcgacaatctcaaacgatagcggaacagccgcgacccgatttgagtagcccggaagtagatgccggcgaatatgcaggcattcagttcgtgaagcctaaacagcagaattccatgctggctgccaagaaccctagcgtagaacgcacacacaagaccaaactagccattatgctaagtggattgaagggcgaactgtacctgggtgagccggacgaactagatgccccagcgccgaagtcagcgccagcgcctgtgacgcttcctactcccgtcaaacccatcatcatagctcctgtaaccacatccactacgaccgttacgtccaccgcaaccatatcaacttctgcgcccagcaagccgataatactaagtaaccaggttataaagccagcagatgtgccaaatacgaatagcactggctcagtgcccaaacttgtgcttggtcagcctgcgccgcccgctaaaacggaacaaacaccaccaaaacccatcgacaaggtcccggcagcacaagcagatatcccacccaagtttgagctatcaaccaaacccgttactccagcaacatcatctcaaccactaatcagttttggcacaccaaaatccacagcagcaccatcattctcgtttggaagtgcgaccaataccactagtagcactattgctaatatcaccaatactaccacatcaaagcccatattctcgttcggacaaacgcctgccaatggtcccacagtaggcggcctttctggattcaaaactgaagctccagcaacaacttcggttagcacaactaatcctgggacacaggttacatcaacaactactttcggagtgacaccacccaaaacgacgactacagttgctccgactacaactgtatcgctaaatttcggccagccgatgccatcatttggagcagcagacacgggggtgaaaccgatgttctcctttggtaaatcgaacaatttaagttcaggaactccgacaacaaatggcagcgatgcagctgccgccaagcctgctgtattcagttttggaggtagcaccactcagcccgctgcagctgcaccgacaccggtattcggaagcctatcgaaacccctaggcgaaggttttgcatcgcccggggctaacaaatccgagacaactaagccgagcatttttggcaatttggacaacggacttggaaacgcaatgaagtcatcaactaatgtagcagccacaaccgccgccgagcttcccaagccatttggcttcgcagctacaacaaccgctgctggcggaggatcaactgccacaaatctcttttcatttggagggacggccacttcaaaggcagcggaaccagctccagctagccaaaaaaacctttttggactaaatgcaaccacaactacgccctttgcattcggaggagcagcagcgggcgccgcagataaaagtgaaaataaggacaacaaaccaattgcatttgcatttggtgcaggtaacaacagtgcggtagccaacccaagtggagtatttagctttggtggcacggacaagagtgcaccaccagcctttggcagcggaacaacatctgttacatctgccacagcaacaccgacgaacaacacctttgggtttagcacgactcagaagcctgcaacaccaatgttcggaagtggatcaacgcaacagtcttcgacaccggcagtggcagccaccaaaccttttacacttggtggtggggctcctactacaccgtcagcatctccagcatctggaggattctcgttttccgccgttgcgaccaaaaatactacggcgccaacagcaggaacaaatttgtttggcagccccgccagcgccagcaagccaagcttcaactttggaggaaacaccgccacccaggcggcggcagcaggatcaccagctggtggcttctcattcgccacgaccaccaagaaggaggactcagcaagcaccaatatgtttgggagccccaacaccggagtggtgaagcctaactttagcttttcaagcaacaatccaactccagcgcctacctttggcggattcggtgctccagcagcggctgcaccaacagcaacttcaactaatcagagcaagccctttgcatttggggctagcactccggctgctgccccccagccgcccttgggcggcaatctttttgccaacgcagtgtctgctacccaaaaccaaacaaagccgtcaggagtcttctcatttggtgcggctaagagcaccgccggcaccacagccggcaatgctcccttctcgtttggaggcgcatctgctggcggaatcgcctcgccgcccagcaatcagggtttaaataccgcaaagccattcagctttggtggcgctggcggcactccagccccgaatgtctttgggagcccagcccctgcaccgccagcaagcaatccaaccgggggcttcaactttggcggcgtcagtccggcccagcaggcgaatgccggcaacatgtttgcccccacaccggagagtcgtccgatacgaaaggccactaggcgtctgcagaaataagtccgcttcagaagtagcttaatattgtgttgctagtaaaattattaattataccgaaaagtgaatggctaaaaacaagtagtaggcagtacgctttttaatatataaatattaatcgactctggttcgttctgtgaaatgtaattgacagacttcttcttaaattgtcactaaataaaaataaataattta

SEQ ID NO: 28530 - protein, 1287 aa, DROSOPHILA
MERRRFNMSSMSPMADSTRIDASLLNNRPAASNFLRGLSPKGSNTSLNGTRTPERSLMNRSATSSSTITRQKLNLSQVDPRTFADVHSSGLSSRIVALSERSGLQRSMSASNLYNPLTQPRRAPASPLPYKSRAPTLSITQIAPPERSFYSGNTLSSLLRSNSLVGLVPKTTEQEQLSRENRPILHPPHPQHESEPTRSVLEELKEISRKRINTEVSISHQSSYEKITGLHLACFQDTQQAQDYTKRSCQQNVDFVDFVAHHRQQQKLRNLQQQQNQSFKRQRELTVSVPLRHHSTSLSAASPALQHMNSNGTISPTQSPEQVAKRPNCSYSNDITSSLSSSCRHSNKRKLLDMRERFQHSKNDTLASGGSSPENSPENVAKIQRKVDAEAVSKAMSMPVVTVAAVPASRAISAPAIQKAVPQVTEKPKLTLFNARQSQTIAEQPRPDLSSPEVDAGEYAGIQFVKPKQQNSMLAAKNPSVERTHKTKLAIMLSGLKGELYLGEPDELDAPAPKSAPAPVTLPTPVKPIIIAPVTTSTTTVTSTATISTSAPSKPIILSNQVIKPADVPNTNSTGSVPKLVLGQPAPPAKTEQTPPKPIDKVPAAQADIPPKFELSTKPVTPATSSQPLISFGTPKSTAAPSFSFGSATNTTSSTIANITNTTTSKPIFSFGQTPANGPTVGGLSGFKTEAPATTSVSTTNPGTQVTSTTTFGVTPPKTTTTVAPTTTVSLNFGQPMPSFGAADTGVKPMFSFGKSNNLSSGTPTTNGSDAAAAKPAVFSFGGSTTQPAAAAPTPVFGSLSKPLGEGFASPGANKSETTKPSIFGNLDNGLGNAMKSSTNVAATTAAELPKPFGFAATTTAAGGGSTATNLFSFGGTATSKAAEPAPASQKNLFGLNATTTTPFAFGGAAAGAADKSENKDNKPIAFAFGAGNNSAVANPSGVFSFGGTDKSAPPAFGSGTTSVTSATATPTNNTFGFSTTQKPATPMFGSGSTQQSSTPAVAATKPFTLGGGAPTTPSASPASGGFSFSAVATKNTTAPTAGTNLFGSPASASKPSFNFGGNTATQAAAAGSPAGGFSFATTTKKEDSASTNMFGSPNTGVVKPNFSFSSNNPTPAPTFGGFGAPAAAAPTATSTNQSKPFAFGASTPAAAPQPPLGGNLFANAVSATQNQTKPSGVFSFGAAKSTAGTTAGNAPFSFGGASAGGIASPPSNQGLNTAKPFSFGGAGGTPAPNVFGSPAPAPPASNPTGGFNFGGVSPAQQANAGNMFAPTPESRPIRKATRRLQK

SEQ ID NO: 28531 - DNA, 3355 bp, DROSOPHILA
ataacgtggtccaaaggaaatcttctttccggcatccttgtacatctgctcaaactcgggaatgtattgtccgtaggtgttgcgctccttatagaacactttccagctggcgacattttcccggtttccggaattgggcaagattttagccatgtaggaaatgctctgctcggaaccatctaatgaaacaaataatatattgaattaaaaatataaaatctaagaatattattctagattataattatgcttttatgttttaactttttctcatcacttaccattcaattccaattcaaaattggctctcaacagcagcgttgtgtagttttcaccctttcccgctgtgggttctagccggaatgacttaattttcttgagatccggaaaatcacgttccagaattggctcgaatttttgctgatccagccatgctggaatgggctcgatggcaatgtcctctgtttcccgaaccatatcgttcacctgttggcgttgctgtttgctcagtttcgcgtgggggctgctttttattggtttcatcacagggagcttttcagtttgaagctttggctccatttcgctagatggctaaagtccgtcacatgcgaacgcttttctgaggggacctgtttattcggatcggcgattggtcgtgatgcaaaagccacattcatgaccgaacgacttaaaaaaaagcgtcgtatcagtcgttctaaacaaacgtctagatcatgctgcttgaaacctaatgatgatcagcactgagcttttttttgcagtttcattgttacaatggctttttcagcaatgacttgcagccttggttcaacaattatctgccttactatagtagctcttaaaaaatatgtatcggtgagcctccaaaagcttttgataatgtttatattgttcaaatacacccatcgttcatcttatctaagtttgtaacggcgtatttatttattgtacactcatcttagtcgcaactaattatagcctagtcttcttcgaagtatccacgattctccatccatggcagcagctctctgatttgctccccaaacactggattcctaaagagctcttcaatgtcgttgtttccaaagtccgagagaacgataggcagtatttccgtggcagtttcaaatgctgttaaaaatatacctagtttttaagcaaacagataatatgtttccaacctaccccaatggccgtatttcagtaaatctaattgtaaatccgtgaggctgggcttctttcccagaaactttaagaggttcagattttcgatcaactgatcgtgatagaactttacataaccatcaaatcggctagatttttcagctggggccgtgagaagtgaactgaatagatcgtatacagctggaccatattgggcagtgtgaaaaccactgaagagcgtatccttaacattcccgaaagcatctacttggaggagcaagttattaggccaacaagatccatttagaatgacattgaaagaagttttcgagtctagaatctccgtaccggatttcacatacttttgaaaagatttctaaagaaaaaacttgaagtaagtggaagggtatctacagaagactatggagtatacctaccaccttatcttcgtattgtctggcgtcgttggatcggagactttcgtgaaatctcaattgatacaagctcttcagttcggcagtctcttcatccgattttgagttctctctaagctttggaagctccctaatctttccgggagtcttagctatataggcagccgtaccggcgtgataagcagccagtttcgaaagtacgccttccatggcggttacggacaaacctttgaggccattggccacggaataacccttgtttagaatgtagtcgccatatatgtggctggatttcagctttgcctggatgactggtggtccaaagtgcacgatcctatccgaattttgataaagctcctccagggcaggtaacacaacctcgaacatgtgacgttccgttgagaaatcccccgttctgggcaactttagtccaactggcaccgtttctggtgacttgattaggtaactcacttggcgtttcttgttgtctacggttagtttttttgtgagtattgacagaatatctttctttctaaaatttcttacctgccacaagcacctgaatatgaacacaaagtgccggctcagccagttgagtctcccacttccatcgaagactctcgatttttcggaactctgatatctgctttactaaggcttccaactccttcttctccacccaagtcggcagagaagcgtcttgggattgttgtgttaccagtagtgggctcgacattctcctccgttctcgattgcaaactaaacttgggcaggcaattttatgggaaccatgaaaaccctgtgagtacttttcacatatgtgtacacaagaatcgataagtgcgttgatagggaatgtgggttgtatgattgaaatttatgaagtcaggcaaacatgattgtggacttttaagctatcttagataagtccgaacacactattaattcgcacaaaaagagtgagatacgttggctcccgacttgctcactgtttattggatagttaagtagctttgaaaacagatgctatttttgatcctaaatcccatctatcatgatctaatatatattggattctgccctaattgagttcgaaaaatgtgtcgaaaaattgccaaaaatgccagaaattgtagcaaaattcaattaatttgtcatacctatttgacatgcagtgcacaaggggaggaatgggatagtcaatatcagtcgatgtatggacataggggttttcaatgggatgaagttaatataagccacgcgacagggtctagatacaatattttaaagctctatccaggttcccacaccgcaggtgccggaaagatcaactttagaagttaagatcagcatatttatttatttgaaagagtttactaacgcgctaatcggtgacacgtgagcacaattcataggcgaggggatgtggcaaacaaccccgaaggagaagctatctaattcggcatgaagtgtcacaaattcatcaaaacatattgtacaccaaactaccaaaacattggaaacaagggacgcagtcaacccccaggtagcagcccactttccgacttccgatcccaatgtccatgcaatatccgttccgaattaatttgctgcccggaaaaaagggcgctaatctgttcgcgatgggcgttgaacgcaaaaattccttggtatttagcccggttgcggggaatccctcaagtgttacacttgttcctgggttgtccttggttagg

SEQ ID NO: 28532 - DNA, 1074 bp, DROSOPHILA
atgtcgagcccactactggtaacacaacaatcccaagacgcttctctgccgacttgggtggagaagaaggagttggaagccttagtaaagcagatatcagagttccgaaaaatcgagagtcttcgatggaagtgggagactcaactggctgagccggcactttgtgttcatattcaggtgcttgtggcagacaacaagaaacgccaagtgagttacctaatcaagtcaccagaaacggtgccagttggactaaagttgcccagaacgggggatttctcaacggaacgtcacatgttcgaggttgtgttacctgccctggaggagctttatcaaaattcggataggatcgtgcactttggaccaccagtcatccaggcaaagctgaaatccagccacatatatggcgactacattctaaacaagggttattccgtggccaatggcctcaaaggtttgtccgtaaccgccatggaaggcgtactttcgaaactggctgcttatcacgccggtacggctgcctatatagctaagactcccggaaagattagggagcttccaaagcttagagagaactcaaaatcggatgaagagactgccgaactgaagagcttgtatcaattgagatttcacgaaagtctccgatccaacgacgccagacaatacgaagataaggtggtagatgctttcgggaatgttaaggatacgctcttcagtggttttcacactgcccaatatggtccagctgtatacgatctattcagttcacttctcacggccccagctgaaaaatctagccgatttgatggttatgtaaagttctatcacgatcagttgatcgaaaatctgaacctcttaaagtttctgggaaagaagcccagcctcacggatttacaattagatttactgaaatacggccattgggcatttgaaactgccacggaaatactgcctatcgttctctcggactttggaaacaacgacattgaagagctctttaggaatccagtgtttggggagcaaatcagagagctgctgccatggatggagaatcgtggatacttcgaagaagactag

SEQ ID NO: 28533 - protein, 357 aa, DROSOPHILA
MSSPLLVTQQSQDASLPTWVEKKELEALVKQISEFRKIESLRWKWETQLAEPALCVHIQVLVADNKKRQVSYLIKSPETVPVGLKLPRTGDFSTERHMFEVVLPALEELYQNSDRIVHFGPPVIQAKLKSSHIYGDYILNKGYSVANGLKGLSVTAMEGVLSKLAAYHAGTAAYIAKTPGKIRELPKLRENSKSDEETAELKSLYQLRFHESLRSNDARQYEDKVVDAFGNVKDTLFSGFHTAQYGPAVYDLFSSLLTAPAEKSSRFDGYVKFYHDQLIENLNLLKFLGKKPSLTDLQLDLLKYGHWAFETATEILPIVLSDFGNNDIEELFRNPVFGEQIRELLPWMENRGYFEED

SEQ ID NO: 28534 - DNA, 4889 bp, DROSOPHILA
gctagcaacgttgctgcgccacaagcttcagctggaggagattcgacggaactggagcgctgttgctggatctgttttgagaccgataaggaggcaggtcgccaggcttgggtgaatccatgtctctgccgaggaaccaataagtgggtgcaccagagctgcatttccctctggatcgacgagaagacccgaataaacaacaatctgcaagccgtttcctgtccacaatgccaaacggagtacaccattgcatacccgaatctctggattttcgatagggctttggagctgaccaacgatcttatcctaacaaacttatataattgcctggccaatgtcttcacggtggtctttgcctattggtcagcggtttcattcggagcaaaaacatatttgcagatcactggtcaggaaggtcacgttcatcaaataattcaatcgggagacctgttggttgttctggtcggattcccattaatctcggtagttctgatacttggacgcttaattccctgggaagatgccctgttgcgcttcattagaatatgttattcattgctgcgaagtctttcaatgatgtgcctaggacggaaatatgaccaccagaccgaaccatacccttctgcgccaatgaccgaatattcagcatcgcgggtggtctgtggagccatcctcttgcccaccatatccatgtacgtgggtagagttctttacagctctgtcgacgatagattgcaacaaactcttcttgggggattgactttcatagcgatcaagggattcctcaaaatgtacctcatgcatagccaatacatctgtcgtatgaagcgtcgtgttttggattacacgaaggaaaacctagcggaggcagacggacactaggtaaactcaagatctgcaagagaagcaagaagtaatttgaatatctatttaaattgtaaagtgtacaattttcctaagactacgtgtcaatagtgcattcttactaccaatcataaataatcgttaaagcatttattaatttatgcataatagtttacagctaacagtaggaaatggtgtctaaatgtaatgtactccctaggatctctatgcacgattgatcgatccagccccctctttacggaagtcaactctgtatcgagggcgcgatcgtcgagaactaaaactccaatgtatattttaactatacaaaaaatactgtatgccgtgtgtgtgtccaatgaacttggccgcaactcagatgcggttaagtaactgcgcgccaccttaagtaatcctcgcctaacgtctcacttcgttcggcttctgtgcctggttcctggagctgcgtcgtccaacaactcgttcagttgttgggctcctgcttgtattgttattgtcggttgttcaccccctcgggattgtggctgctgaccatgctgtgctccatgttcttcacgatcacatagttggtgatgtggttgatggcctcgtcctgcagccgctccggccagcgcttcatgtacgatttgatgaagtcgccgaacgtgtccaccttatcgggagtgctcttgtgcgtgtccacgatgttcttcacaatgtccacgaacttgtcgtagtcctcgtgcgacttcttgatcttctggtagttggccacgcctccattggtgttgcccccaccaccaccactgccaccgcttccaccggcagccgtgttcatttgctgatccatgttgttatccgccaggcgggctgaggcagcggcagccaccgccgccacggccgccgatgaggccatgaagttgtccacgctgccggcattgggtggtggctgggagtggtccataaagtgccgatgcatcccgtactcggtcctgcaaatcccaattgttatttaaacatgttgtgaggaaggtgttccaatgctagtgcttacttatagaacccctccgtgttgttactattaaactcttgctgagacattggattcttccaaactggtgactcggatgtggatggtaagctgctcgtattggacgcacttgtcatgcgtttgtctctggaaaataataagatattttgttagtttgggattgctatatgggaagtatctatcatatctcaaccaacttgtaaccggtgtgtgcggccagactcttaaacacatcatccacttgactgtagaacttccaggtgctgatgatgcctgtggtctcaaaggtcttctgctcctgccggtagcgctgcgttagattgttgactttaaagtgaacctcgagtgcggtaacagggacgcccagcgaggttagctgcttggccattgccacatacagatggccattgcgtttaatggtgcgcagctcataggcgcagactttccatagtttgatcagctctagaacaccactatcctcccattgtcggcgctttttgttgaatttttcatactgcgaataggtatacgattatattgatgataaagctactgattccaaagacaacttacaggcatttcacatgggtcttactgccgacaaatgggattgcccgacaatcttcgtctgccagctgatggaggacatgaagcggtttatctagtgggctggcatactgtacacggattcgctcctgaaataaatcaaatgattagttaacgtgcaggtgtcgttgtttactatttgtattgttagacgtattaatattgcaatccctatgagtttcagggatttcttaaaaagtgcacaccacacgtaaataaacaaccgaacatatggtcagccacctatttgatgactatttaattgaattgaaatggtaattaatcttttgtagcctaataccttcccacaaaaagggttacgaatgattgcatttcatagttaacttagttctcgcggcaattaaagggtataatgttgtaatacacataaaattctattatattgcagcagagtttggattcatagaaatatttatgtatttttaagctcctagaaggactcattccctagttgtcatgggtattaattactatacgatataattatgcacaatttgaagttctatttatattcactaattaatttcagcttaaacttttaaaacgcaagtatttttaacaattcttatcacaggaaacaaaatgttataggaactgttttaaatttggcatccaatgattttaaaatgggttattgtcgcttccgtgttgtttgtaccgtaatcccattggctaacaacccattttctggcactaaagggtatttactagtcggtgtactttgtctattttctagctttcaattatcattaagccggctcacacacaccgacgcagctcagccgctcccgcacaaacacacacgcatgcaatgcaaatcgaacggtaaacggtaaacaaatattaattgtgcgagcgaaacaagttgcgatatgcatgcagcagctgcggcagcagcagaagatgagaagtggatgcggcgacgtttggaatcgaagtgaagcggtaactcaagtgtagaagggagttgggctcagatgcggatgaagatgctccgccgacgtcgacggcgacggcggctgcgggatagcagcattggagccaatgtacatatatgtaagttcgcggggggtgagaggttacttttctcgaatacacacacgcacacacttttcccatttcagagatacacacactcacatcgcatccacatccgattttcttgcgttgattgcgttctattgttacgtttttcgctttgctccatgcaacaacgggcgaaacaacaacactacgacgccaacagcgtgggcacaaaacttaataataagtcaaataattaaattttaattatcttcaagagggaaacacacgaaaaacgtagtttgtagctcctacgctgcgcagctctcgcaattcgactctataatgatgttctcggcgtgagcgagacagcatggcatggcaagagcaacatggtgtgagcggtgcggctagtgtgacatggcgttgccagacagtcgccagtgcagtgcgttggggtttcgaacagcgccaaaaggtgggaaattgaaaatgtttattgcggctttaggccaatagaaccaagtcatctgccatttatcgtgctcaatacagtacttttacttcaatctcggctcgttagggcgcaacaaagcaagcgcatttcatcgctcatcatcatcatcaccaccacctactcccgcctcccttcaacaaatcgcttttcttggagcataatgcacacacacactggcacagtcacaccgacacgtatgtgccggtcatcatcatcatcattaggttgtgcgatggagcaacaacaacaacaacaaaagcaaacgtcattagcgggctaaataacaaaaaatgataatgtcgctgctgccacaaagtcgtcgtcagttggctttgcttgtggggtaatcatcattaaattgcacatcgtctcgatgaaaaagtgctggcggggcggggcgataggcgatgggggtggggcaaggcagaggaagaagaaattgggggaagcgaaatcccaataacaaggtcaccaaatattcaaaaatctacgaacctagccaactatataaatagtaaactttgagataattaataatagacatacaaactaatgttgtttatttgtattttgaaaaatatattacgtaaatttctagttattgacacatatttttactttcaaataggttttagttgaatatcaatctattttcattctccctaaatatattattataaacaattatgttcttcagtgtttacaaatttctatattgcaaatatgtatctttttcttttgttactaagtacagattgtttaggaatacaaaatgaatatgtcatcatcttcaagaacttgacattt

SEQ ID NO: 28535 - DNA, 1625 bp, DROSOPHILA
ctgcgcagcgtaggagctacaaactacgtttttcgtgtgtttccctcttgaagataattaaaatttaattatttgacttattattaagttttgtgcccacgctgttggcgtcgtagtgttgttgtttcgcccgttgttgcatggagcaaagcgaaaaacgtaacaatagaacgcaatcaacgcaagaaaatcggatgtggatgcgatgagcgaatccgtgtacagtatgccagcccactagataaaccgcttcatgtcctccatcagctggcagacgaagattgtcgggcaatcccatttgtcggcagtaagacccatgtgaaatgccttatgaaaaattcaacaaaaagcgccgacaatgggaggatagtggtgttctagagctgatcaaactatggaaagtctgcgcctatgagctgcgcaccattaaacgcaatggccatctgtatgtggcaatggccaagcagctaacctcgctgggcgtccctgttaccgcactcgaggttcactttaaagtcaacaatctaacgcagcgctaccggcaggagcagaagacctttgagaccacaggcatcatcagcacctggaagttctacagtcaagtggatgatgtgtttaagagtctggccgcacacaccggttacaaagacaaacgcatgacaagtgcgtccaatacgagcagcttaccatccacatccgagtcaccagtttggaagaatccaatgtctcagcaagagtttaatagtaacaacacggaggggttctataagaccgagtacgggatgcatcggcactttatggaccactcccagccaccacccaatgccggcagcgtggacaacttcatggcctcatcggcggccgtggcggcggtggctgccgctgcctcagcccgcctggcggataacaacatggatcagcaaatgaacacggctgccggtggaagcggtggcagtggtggtggtgggggcaacaccaatggaggcgtggccaactaccagaagatcaagaagtcgcacgaggactacgacaagttcgtggacattgtgaagaacatcgtggacacgcacaagagcactcccgataaggtggacacgttcggcgacttcatcaaatcgtacatgaagcgctggccggagcggctgcaggacgaggccatcaaccacatcaccaactatgtgatcgtgaagaacatggagcacagcatggtcagcagccacaatcccgagggggtgaacaaccgacaataacaatacaagcaggagcccaacaactgaacgagttgttggacgacgcagctccaggaaccaggcacagaagccgaacgaagtgagacgttaggcgaggattacttaaggtggcgcgcagttacttaaccgcatctgagttgcggccaagttcattggacacacacacggcatacagtattttttgtatagttaaaatatacattggagttttagttctcgacgatcgcgccctcgatacagagttgacttccgtaaagagggggctggatcgatcaatcgtgcatagagatcctagggagtacattacatttagacaccatttcctactgttagctgtaaactattatgcataaattaataaatgctttaacgatt

SEQ ID NO: 28536 - protein, 264 aa, DROSOPHILA
MAKQLTSLGVPVTALEVHFKVNNLTQRYRQEQKTFETTGIISTWKFYSQVDDVFKSLAAHTGYKDKRMTSASNTSSLPSTSESPVWKNPMSQQEFNSNNTEGFYKTEYGMHRHFMDHSQPPPNAGSVDNFMASSAAVAAVAAAASARLADNNMDQQMNTAAGGSGGSGGGGGNTNGGVANYQKIKKSHEDYDKFVDIVKNIVDTHKSTPDKVDTFGDFIKSYMKRWPERLQDEAINHITNYVIVKNMEHSMVSSHNPEGVNNRQ

SEQ ID NO: 28537 - DNA, 7341 bp, DROSOPHILA
gatgtcatgaaccggaatattaatcagatagtgtagaggtaattgattatttgcattataatcaaatcgcacttgtttattgtttaaaatttattatttttgaaaaatttctaaacaaagaagctgattatagttatagttgttgtttgtgaatatttgttttgcctctttatctgaatttctaatagttcacaccaaactgtgctaaattattagaaacagcttaaccacagacacagtcttaaatcaaagttcaaccattcatagacacacaatcgaatcactttagttatttggcattacatttagaacgtgtttcacgatttaacaacaaattggtttgcttagaaaaaactaaccgatagcaactagtggcactactgatctcaccagaggatggtgaccgaatgcgtctagttctacgatcgaactgagtttctgattttcagagagcaatattttcagagaggtcgaaaagcgagactaatttggaaaattagcagctcagagtatcatattattatcagctgcaaaacagagtgcggcttacccggcgtatacgttattttacatcccattactcgcagtatatagttaatattgcaattattttaaaatgtctttttcgagatgtataagaaagaatccggtctggtatttaaaattaaaaaatatatatattttgtatgaaattcattacaatgcatactatgttagtcttcaatcttaatagcttgattttacgctatattagccgcagaaagtgaatttaaccattactacttgctattaggaaataatttaaaaggtctttcacctcccattctttatatatccacttccaattcagaaatgaaaagactttcatcttgagatacacgaatactagagtattaaatagtttatttaagcgactttaaacattcataacattcctgctgaaatcaagagttgcttctcttagtgagctgatgagaggctggactgggagctgggtaatctagagcagttgctggatggagcgggacatctgatggtagtttcgctccttccactgaacattggtgagcatgatctccagtgtctgttggatggcctgttccaatcccttcagcgactgacgggagttgttcacgaagtccttgaactcgttgaagtcgctcagcgtgatgacctgctcggaaagcggtgagagtaggcgggacatgtccttggtgagcggatggtagctaaaaaaaaaaaaaacagaaacccttagccgaggttctatccatcacagatgcgaaaacttacaacttgtagatgaagtcgacgttgtccatgaaatactttttggccagcaggaagcccacctcattgaaggccaccgcttggaaggcccacatcgagtcctgcttgcgaatggcctccttggggtcaaaggtcagctccagataacgctgcagcagccacacttccctcgaacaacccaaagcagtcagaatggtgcgcttctcagccgccacattcgacttcttgtaacgcgtccacaggaattcccaatccgaatcggatccgtgctttatggaggtgcagtacacagtgctacgaacgttgatcggaaccggattcttctcgtcgggattagcctccgctcgccagttgcggtagtaggccagggcctggggcacacaatcgcccacctggtactgacacgcccagttgaccaccattgtcttcagcagcacctgatcctgctgcggaatcgcgctgaatgtgtcgttgatgccattcaggtgctcgtagatcggcagaatcagcttcttcatgtagcgctgcattgaggatgaataaattcatttaaaaggactttaataaaagttcatatacccggcatttgtcaaattataaaatatctagtgctatctagtcagacttacgacaaagaacaactgtcggtgggttgcccatgacaagttaggtgtatagatgaagttaggtgtgagcaattttgaaaggattgtttcgaaatacaaatgagaatgagattatacggggagcacgtggtagaagagcattaggatactttaagagaccagaacccaccttgaagaactcgaaatcgggtgtctggcggacaatgcggcccacacgcttcagattctcgaaggccgacttccagggcaaatactcccgctcccgctgcagatactcgatcagtctcatggcgatctcgtagtcctgttcgccggtccaggccagatatagggcatcgtcgatcagctgagctcggttgatcacgtgaatgcgttcgaaatctccattggtcaaggtctcaataagaagcttccagttctgggcatcgtagttgaccttgtacagcgtcgagagctgcgtgttaaagatcacccactgatcgggtcctggcaggtcctgaatggtcttgggcaggctctcgccattcttgccgcactccatccaggccttgggtgccgtgttgttgaagtcctgcaccgcctgtgtggtgtaactcagtggcacccaccagcaaccgccgcgataagctcgggctacctgggtgttcaggagatagcgctcctggttgagcttggccgtcctggcagcgtagtctcgcgtcacgttgatcacagggtagctgtcagagaaaggatatttagtggtcattcttaacaagcttatcctgcaaggacctacccagtttgcagggtccatgagtccatgatgctcttgatgtcatagctcttgggcagagatcgatacttgtgagctgcctgggtgagcgactcccagagattgtcctgctcagcattcttgtaggagaacttctgcagataggcctgcagaccggagcggaaggactcctcgcccaggaacaagtgcatcatgcgcagcaccgtggagcccttctggtatgagatctgatcgaagctctccgagatctccgacaccatttggatgggtctcgagatgggatggctgctctccagggcgtctctgcggaaaatggtcagcagattggacagcgactcctgctccatggaacgccattccggattgatattctccacacccaaactggccacataggtggcgaatccctcgttcagccacaggtcggtccaccacttcatggtgaccaggttaccaaaccactggtgcgccaactcatgagccaccacgctggccactcgttgcttatccgccagcgaggagtgtgccgccgagtagagcagggcaatctccctgtaggtcaccagaccccagttctccatggcgccggcactgaaatcgggcactgcaatctgatcgatcttgggtagcgggaacttgatgccgaagaactgctcatagtattgcaacactttgggtccgaactgagcggcatagtcgcactgatcgatggcattgggtctggcccaagttcggaatagagcgctatttggcagggtggagggcttgtgcgagaaatcgttcacggagtaggcaaccaggtaggtggacatgggcaccgactcctggaactcgcaccatatgtagtcggcgagggtttcactggaagaataaagttaatgaagtctctgtggaaagttctgaatgttatgtgatgactaactgtggcttggtttccttctcgggcatgttgcttatagccgtatacttcttatgatatccaagggtaaccacgaaaggagccttgaaatcgggctcatcaaagcaggggaaggccaatcgagccgatgccggttcaaactgggtaaccgagatccatctgcaataggaaataacccatcaatacctggctctatgtcttcataaaagtctgcaaacgcacttggtaagattggccacgggatccttgtaggagctgcggtaatagccctcaagttgtcggttcaggtcggcggcgaagggcatgtacaactcgtaggtgttgccggccaaaagttcctggcaggtgttgaggatgtagaagtcatgggatggattcaccgccgtggaggacacgcagttctccttcttgccctctccgccgatctggcgcagggtgatctgggactcatcgatggtcagattcttggagtgcagcgttacgttcttggtgttttccagggcttcgatcaggatctttacggaaccggaaaaacgcaggtcctccggattctccagcagtgtcagaatgcggagatggtacttctgcgggcgcagcgatgtgggcaggcggtagtagttgtaggtggtctcgatggagtcggcggatgagtcggcggtggctaatcccaggccaagggccgccacgaacagcagaaaccacttcattaccaaaactgtggggaagagcggaaggcgaatcacttattagcggggcgctcaatcagagcaaactaaagcaattaaccaaatcactttgccaaatcataaacagtgggtatccactaacagaaaactcggataattctacttaaagtgtaatcaatttgaatacaatttattcaaaacttgggcttcgctttctctcgcccagttaatgataaacaattatttttttttgaacaaaacacaatggttgactgatgtccactgtataattcgcaccgcgctttttgctgcctatgcggtttcgctgatttacttcaaattaatgcaaattgttttatttattatgttaggatcgttatgccgggcacgtattaaggtctgggccaatgaaacccgattgaaactctcctcacaattggcattatgcgctggctacctgataaatgtacatactatatatatgtagttgattaactatggcccttgccaggggtaccaaatgaaatcggaatatttgtagttgatcagctgatcgagtaaagaataaatattctgccgttaactgcacatgggaactaagagaaactggtctgtttgttttaatatctatagttgtatatcataaatataagtttactttttaatactatgcctaaaaaacatctataaatcttggttgccttcaaagttagtttattatactcatcaactatattcccacgccttcacttcggcttttgaactttttgtacaacgtttaactattttgttaagtaagcacgcacactttaacacttgaataccttgacgtagtaactgggtatctattccatacggaatatcccaagggagctaagaaggaaacctgcaaaggttcttgtactgtactggattaaccagattgcaatccctgctgctggtttttatttttctggacttctttcagcttcactcttaattatgcaaaagttgttctcttggtttggctttctgggttctttggttgcatataaataaatgtaaatgcgggtcaatgaactttgcagattatcatatgataaccaaatgtagattgggtccgcatagagaaagtataatctaatatatgtttttgatcaggtaagtatcaataaatagttctgatcaataaaagttcattgaattcattgttttagtgttttaattaaatacaggaaatacaggaagaaaacgtgaaaataaattcccgaatcgaaagacaataaaactgcccgcttgaaattgaattaaatacaattgttaacttgttgtgatttctcaaaaaatttcaaacacgtgctgctgtgacattgacccatcaattgatcccttcgagttaactgggagtaagtacagcagcggtcaagaaactagcttccagaacattgaataatttcaaagtcaataaagcaagtaaaagtgctttgaagtgctaatacatgtgaaaggtattttaaaggtaattataatttaatacaatgagttcaaaaaacttcttaatatgcacattgataatttctttctaattgataatttctttctaattgataatttctttctaatttataatttcttcctggatttgcggacttttgtcttaacagaggacagttttaatataaaaaatattcactaagaagacgtaatggaattatttttgacaacacattatttatggtgcacagttcagcacttaaacttgttttttcttggctttgggtatatgtatgtacatatattcttttggtttgtgttcttaacacacttgtgtcactctattccttttttcggcacttgtttcgagtgcgtagttgtacttgtctcgtgatttcggggtcaaatctggcgttcttttcttttttttttttttttgcgattcaattccgttcaagctgcactctcgaggtgcttgacacacaaagattgttgggaccaaccgttgccagagcctcagtcacagccacagaaaagcgaaaaaaacacacgcaggagtgcgacctgttcgacggtcgacgcgaatctaaagtttactgagcacggcgcttttatcttatacgatagcccgtggttacaccgctcacccatacagatggaaaagccgaaagccgagaaatggagagccagtgaaacgtcgacggcttagagattgaaacgctgctttgcgtcggcgcagagaatcgcagattcagtatgctagttctatcgtagagcatgcaatgtagttgaacagccaagcaaaggaggtaaaaaaaacaataaaaaaggaagaaaaaaacagcacatgtgtgacccacacgaaacgcacagcgggcgattgcaatgaaataatggcagggcttacccggcgtatgcgcaattttgattcacgctgcacacatacgcagcgatgtcactacgtgtttttgaccctaattgcgctgattaacccatttctttctatttcgtatgccactgggcacttgagccactcgaccctagagttcacccagtcactcaacctgaaacaccccctacttttggaccaccccccgtggcggaagcgccgaagataaggggccacaaaaagtggcaaaaaacaaaccataataaaccaagtgcagacggacagacaaacgcagcatgcgggctcacaggaggggctttagcgggttaaccctttggggaaagcctcatatctaggtcaccgattaaagtatttatcaaattttgaatgttttatttatacatttacttgttggttcgaattaactttgattatttgaattgctaattataatttattatatttactacatgccagtcttcagagggttaatttggcatggaaaatggcatgtaactcgaaatattactgcggctagggccctgcctttggctaattgccacaaacctcgtttggctttcatccacactttttttgaggattaaagatttgatagttttaaggagaaattgaaatgggtgtgaaagggaattggaacataagctataaacgaaaataatctg

SEQ ID NO: 28538 - DNA, 3171 bp, DROSOPHILA
tcgaacaggtcgcactcctgcgtgtgtttttttcgcttttctgtggctgtgactgaggctctggcaacgattatactttctctatgcggacccaatctacatttggttatcatatgataatctgcaaagttcattgacccgcatttacatttatttatatgcaaccaaagaacccagaaagccaaaccaagagaacaacttttgcataattaagagtgaagctgaaagaagtccagaaaaataaaaaccagcagcagggattgcaatctggttaatccagtacagtacaagaacctttgcaggtttccttcttagctcccttgggatattccgtatggaatagatacccagttactacgtcaagttttggtaatgaagtggtttctgctgttcgtggcggcccttggcctgggattagccaccgccgactcatccgccgactccatcgagaccacctacaactactaccgcctgcccacatcgctgcgcccgcagaagtaccatctccgcattctgacactgctggagaatccggaggacctgcgtttttccggttccgtaaagatcctgatcgaagccctggaaaacaccaagaacgtaacgctgcactccaagaatctgaccatcgatgagtcccagatcaccctgcgccagatcggcggagagggcaagaaggagaactgcgtgtcctccacggcggtgaatccatcccatgacttctacatcctcaacacctgccaggaacttttggccggcaacacctacgagttgtacatgcccttcgccgccgacctgaaccgacaacttgagggctattaccgcagctcctacaaggatcccgtggccaatcttaccaaatggatctcggttacccagtttgaaccggcatcggctcgattggccttcccctgctttgatgagcccgatttcaaggctcctttcgtggttacccttggatatcataagaagtatacggctataagcaacatgcccgagaaggaaaccaagccacatgaaaccctcgccgactacatatggtgcgagttccaggagtcggtgcccatgtccacctacctggttgcctactccgtgaacgatttctcgcacaagccctccaccctgccaaatagcgctctattccgaacttgggccagacccaatgccatcgatcagtgcgactatgccgctcagttcggacccaaagtgttgcaatactatgagcagttcttcggcatcaagttcccgctacccaagatcgatcagattgcagtgcccgatttcagtgccggcgccatggagaactggggtctggtgacctacagggagattgccctgctctactcggcggcacactcctcgctggcggataagcaacgagtggccagcgtggtggctcatgagttggcgcaccagtggtttggtaacctggtcaccatgaagtggtggaccgacctgtggctgaacgagggattcgccacctatgtggccagtttgggtgtggagaatatcaatccggaatggcgttccatggagcaggagtcgctgtccaatctgctgaccattttccgcagagacgccctggagagcagccatcccatctcgagacccatccaaatggtgtcggagatctcggagagcttcgatcagatctcataccagaagggctccacggtgctgcgcatgatgcacttgttcctgggcgaggagtccttccgctccggtctgcaggcctatctgcagaagttctcctacaagaatgctgagcaggacaatctctgggagtcgctcacccaggcagctcacaagtatcgatctctgcccaagagctatgacatcaagagcatcatggactcatggaccctgcaaactggctaccctgtgatcaacgtgacgcgagactacgctgccaggacggccaagctcaaccaggagcgctatctcctgaacacccaggtagcccgagcttatcgcggcggttgctggtgggtgccactgagttacaccacacaggcggtgcaggacttcaacaacacggcacccaaggcctggatggagtgcggcaagaatggcgagagcctgcccaagaccattcaggacctgccaggacccgatcagtgggtgatctttaacacgcagctctcgacgctgtacaaggtcaactacgatgcccagaactggaagcttcttattgagaccttgaccaatggagatttcgaacgcattcacgtgatcaaccgagctcagctgatcgacgatgccctatatctggcctggaccggcgaacaggactacgagatcgccatgagactgatcgagtatctgcagcgggagcgggagtatttgccctggaagtcggccttcgagaatctgaagcgtgtgggccgcattgtccgccagacacccgatttcgagttcttcaagcgctacatgaagaagctgattctgccgatctacgagcacctgaatggcatcaacgacacattcagcgcgattccgcagcaggatcaggtgctgctgaagacaatggtggtcaactgggcgtgtcagtaccaggtgggcgattgtgtgccccaggccctggcctactaccgcaactggcgagcggaggctaatcccgacgagaagaatccggttccgatcaacgttcgtagcactgtgtactgcacctccataaagcacggatccgattcggattgggaattcctgtggacgcgttacaagaagtcgaatgtggcggctgagaagcgcaccattctgactgctttgggttgttcgagggaagtgtggctgctgcagcgttatctggagctgacctttgaccccaaggaggccattcgcaagcaggactcgatgtgggccttccaagcggtggccttcaatgaggtgggcttcctgctggccaaaaagtatttcatggacaacgtcgacttcatctacaagttctaccatccgctcaccaaggacatgtcccgcctactctcaccgctttccgagcaggtcatcacgctgagcgacttcaacgagttcaaggacttcgtgaacaactcccgtcagtcgctgaagggattggaacaggccatccaacagacactggagatcatgctcaccaatgttcagtggaaggagcgaaactaccatcagatgtcccgctccatccagcaactgctctag

SEQ ID NO: 28539 - protein, 932 aa, DROSOPHILA; identical to SEQ ID NO: 26022

SEQ ID NO: 28540 - DNA, 2418 bp, DROSOPHILA
tccattttaatctcctcagaggagggcgagaccgaatgcaatgacggcaagctcctaagcgaattaaacattgtggatggtgtgatcctcaagtgcgacgacttcttccagaactacgagttgagtattatcatttcccacttcgatgcggagcgcgatgaaaacttgttcgaagtcgtagcagatgcctcacagctgaagccaaaggatgaggatcagaaggaggccgtgaaagacaaggaggatgaaccgaaatcggctaagaagcgttctaccaacggggaaggagactcaaaggacgatggaccctccacttcgaagcgcagccggcccaacgaagtggttgaggaagatgacgatgactgtctggtaatcgaggaagacgaagaccaagcagatgttgttgtcgtggccacagacaagctctctgtgcagagtcccccaaaatcgggctccaagcgcaagccatgtgaagtaatcgaggatgaggatatcaccgagattttggagtcgtctgacgacgaacccgcgggaccaaccaagtgcaaacgttcccgcctggacgattcgaaccccgtggcagtcatcagtatcgattaataaaaaaaagaagtttttattcgaataagttctcaactgcgcactaaattatgctcttgattccctgtaatttcattctgatttaaaataaaaacacatttttgtggatgataaaatttttaaatttttgtgctttgaacgggtttggttttgctctactcgattaaattcaaataatccagtgcgagaaatgtaattttattaaataaaagaaatataaaataacatttaaaattagtcaaatttttaattcgataactttttaacgccaaccagtgctgcgaagcactggaagtcattgtgcctgttatcggtttctgaccagttcaatccaaaacagaaaaaggtgagctgttctacaaattttcattgtaaatctcaatgaaaatgcaaatttcagatgtccctggctagtagaatactgcaacaaggttcccgcttgtggaatggtctcagtgccgcgcgtggtttccaccttctcacccggccggcggctcctgcaattgtatcaattcaaagctcgcaacttgtggccgccacaactggaatctgtcagacgtcgggtctgctgacgcctggctccactttggtccagcaggtggcgggattcaaggtcaagggacgcctgaagcgacgctgcaaggactgctacatcgtggtgcgccaggagcgcggttatgtcatctgccccacgcatccacgccacaagcagatgtcgatgaagaagcgcgactacaagtcgtggatcctgacgcacgccacccaatccaaggagcgcggctattagacctaattaggcattaataaaagcatttctttaaatatgttcataaataaataaaagaaaaataatccaagtagtccgtgatacgtttcctaacactgtatcagctgattgtttgtttatatcgcagtcgtttcttgcctgttttgctttttactgtatccgaccggagttcagtacacctggccgaaaaagatgacgacgcacttcagcaatgtactgcggcaggcattcaaaacgttcgaccgggcaaatcacgccagcttcaatgcgaatttgcagcatctgcgtcaattgacggatgagctgacctaccgggatctgcacctccgcgaggagctctttcgcaacgtgggaagccatcgggcaccctgcagctacatgcatatattcgaggatgatcgcttctccatgagcctgtttatagtgcgcggagcgagcactattcccttgcacgatcaccccatgatgttcggtctgctgcgctgcatctggggtcagctaatggtggacagcttttcgcaccagttaggcccggatgagccgctcacctatgacccccatcaaacagtggtgaaggtgaatgtcgaggaacccaaattggtcacgccggctagtccgtgtgccacattgactcctagaaagagaaattaccaccagattgcccaaattggtagcggcgtagccgctttcttcgacattcttagtccgccatacgatgcggatatgccaacatatggaccgcgacagtgtcgcttctatcgcgccacggcagagggcagccaggtgcagctgcactgcatcccatcaccggatacatactattgcgatgttgtggacacgcccgaatcggtgatgcaggccgcttttcagtgcgccgacgaggtctatgccgataatgccagcgggacacagtgagtcgttatctcgcttcccagcagctaacaccctcctatttatttgcccataatcaaccgttggctgatcgtatcagccaagtatcttctgtgttatttaaataaaattgcctcctt

SEQ ID NO: 28541 - DNA, 418 bp, DROSOPHILA
atgtccctggctagtagaatactgcaacaaggttcccgcttgtggaatggtctcagtgccgcgcgtggtttccaccttctcacccggccggcggctcctgcaattgtatcaattcaaagctcgcaacttgtggccgccacaactggaatctgtcagacgtcgggtctgctgacgcctggctccactttggtccagcaggtggcgggattcaaggtcaagggacgcctgaagcgacgctgcaaggactgctacatcgtggtgcgccaggagcgcggttatgtcatctgccccacgcatccacgccacaagcagatgtcgatgaagaagcgcgactacaagtcgtggatcctgacgcacgccacccaatccaaggagcgcggctattagacctaattaggcattaataaaagcatttctt

SEQ ID NO: 28542 - protein, 128 aa, DROSOPHILA
MSLASRILQQGSRLWNGLSAARGFHLLTRPAAPAIVSIQSSQLVAATTGICQTSGLLTPGSTLVQQVAGFKVKGRLKRRCKDCYIVVRQERGYVICPTHPRHKQMSMKKRDYKSWILTHATQSKERGY

SEQ ID NO: 28543 - DNA, 5229 bp, DROSOPHILA
caaagctgcaaaagaagatgaaggacacgatgaacgagtccagttcgaactcgggaagcggcaccaccagtgccagcggttcttcaaatagtacgcgacgaagtgtgcgatccgttagcacggttagtcgaaaaacggataaggacttgaccaacatccggcgagcaagtggagcagttgtttcgacatcgaccgtacgggtgcatcgggaaccaacagcaaccaccagcgctgttagcaccgtgctcgttgatgacgactgtgaggtgataaccatacgttccattaaatcaagcgatagtacaaaaagttctacctcatcatcctccggtagcggcagcaacagtcgcaaggtgctaaccagcgaggtgttcactaaaaccttcggccccgacaaaccgctcgaggtggtctaccgacagccagagtttgatgtagaacaccacacgatcatgtctgtgcgtccaccctccgcgacaagcagcgatcagcagaggtgcattaacgagttcgatgtcagtttcatcgacaccaccgactccagtctttcggactccgttgccttacccatgttaggctccggtgatcctgatcgtctgctggccgcaagtcccggctcgcccaagcccacccgcagtcccctggcccttattgaggagaccctccgtcgccagcaacaacatcaccatcatcagcaacaccaccaccacagtagcggtgctattgctgctgcccttgatccttctctgtcgatgccagtggcttttggagagagtcacctggaggcggaggtagaggtggagaagggcagcatttccaaaggtaactatggtacttatattcaagatacttgttaggtcgagatcacaaagatacttaagataagcttagctacgatacccatcatatctagggcttagttatcaaatgcaacttttctaattgatatgcctatgtatgaaatgctttcacttaacccatttttaacttattctccacaaatagcaaacataaaaaattaaagccgtcaaactcaagccataatacacaatagcaaagacccaccaacttaagcctaacataatgtccaagaaactcccaactatatccgtaactgccgacaagcgatccacccattccgacttatcctcctcatcgtcatcccacgacacagatagcaatgacatggactatgggcgcaatggcggcgggggcgttaccgatgtcgaagattttgacagtcaattggagatactaaaaccaagctcccgtcgaagttcatgtaactcctccctgaagcctaaagcccatcccaaagcgaatacgggagacaacgatgtgactgatgtggaggactacgacacagaatcggaaaatgatgagaagagcacagcatacccagaactaaagctgtcgctaagggagtttctccaacagggactccaaaaccaagaagccgtcgataatgatgccaaggagagctgtgagataaaagccggagatttcgtgcaagcacaaaacctgaatggtatggcagactatctgactgattgcgaagactacgacaccgattccgaagttggatttggttgcgagaaatcagtatgtgttgacctggatcaagctgtgggagatcaggggcgagtaaatatagcagatggcgagaagaaccaagacgactccgatcaatatgaagatgtttctgtgattagtgatataagcgatttggcatcagccatgtccgattgcacaggtattggggtgcgtggcatgtccgaggatgaagttttggaggtatccgatagtggtcacgaagaggtttgcaacattgcctgttcagaatccgagtctgagtctgagggcgcagctgctctgagtcagagtgcaagtgagactagttttccacccgttgatgtggcattcgttagtgccagcggacagccacgtcgaaactcgaagtgcagtatacccacgcctggacagaaaaatttccttcagctggcttcaaaaaacgaagaggttttaactgatgttgagggtattgacgactctgccgcggaagatagctttgacaacgaggaggaggacgaacaacccataccacgtgccataatccttgcgtctggcgatgatgggacctgccttactgatatcgaggacatgttctgtgaagatagttcgctatccacctgtgctgaaccggaaattcgttcaatctgccacgaggtcttaccactgccccatcgcgaagtagtagaactgaaggaggacaagtacggggacacaataaccaatgtaatgcccatggacacgaactacgagtttggcatttacaaccatctgaaggatatgattcacaccgattccgaggactattcgtgtgccgatgagtggagccttcaacattcagttgctgaggatgctgcaatgggaggaccgagtctaattgaaaacgaagtaattgtatccaatgaactattgaaacagcagcaaaacaagcgcctggaagtacagaccaatgcagagtccgtaacagatgttgaggaaatcttcgtggccggaataaatcgccgcaagaagttgaagacccgaactctaagcaagggcaagaataaactactggacgccgtaaaggtgaaagaggatggagtcacagatgtcgaggatatggacctaagtgaatgcggtttacctatgggcgtgaagcgcgtggagcagctgaaacaacaggcaaagggatcaaatgcagacaaatcctcggaatcagaggatgtatccaccgatgatgtctccgacatctcagatgtctccgacgtaccaccgatatcgacaggtgacagaactagcggcaagacaaagccacaaccacatcacttccgtctgcttaaggatgatatgataaatcaagaacataccgatgttgaggacgttcaattaccctcggatgcggaggatgctctggaaccgccggccgttccagtggcaaacagcaacagtaaggagctgaatgatatgttgaacgagagctatacggttgtgcacgagaagagtggtcgcagtttcaacagcgaggccgagaagctacatgctaaaggcgtgatccgagatgcccataccgacgttgagtatgttgagtctgatgagtcagccgccaggggaggcaactagcgtgcatcccgtgtcctcagacaatccgactcgagtcagtcccaagctgttgccaaaatatatctcaacaatagttaataagtgttcatagatacgaaaacccaacacatacactctcaagcattttgtaagtaaagccaacaattaccaaacattttcgttaaagttcttaccacaataaaagcagcaaaaagccttaaatctactcgcatcgctcccatacgactaacctctgtacccgtgccatactaacaaatttctagcatcacctatgcgtcgtcgtactaacactcactctctattgtaattccccaattgtacttgatgctaacaaaagtgatatttcaaattcgtttcgtttgttcttgtttcgattgtctgtaaatcattcattatcatttcgtttgtagattaatctaatgtagttctaggtaacttttgtgtttgttcattgtataactggagctcttctaacattggatttatttattgcagaaacccttcacgaaagaaaagtagaactatccaatctggataccgaaaagatctcacatgaaattggtaagtttaagttcacgattcttaacttttgcttgtcataattattgtaatacatagtgcttaattggtatgccaaattgatcagttgttcgtatttatttcctaaatgcaattaaagctcattgacaaaataatttcaacggaattatgtttgatataaacttatgactcagtgcctcagatctcgctcacatcaccaatcaacctcaccgccatcagctatcacacatatgtaatcctgcacattctgctcgcttctcatgctctacatgatttccaagcttgaacttactttctaacgcgctctcactttctatttcaatctgtccaatttctacctaccattgaactgtgcaattgtcttccaggtgatgttaaagttggtggtggtgatgatgatagtgatggcgatagtggagattttgtggcacgcattcgcgaggaagccaatattctggtggatcgcgtacttgaagaaagtgtcgagatcattgagagtcaaggccatcaggccaatggccacgagatcgctaaactggactacaactcagaaagtgagaattatgccatcacatgcgatgatatcggcggcgtcgatgttatcaaatcgcccaccattgaatccatgtcgggcaagtcgtttgacgacaacatgagcttcaccgacgagcatatacatttacccttgcatgcccagaacacgagcaccaccatgacaacgacaattaccactcagttccaacagcagcagtcccagtctgctgtctcaagtacatcggcggcaaaaggtaacataccatatagatatgaggtagtcccaacgctagcctagaacttaggatagtagcttgaggcgaatttagaacgcatagtgttgattagtccgttggctataaccaatctcctgaattgtttgctttttgctcccattccgcctcccatgtgacatgtaccatatagatccggttgcagttctcgaatccgtacccgtatcatttccagtagcgagtagtcgaaatcagactgaagacgagagtgaaacgcgagccaggcgcattgatcataagatcgagaaactatccacggacatggacgatgtaagcgccaggttcgatgaggcgtttgagatgtcggtgcccgaggacgagatcagcgccctacagggtgacttttccaaacttagctgggacgaaagcgtttcgcccacgaccaacaccatggccgatatggcacaaaaccaaataactcccgataacgatattcaagatctcatcgcaggtacccctaagcaaaagcgaagcgcctagtaataagctatgatttcactttttcgttgcctattttaatgccgttgacagagcaaaaagactcactctagatgtatgtgctgtattctttttgattatttgttgtcctagcgaaatggcagatccaaaatcgcggccaatgattacttttcgattgttcaagttgagctctaattgcatttaaaaattttta

SEQ ID NO: 28544 - DNA, 2493 bp, DROSOPHILA
aatagcaaacataaaaaattaaagccgtcaaactcaagccataatacacaatagcaaagacccaccaacttaagcctaacataatgtccaagaaactcccaactatatccgtaactgccgacaagcgatccacccattccgacttatcctcctcatcgtcatcccacgacacagatagcaatgacatggactatgggcgcaatggcggcgggggcgttaccgatgtcgaagattttgacagtcaattggagatactaaaaccaagctcccgtcgaagttcatgtaactcctccctgaagcctaaagcccatcccaaagcgaatacgggagacaacgatgtgactgatgtggaggactacgacacagaatcggaaaatgatgagaagagcacagcatacccagaactaaagctgtcgctaagggagtttctccaacagggactccaaaaccaagaagccgtcgataatgatgccaaggagagctgtgagataaaagccggagatttcgtgcaagcacaaaacctgaatggtatggcagactatctgactgattgcgaagactacgacaccgattccgaagttggatttggttgcgagaaatcagtatgtgttgacctggatcaagctgtgggagatcaggggcgagtaaatatagcagatggcgagaagaaccaagacgactccgatcaatatgaagatgtttctgtgattagtgatataagcgatttggcatcagccatgtccgattgcacaggtattggggtgcgtggcatgtccgaggatgaagttttggaggtatccgatagtggtcacgaagaggtttgcaacattgcctgttcagaatccgagtctgagtctgagggcgcagctgctctgagtcagagtgcaagtgagactagttttccacccgttgatgtggcattcgttagtgccagcggacagccacgtcgaaactcgaagtgcagtatacccacgcctggacagaaaaatttccttcagctggcttcaaaaaacgaagaggttttaactgatgttgagggtattgacgactctgccgcggaagatagctttgacaacgaggaggaggacgaacaacccataccacgtgccataatccttgcgtctggcgatgatgggacctgccttactgatatcgaggacatgttctgtgaagatagttcgctatccacctgtgctgaaccggaaattcgttcaatctgccacgaggtcttaccactgccccatcgcgaagtagtagaactgaaggaggacaagtacggggacacaataaccaatgtaatgcccatggacacgaactacgagtttggcatttacaaccatctgaaggatatgattcacaccgattccgaggactattcgtgtgccgatgagtggagccttcaacattcagttgctgaggatgctgcaatgggaggaccgagtctaattgaaaacgaagtaattgtatccaatgaactattgaaacagcagcaaaacaagcgcctggaagtacagaccaatgcagagtccgtaacagatgttgaggaaatcttcgtggccggaataaatcgccgcaagaagttgaagacccgaactctaagcaagggcaagaataaactactggacgccgtaaaggtgaaagaggatggagtcacagatgtcgaggatatggacctaagtgaatgcggtttacctatgggcgtgaagcgcgtggagcagctgaaacaacaggcaaagggatcaaatgcagacaaatcctcggaatcagaggatgtatccaccgatgatgtctccgacatctcagatgtctccgacgtaccaccgatatcgacaggtgacagaactagcggcaagacaaagccacaaccacatcacttccgtctgcttaaggatgatatgataaatcaagaacataccgatgttgaggacgttcaattaccctcggatgcggaggatgctctggaaccgccggccgttccagtggcaaacagcaacagtaaggagctgaatgatatgttgaacgagagctatacggttgtgcacgagaagagtggtcgcagtttcaacagcgaggccgagaagctacatgctaaaggcgtgatccgagatgcccataccgacgttgagtatgttgagtctgatgagtcagccgccaggggaggcaactagcgtgcatcccgtgtcctcagacaatccgactcgagtcagtcccaagctgttgccaaaatatatctcaacaatagttaataagtgttcatagatacgaaaacccaacacatacactctcaagcattttaaacccttcacgaaagaaaagtagaactatccaatctggataccgaaaagatctcacatgaaattggtgatgttaaagttggtggtggtgatgatgatagtgatggcgatagtggagattttgtggcacgcattcgcgaggaagccaatattctggtggatcgcgtacttgaagaaagtgtcgagatcattgagagtc

SEQ ID NO: 28545 - protein, 694 aa, DROSOPHILA
MSKKLPTISVTADKRSTHSDLSSSSSSHDTDSNDMDYGRNGGGGVTDVEDFDSQLEILKPSSRRSSCNSSLKPKAHPKANTGDNDVTDVEDYDTESENDEKSTAYPELKLSLREFLQQGLQNQEAVDNDAKESCEIKAGDFVQAQNLNGMADYLTDCEDYDTDSEVGFGCEKSVCVDLDQAVGDQGRVNIADGEKNQDDSDQYEDVSVISDISDLASAMSDCTGIGVRGMSEDEVLEVSDSGHEEVCNIACSESESESEGAAALSQSASETSFPPVDVAFVSASGQPRRNSKCSIPTPGQKNFLQLASKNEEVLTDVEGIDDSAAEDSFDNEEEDEQPIPRAIILASGDDGTCLTDIEDMFCEDSSLSTCAEPEIRSICHEVLPLPHREVVELKEDKYGDTITNVMPMDTNYEFGIYNHLKDMIHTDSEDYSCADEWSLQHSVAEDAAMGGPSLIENEVIVSNELLKQQQNKRLEVQTNAESVTDVEEIFVAGINRRKKLKTRTLSKGKNKLLDAVKVKEDGVTDVEDMDLSECGLPMGVKRVEQLKQQAKGSNADKSSESEDVSTDDVSDISDVSDVPPISTGDRTSGKTKPQPHHFRLLKDDMINQEHTDVEDVQLPSDAEDALEPPAVPVANSNSKELNDMLNESYTVVHEKSGRSFNSEAEKLHAKGVIRDAHTDVEYVESDESAARGGN

SEQ ID NO: 28546 - DNA, 42979 bp, DROSOPHILA
tcaattttgttcgtctcgattcgcgcagggcaaataaattgtatgtgattcttacatttcgtttacgttgtcttgaaacacagcagtttatatatttacatatctaacctactattaactttactaactacgacgtctttatgtttccgtttctaaaatcttaatgaaatagttggtgcgtttttatttacaaattgatttgttctagttgttctcatagtgtatggtattttaaagcttatgaagagttagtagttttctttggatgaattcagattcattgattgatttgaccacggatattcaggaagctgaattatccgcgtaccaaattaactatcgttgtaaatatgagatggtaagtagatgtatattgatttattttggtgataccggatagtaatcaaaagaaactaataatttgatatccaaaatcttatatttgccaatttttctggcaattttgttgtgtgattgtgcgcctacaattttctcagttctttgaaccaatgacacacaatgataagcaaactaaaatgtggggtaaataattgccaaactcataggggaatgatagtcaataaataattcatatattttgctaaaactgcacacacaatatttgccttaggcgtaaaacaaatctctcacttgcaataaataactaaaaattaaacataaaataatggtataagctctaatacagcaggcgtccggtaaaccttgttaatttgtgtgaatcgtccaactgtggcttatgctaattaatcgtataataaacaactaaaacattttagttaacgtaaagaaaaacctaaagttgatttcacacaacatgtgatgcgtccacaaaatcatttcttactttgactacaacatttcgatcacctgaacttctttagctaaaaggcggacttttattcgttttctagtttgagggagctaaaattagtttgagtttccgttttccctgtctcttcactgattttctacgaagtccttaagtgtatttccgctccgccttttcctcagttaaggttggtggcgtgttttcctgggtccgaaccaaatgcgatggcaattgcatgttgagcgggtcgttgatccttctgagattgtactccaactccgccgactttcgcttcagttcgttgtagtgttctacatcgaactgaacctttttggcgttcctataaagggaaagtgagaattcgcgattcttcacatcctccatcatatattcctgaaaaggttgaagatattcaatctaaggttgccaatctaaattcgcaaaataaacataccctcttagtgacacaatagtaggcatacattgccattgtcgtcccgtaagtaacaaaatatgtaacgggttccataatatcccaagagtattcccaccaagtcagtcgtgccaaaatgccaaattgcaccgacattaggcccaaacccatccaagtcataaagttagtgcgacgagcggcctttttgctgagttccagttttttctgaaagacgaattcgattaagaacgtaaggcctttcaattttaaatgctaacctcttccagtggttctagttcatagcgtagggtctccagttctttggccaattgattgctcttctccagctgatattctccgacgttgaatgcctcgtagagctgaatttatttttagatattagtaaaggtactatgaaatttattaagttatacttcacctgagcaataaccttacgaacatcgcccactttgtccatggactccaatgtgactttgtcacgtttgggaggattcacatccaatgtgcgattgttgatttgtatgctacaatttagtaggattagtgtaattattcatttatagaaatatacgaactattcacctaaacgagtcatccagcaagctttcgatggtgcaggacgacgcgattcgcacaccatgcttgttgatcaccgcagctcgatcgatgccccgatcctcagccctgagcatggctaacagatcaccaacgttgtgggagatgggtttcagggcaaactggcagagttcattgcgactgggaagtcgtacagtcatgtgtggcatgccattcacgtattccacatagatgtcttctaaaaataagtaaaaattttttgttatttcaaacattatttaatgcagatatatttttttcctaaatacattgagagaacaaagccttggggaatcagcagacattcctaattgtacattttccgatggagttctaccgactcccttcacttccccaaacagtttctccagtcggatgtgtgccacactgtgatgcagttttgctcagttttaattaaccaaaagccactcaaggttgttcgccagcctggctcaattcaaatgcagttaggcgttcgaattgcttgctgaggcgtgactcctggcacgcctcttttcgaagaaggtgcaacaaagcccagccagcaggcagtttaggcttggaaatagatgacatagtggattttgacaaacatttcaattagcggcatataatcgcattccagctgcagcttccccctgaagatgatactcagtttcgggcagtcaagcggccaacgaaaagttttcactttgtcgcatgtgggatttatgcagccatgaagtagcacaaacatatatttatctgtatcgctgccactcatgcaagcagccagcgatgcaaccacacgccaatgcaaccaccaacacaccaccaccgacatctaatgaagattttcttctcatagtttacacggagagaaattactaggaatgtaggttagcaaatatataatatattataagagataaaaggtatctattaccacgatccttaagtaagtaaacattaatagagggaatcacatttcttgctacagtttctcactgtgtattagtttaaatcgcctttaccaactgggcttgattgtgagtgttagctgggtctgttcaacccattagcaattgtagtcggcgccaaatgtgggtaagtagtgttgttactgttgctgttgcagcttggctaaccgtcgacgtcgatgaagaagttggcgctcattgctcgctggcttctacgatgattattttcatggactttgattttttgggattttaaacattttatgttttctttttctttgccgctgctgctgctgctgcttctgcttcttcgcctactccgtaggcttctgcttcggcttttattgatagtttcagatttttgttttaattttcagttaactttcagattttcgcgctagcagacgtgtgcgtctctatctctcgacatttgagtggcggataatttgtgtgtacgtggcattcaagacagctataaatgcaaacctatttaatatcattactctcagtgaagcgagaaactgtgcaaatacacatcgagtgtggtggtaaaaattggatttattggactgttatcgtgcggaaagagcgtgcgtgaaagagacattcatcgtgtgataaatgaagaggccatatagcattcgaaaaagtttaatttacaagctatgacagccgtcagcaaaatgtaataaagtttgtgctgctgtcacagattttgctggccgacaaagaaggactaataatataaaggaaaactatgaactacctgccatacttgtgtatatcattttatgtagtgtggtcacaagttctgagcaaaacacgaaccagaaccgcagacagcaaacgtgctaacattgataatgccatgttagatgttcgcccacggcttcggtttgataggccgcaactttgcttcatcaaaacttaatagccagtttccgcatccctgccaaaacagggctaacaagtgtcaggcaactcgcacaaaaacccgaccacacagtgtgtgtacagtgtacagtgcatgagtggaaacacgtggctggcaaaccaaatcaggccagagtttagacctgaacggggcgaccgtttccgttcggttcaggaaatggttgcaagcggcaatcagcccacaaatttataacagtcgcctcctttttgtgtggtagagttttccatatacacggggggcaaattcatgaaacatcacatcaatcaaattcttcatcaaggacagtaaattaagcagtaagcagtttctgctaaataattctaaaacgtgataatatccctattttaacggagttcttttccttagtttattgaaggattttacatggaaatatttttcaatacttaatttttttggttacgatattggtgtaacagtggaggtacaagacagaaaacgaaatttaaatcattctatcacatttaattaaaaatatcatgcaattaactattatttaaattttgtgaacccaggggaatggattggtggagtttttagaattaaacaccagcacttaagtttcgttttctcgataaggtgacttacttcacctcgtggcttaaattatatttttctagttcacgacgcaatctcgaaaaatgtcctgtaactttcaggctgccgtgatttccatatgtgcgaggattactgcgaagcaaataactgagccaagtgttggtgcgtgtgtctgtgcatgagcattgcatgattacatggcaatgtccttcgccacccacacgcccaaacagaaatgccggcaaaaatcgtcctttgtgcattattaaaaaattccggcaaccgccgcctcgtgtttgcatattttttgtgatttaatttttttgtcgcacattttcaacaagatttgcgtgccaggtttttcccccttagccaacctgtttgtgtgtgctcctgcatttaaatcaaattaaaagaaccgcaccccagtacggttgacaacattaaataactgcatgcataaaatattcgccaaaaacatacgcttaaattgaacgataaaaaaagtgaaaaatcacgccaaactaaaaggacacaggaagcgcaggaccgagcgattagcgggtaagttggggcgggtttagagctggatggcaatgacaaagtgaagaccacaaggttttccgtgctccaggcgacatttccgttttgtattctttttttttaacatttttctgttttgctgattacactagtttaccaaagcgaacatttcataaattctgagcgcatcaaattaggtggtcttaattcaattttgattaatagtgcagtttttgggttcaatactttcagagtaaaaacaactttatctttttatgctcagtatgttgaactacaccatttaaatggcaatttactggcagaacgagtgtaaactagtgtttggggatttgaattggtcccagttctacctaccattttgttgaacagtgtttttgggttcagaggtcgtgttggaattatttacgagccccccaatgaacacctccggcgacaaattggaacctgttgttcttggcaacgttgtggcactgcaggtagtagatcttgttagccgttcaactaggacttgttttcggcccgctgcactcagtccgagggcttttagccgcgtcctcagctcggccaaagtgagtcgcgtgatatctgggatgatggcaatgattatgtgtgggcatgggcagaggcgcaaaaagtaggtgatgaaataaaaaaggagatacgaaaaaagaaattaaacagaattttccatcagtgggctgggcttggcctaggtgccaaaatgacaggtccttccctttcattttttttattttttggtaatgaaccaaaagcaagcagcacaaaaaggtagcccaaggagtctcgcccacaaaaagcgcagtaaaaatgatggcacgtgcagttaacgccgcaaaaatgcacataaaaaagcgagttgaaaatgtgtttaacaaaataaaaaatacagcagaaaaaaaaagcacacgttgtgaatgacgaaaaatgttgatggagaggcattcgctggagagaaaagctgggaaaaataaaaaataaagaagcctctggcttgtcacaacatttcccttatcggacccggaaatgacacgcacacacagaaatgaggggcggtagaatgggtgtgggtgtggcagggggcgtggccatcaaaagaaatgcatgcacattaaatttaatgccattgtcactcttcaaattaacacaatgaacgagaggagaggcttcggtttgattgcctcgatgagaatgattgagataagatgctattcgaagtgaaagtagccacatcaaagttttaaattatttattaagcaaatacttaacgttgcgtcaaaatcggatagatacttaaaactgcataatttacgcagtattatatttatttactatcgatttttctgcataatatttattgcttcaagcgactaatctaatttccccgcctctactggttatcctgtcgcctgattaatgtggccacagttaaacttaatacagcgcccatctaaatgaataaaatcccttcatactgcttcacattatttaaattaagcaagagcgaatttttcaaagggggaaaacaaaacatgatataaaatgggaaaactttgaaagagggaaaatatgcgtaagccgagggcaaatacagatacaaaaccccaatgccaacaacattcgggcattcataaagcatcaatgcgcctttaagctcataaaatatttatgaaattgcaggacagcagaaaatcttttgaaatatccaattttatttggccctttattatggcggtttgtttgtttacttccagtgccagccgtaaaatcccagattttccgaaccaaattatttgcttgaaaatcgatttgttctcattttcagcaaacgacaatataacttaggttatatgccgctgagcttgaagacaactgaatttggtagggatactttaaagtagtaaaggcttaattaatgaaaaaagaacgcgaaaagcgctgagagttatgcggaaaattcaacaagcttggctgattctgtgggtgctgttttgtgtgttttagcatacaaaaaatgaaagagaggagggtaccgcagaaaccgcaacctcaaccgctttgcgggcattgtgtttttgcattgtgcttaggccttttaatatttcactgcatttgctcctattttattcaccttgatcccattctgcgccataagccaaaggcaactgcggagtttgcacaataatcccaaactgcgggccaagacaaacagcgtgtaacaaagtgctgggatagaatgcaggcgcaacttcaatgcaacttggtcgagtgtctggcgcacaagagtaggcaatgcttttgcccatttattttttggagaggcacattcgcagtgctcaaggacacaatcggtggatggcacatgggatatatttatggccatgaacacattgccgtttatagtccacggcagtgggaatctgtttttagaggctacattaaaaattgaaatgatctataagtgcaaggagggcctaccggggccacagaatatggtatgattttcactgtgagggtaatgcatttgtcgtgtttaagatacaactttaatattctgtctataaaatgtacaaacaaggctgcagagaacatttattagatatactgggtataatttggcttttagtagtgtttcaatttgatgataatgtttgccacacatttttcattcaacaaacgttcatattttgtagataaatcaaatgctttaagtttatatttgaatatttgtattctattttacttttagatataggaaagtatcactatcgtcccagttttcccgataaactgcaggtatcttcgcatatctttgatatatcttcgtatatcaaatttatgtcattgccagttcagcagatccctctttctctctgtcattgaaaatcgattttacgtgcactttatagttcacttctttttaaaacaatgtactgtgtaaaatctccgctttgaggcgccgcctttggccccgaacaaactgactgcccaactctgctcctcaccttggactgtggacgcagcgagcggaaattgtgtgcattttccaactacactgattgcccctgtatgtacggtatgtaattcccggaccggtgggaaaacaagacaagaaccccaagaacgcttcgttgaactctttaagcacttgacgtggcgacaacgaggacattgaggccgtcgagtggcgacattttgagtgggccaagtgacgtgtggagcctgaaggatgcttgcttcttctcattcgcccacttggtcgctcattaaatagataacgcctctgccatatgttgctccctgtgcttcgcgtgtctgtgtatatttagccgccttgagcaagtttatttaattgcacaaactttacgcaaattaaatgacaagccgcagttttattatcttccacttgcaggccgcctgccaccgacacgaaaatattaactacacgagctccccgtggaaggtcgaccttcgagtccggcacattttgcacgtcaaaataggctccggacagagtcacagcctctgctatggcggcacgatgggcaacggatattttcgaacgtcacaaacgtcgtcgtcgtcacgccagcgggaaaagcggtaagtgacaaccagctacagcataaccacactcggaaaaataacacatagacttcaggccaccgtaattcttgattcatgaaccaaattgtaggttaatgtaagtgacgacatcgaattcaataaggggcttgtgtaaatcgtgacatttgccactttgcctttaagacaaatgacgaaaccgaacccacatttctttgccgagtgtaacaaggattctgttctgggtcaagtactccggagaagggggagctaataaaatatccttgcagacgtatgtgacgggaagggtttcctggtaagccataaaagttgctggcgtgtgagtaaccgccgacccagttagttcccttctctaatcagcctcaactggacatcgatatttatgtactgcggtttagggaaggagacacattttgtggatgtaacaaatgttagcctaagacagaagggttcaaaagtcgtccatttaagcttgggctgactcggcaactttagtgtttaataaagtaaggatttgctagcataagctgtaagggcaaatataaattttgagcttgaaaagtgacacttgaagggttgacttaattcaaaataaagttaccaagcgacaagccgaaatgtttaaaaaaacataagaattgtaaataataaatgtttttagacgagaaatgagaaataacagtgaaaaacgaagtcaaataaattttcaggtgtttctgctaaagtgaaggaaaaaaaaaatttatcaaaagttgtgcaagggtgagcacacccgcaaaaaggtcagaaaaatcatgagaaaactttctggctgagaaaaaagtgaaaatggaaaaaataatttgtgatgattttcacaaacataattagtgaacttctctttggcggtgacttttaaatcgatttgatttgcgaatttaattgacggtgcggaaaaaacaaatagctttagatgcccgccagaaatggaacactttgccaattaattaaatggcagaaaagccaaattgaggccacaactgaggaggacatggccaaaaagaacggaatagatggacggggcgtggcgtctagtatgcactcattcagtatgagcccttatgggggcgggctttgcccacgagggcgtggcagctgctccgtgctgacagctgttggcgctactcaaattccaatctgccgccatcaaagcggcgaagtgcataatctccaaaaactgacgagggttgcgcgaaagcaattaaaatggctttctacgtttctccttcgatgtgttggtggctttattgtgttccagtttataatgataagcattctcaacaaagtattttcatttaattcatcacaactcgattttctatagttgatgtctaaactaagaactcatgggaaattcaaactttttcatattaaaagcactatattaatgagcagttatagctgctgaaaacatttggaattcattttagtttgcttgtttcaaccgcaagtaaaaaacgtattaattgagtaaaatttaaattgaaactacaaatctattctgtatatctaagcattaaaaactaaattcctaaattcagatatgcatttatagtatattttaaagtcagtccagattgcatagtgccttttcgagctcttaaaaactgcaagctccaatttaaagtccctgttgtattaagccacatcccatttgagaaaatttgtcgtttttctgtgtttcggccaccagcaactaccggaaaacattcgcccacttttcgatacattcccctctgcttggccaaaatcgaattgatcccgttggcagccgaaagtcttgttttgttctcccatattttgcgccattatttcgacggcgttgttttgcctccgctgctgaacgcacacggagtttctgaaaagccgacaggcagtcgcttcatttgcatatagaatacgtgttccgaggggcggtaatgtatcgacgggcttttggcaactcggaaacggaagatgaatgggggatatgtggcgggcatgtgggcggaggtgtctacataaagatgttaaagatacaaacgcgattcgatgacaactttttggccactgggcaaatcgatttatgcatacaggacgaacgggaacggatgtatatgtcaatgggggcatgggttaagattaacctttggcagcctccaacatttagtcacgtatcattcgagctctacatttttatggtaactgctgtgtaaaagaatgtctttgtgttcgggcactgagaaaaaatcctttaaatggaaaaaaatcttgtaaacaactactaaatagaacttgaaagaggtaacaaagaaatcccaagggtgttaaggccctttcgtaaaagttgcttaacacctcagagatttcactgttagtttcaactttttttattgaaatctctcactttgtaagtttgaaataacaacctatgaagaagttttaggattcttttgcatacaaggatttttctttcagtgtttttgggtgacggattcgtacaggtacagtgtgcaggtgtgcttgtattgtatgtgtgtttgtgttggtgtcagcattacgtgttaggcatacttctctgtacttttctctcttggcccatcttagtcttattttacgctgtcaactcacctgtaaataaaagagtaaaagtgtagaagagatggttagagatgttgtaagggcacaataaatttctaaacttgggatgaacaaactggattgactttcagtgcgggagtttcgtgaaattccattgcttacttcttccaggacatacacttttttgtggacgttcgatgttcattaaaaaagtttcgagcacattttggcatgcaaaaaccgaaccgaaaatagagcaacagccaccataaaaaaaaaccaactcgtctattggtagctaaactttcaccaaatttaatttgacagcaacaaaaatagtaattggtaggaggaaaatggaaaactgtcagttgcgagagtgagacagacgaaggatagccagtttagcctccaacaatttaccaattagaatgtgaaaaaagtttgtacgtctgccgtcaatgtaaagtacgaaataattgcattttttatctccgcccacaacacctgcggtttatgacgacgactgtctgactgtataataaatatttcacactaaattgcacactaagaattaaaagtgaaaaaggagcaacgagccaaaggcggctaaatgaagcgaaatgggcctaaagcgggaatgatggagagcccacaaattgccgctgaatgtgtgcaaatggcagcagcaagccgcgctggaaaacccacggaaatgaagcaagagttgagacaatttccgcaaaacgagcccaggacaaggaaagcaggaaaagcgaaacgcctaggagcaggctatacaaaattgccagcccgcttgcacttcgtattgtgtatgtctatttgtacgtgtgcacaggcaaaaggcgtaacgagcaaatatcgctttccccacccagctattttgcctctctttccctcctccgttgcagctcaacagacatcgagattgtcaatgtctggcggagcgttaaacattttccccagtctcgtgtctgctgtctgataaattcagcatcccagcctccatcatctgtccgattatcccgcccagatttcgccttgcacatgcaattgattaatgccatgcacaaattgacaagcgaacagaaccagatacattccaccaggctccagctaatgtaatttaatggagtacacgaggcaacttggagtaatgcaaggggtggttaaaaactattagcaaaaatgtatctaagactagactgtgactttagatcctttaactttttatctgcagttaccaatttcagagttgtttaaaagtagttcctttaactgttttcccaagttagttcacataaaatcatgattcttattttcaagaatccgctcctgagtgcatttcactaagccatacgtggattcatggtacatccatcgcctgactgactggctgtcgaatcagtaagcacatgtgcacctaccgcatttgcatatctgactatatagacactctgctttctatttgttgcacgtgtttgcatttccctgactgaaaataaatatttaccatattacaatagtttccctggctgcgcataatgcggcacagaaagaaactaaatacataaaatcagaaatatgctaaaaagtaaaatttctaaaaaagtaaggaaaagtttaatgttttttctttactaattccacaaagtatagttttaagctcatattatttgccaggaaaagacttagatttccaagtgcacttgatacacttttcgaccaatatttgccttgactttggaagccatctgttgctcggaatggcctaacaagatgtcatagtttttccataagcagtgccagaataattcggaataaaggaacttttcccacccgtccggcatgaatgtatgcatgcttgtttatgtgtcaaaacaccgtaaacaagtttgcaattttctgaaaagaaggatgaaaaaaaaggcaagccaaacaaaaaacaaggtactaagttggcttttatgcactgcgggcctgtataagtagaatggaaaggagaaaaatagaaacggaaggcatatgttttatttattgtttggctgcactttcgcagctcttttcagcatttgcttagcattttttttgttgcagcttttgcaacttaaaaggcgcagaaaaatacacaagctggaaaatccaacagaacgcttatttttgaatgaaagctctgggttgtagaacatggagaaattatttcgggggagacagaagagatgggacttgggaattcaagagatcctggcacttgtaagaagcgtccacgagtcgctaaacatttaagatttcggaacaaggctaatagtaaatgccgaactggtgcatgaagatttgcaacatttgtcctaatttttaatttctcatttccatttcgttgcatttgttcaagatgcactttgaactatttaagcagctctgtttctgaaagagttgtttactgcaattcaaagttttaatttaaattctttgaactaattagtagggaatttgtttgcgaacttctaatgtttagtaattattatacccaaatatttactagcggaaaaagtgttgtatacacattgaagttgggaacacaaatcagggttttcatttaatatatgcagtgagaagtaagtaaatgcccacctttctacaaaatttaaattgcataacgatacctctggcaactgccaaatggctcaaatgcagtgttgtctctgctgtttcttcgcctgcaaaacacgcagttccatctcgaaacacgtcttcatataaaacattccgctggaggatttaatttgatagtgccagagggcagacgagggctgaagggttcgagcgtagctcaagtatgaagctttctagttcaaaggatcatctggggtgcacaagtgtaattcgtatcaatttatgcaggacgtgatgctgcctctgatgttggataaattggcaggaacgttcgtttctgcgaaaagcatggcaaaaacactatatagtagggatagaaagcactggtgtttgaatggtatttttgtgggtaatttatttttactcaaactaattccattagaagatcgagagctgaaacgtaatcaagcccaatttatagacattttacttccttatattctttttatatataactaaataaataaaatgcaatgatatgctgaagactttacaagaaaactttaacgctgtattacaacacaccgttgccaattaaaaatcgtattactccatctgtgctgccgttcaacttttagaacttttatttaccagttccgctcaaaggccatttaaaatatttccgaaaaaccatctccagtcacacttgacttatttcattacacacacgccaaaaagccactcacttgccgccaaataaaaatcgtacatcgtgtttaaaaataaaaattcttttgtgagcgctgctgcaatgaaagggttccaaaagagcccaaattatttcattggtcacgctggctgggcagaaagctggatatacatatgtatatccatgcgacaaaacaggaagcccattcccaccagaaacctccaatcaaaagctcgagccatgcgtgcatggcaaccaattcgaccacgttggaaaatcaagtgaaatgaatgagggaaaactctgttcgcgacacatgcgttcatcgcggccacatgtcacaatattaaaatctcattttgagctgctggccaaaagcagagaaagagacagcaagtgtgggagagtgattcggcccatttgggagccgtttcttttgccccccgtccgcggcatttgcatcaatttgacggctgctctgcgcttcactgcctcagtgcctcacttcctcactctttcattgcctcaatggctaagagcgacaaagcactgagaataaatcatatattcacttaaaaatataagcaaaaaaaaaatggcttaaagtcacacttcaattagggaaaatcataattgattgcctacttttagacatcttgaagttggattttcatgtgtgtacttttagacatgtattataaattataaaattatatgaatatatatagagattttgttcaattaaagacattgtttaattgagtttatcacagtgcactgagtgctgcaatacttcgtttttgccgctttatgatgagcaacgcgatgccatccgctcgagttacttgattacaagtgagcaacgcatttccgccggcattgttgttgtgcggcgagcggttcgcagattggagccccgaattccgagttttgactaggtgacgccgctctccccgatgacgaaacacgaaacacctgccagcgtcaagagttcagcagcaagtgagtgtggggtgtgggggaagagggttcagtacttgccgctccacagttcacttgagttcattgctggggctgaaaggccagagagtcgggcccaaagcccatccagccgaccccttgccattgggaactttttgttttgcattattcacgagcattgccacatggtaccacacacagtgggccaaattgggacttcaagtgtggcgggaaaactttgccgcaaatttagaaaaactaactctcgttcaacaataattgcgagaatttgtagtgcatgatatatggagtttaaagtcaaaggcgcaggtaaattaatttaacgatatatcatattttcacccactgtattacgaacttaacagcttatctcagcgagtttaacaacacaacagaagcagacctagctcatttgtcattcaaaaggcatcatctccagagggagctggcgaaagggtttcagcaagaaagggcttccacgacctttcacctcgtgccgcagatccctcgtgcggattacaaattggtatttgatggtgcggcaattgcagttttgggggccaacatctcgactcgataatgagagcagagttggctactgggtttcggtttaattgggcgccaaattacttttcactttgccattgcgcttaagctggaaaaattcattaacagtacgaggcgcagctcggctggtaataaaaaccaatgcaagtggctaaaagtttgaaactcgagacacaaaattgcttcattgttgctgctggcaaacaataacaatgaaagagaaaaaaggcgggaggcggggcagcgtgccactgaaaaaggttaacaaaataataacaaacaaatgaacagtattattttagacgtcagcagagcagttgctgcgcagtcgccaacttgccacgaaatgcagccgcgcatgcgctcaacatttttaaccacttcagtcgatcgagagacgtaaaagcggtaacaaccgagtaaaaaccggtggaaagcaaccaccaataaatcgaaaaaaaaaccgcgcgcgtttttctctttcacggtatttatagctttttacccatttcatggacaataaactcaattttgcattaaccacaaaaatcaacaaactgtgcaaaggcgggcgccatcaatagaaagcattcaactggactaaaatgggatgtggcaaaaagcgaacaagatgaatgttatttatttgcactgtggactcaaaatgtgacccacaaaaccccaagtaacatcaacactgttttgtgtgtgagacaatatatgtgataaatggaagaaatcatcattagcatgtgaacaaaagcctccaggaatcaatgcaaggaaccattaatctacaggcattaatgatttaaggaatttatttatcatttgggtaagatgctgcattcatttgggtttgggaaaattaaccattacttggggtaaatctggagacaaactggaagatgaaatgaacattgtcttgggcatatgtcacttaatatgtcaaacgaatagagaaccttaaatgtctttaatatttagcgagagattcttaaacgttacaaagctccataatttacaatcaaattatattgtcgcggcctaaactccccatttcccaacatattaaatattattaagttgagtaagcaaaccgaaaggtagccccaaattacacacttatttagttgtttggaaaccattaattccggtagtatcgaccccttagctaagtttgcttatagccgtacattaccagtttccactttcgatgattgagtgtcctgcgacaaatggccaacttatttgtccactcattgacagagccggcagcaaccaagttttcgcttaatttatgagcccgggccgcgttgaaagagatgttggctgaaatgcaatttgcgggcaaccgcagttacagcagcagaaaattgatttagcatttatttccaactctcctgacctacagcgattttagtaacgatgttgcggcagacaagcgaaaaatatcgtatttttcggaaaatgtcattcgaaatgtcgctggaggccgtaccccatcttcttgcaacatttcgacaggttttgctgttgggtttaccattttcggcacaatcgcaatggatgagagatgattcagatcggtgggggtcttgaacaatacgctctgattattccagttcttttattttatattaattctattttgcacaattgaaaacctattgtctggccgccggccgtgtgagaatgatgccgattgcgaatgattttatgtatttattttttgcgagtttatgctccggtggctgtttgttgggatgcttttcatgtaaatcggtattcggcggtttgccgctttgcttgtttttcatccaatagatatctgtgttaattaatttggcgctgtcatgcgcgattttgccatttccattttggcacgaacgtgtttatttcactgcatttttcctattttttttgttgtggtataatttaattagctgctcttaaatatatttaaaggcctcagcttctttgtttcgataatgccagtagcaacagtactgtgttttttttgagctgtgctaaataatttgttaagttttaattagctttttactcattatttatttaaaaccgttagaggctgtttgtttgtttggtttttttcaatagcgcgttgaaaatcgctctctaatcgcacgcaaatcgcattgactttttttgatgcgtttttgttttttgttattgcccttgggcagatgttgtagaaaagtgagaaatttaattcggcgcgtgtcacaataaaaatcaagtttaaacgaaacaaaaagcgaacacgtgactggaaaagcaaactgaattcgtaatttgtatttgtgcgaaaacagaatggcagtatggcagaatgtttataaaccccgctgtcagtcataaaatggcattaaaagcaattagcaagttgttttatattcagcgccgaacgaacatattgcctggggtaattaaaatcttaggattttgatcggaaggaaacgaaagcggaaaaacaactcttggcgcctctaaaatgaaagtaaaagaagtgagatattatcgttgaagccatattgctgcgaaacatgcaacaaaacaattttcacgcattccacacagtgttgacatacgcctaattaacttttaagtgaaatacaaacaaaatgtggtataaaatggttaaaaaccatggtaaaagagtgaatgaacgtccacagttaaccctagcaatcctggtacatgtgtgtgtgagttgttagaccctaaatgtaggttggccaaaaacgtaatggaaccggcaatagagcaggacaaatgaggccaggccaatgctaaacagttggcagtagagtgcgagtgctcagcactttctggctctttattttttatttttatgtcagctgcttggtccataaaaccaggcgccgctacaaggaacaagaacaaggacaaacggcaggagagccgccaggatggcgcggcctgaatcctgaatccgcacacagttaaggattagttggcagcatttgcaattgtaatgactcgcatctaaaatgcaaccatccggtaaaatgcgctgagcttccagccagctcatcctgctcctccacatccgcaagccacctttccaagaggactcatgacacacaggagcaatgagcagttagatgccgagacagctgcaattaacacggaaactattgcagcgggtaaatggaaaatgcctgctgtcaactctgaacttttggcattggaaagcattttgtgggatgcaaattaggcggagattagtcggaaagttagcctagtagcccaggccacccaaaatggttatcagagctagtattgtatgctctcgcgattcttaaaactttcttaataattaatatactcttcgtttacctttcgttttattatttgttagtctgtgaaaagttttcctggaagtttcaatttatttttttacttaaatttgtattttttaaactaagacaaagagcaaaaaatgttaggacaatctattagaaacatttaaatgtttccaaaccatgaccagtgcatgcgatgctgcggcaataactcaaaagtactacgcagaattcccagtaccaagcaaactacagcagctattccgcaatcaatctgccaatccgtggcagacgctttccattttacaaatggcaaatagcttttctgacttttccggcatttcacaacggcaaaggcgcagatggcgcggttctcacgcttcatttggcatctcaggtaaaaaaagctgctggctaagcaattttcccccaatcagtcaagactgcactcccccaaccacccaaccacccaccatcacacaggcacacatcaattggtaatggtggtggcgaaaggtggtaagcaaagagtcctttggcttaaacgcttcgaggaacaaacttttctgttctcgttgctctcgtaaaactgtttgacttttatagtggagtctgtggatcgtctgcgttcgcgtttcgctcgactgaatgattgcaatgccagtcgaaaagaaaactaatgtttacgactgcagaataacctttggagcttaatttaactggcggacaggtggcaatggctcataaaatatagtcaatttctcatatgttcaacatgttcaatctatttcaaccgaatgaaatgaattttctagccgaaaacagaagatacaagtgctatcgtccaagtatcggttgtctaaataagttttttaaacttatatactaatacactgaaatatattgctcttatcattgcataaaatcatgttaatggcttgaaaactaataccattgtaaattatggcctcggaatttctacaaagcttggctaaataatatgaatattaaaggattgcaaaaaatattgttcgtacgtgcaataaaaatgattaatgcccttctgcgaattcatagtcaaaccacagctattaataattctacatatttatccttttcagaggcaaggacagctatagctatcagcacaattacgtggatcgggtgcgtttagaggataccactggtggacattaccacaacaatcagcaccagcaaaccacacacgatccgaggtgtccgcagttgagagccgctggctggagacacacgcacaaatccgtttcccatctcgacttggccaccagctgtcatgatgcagctggaactggcttaggtcgccactcgcagcagctgcaccaccaccacagcaatcaggtgaatcagcaccaccaccagcagcagcagagtcaccaccatttgcagcacgccaacttgcactcccaccatccacacgcccagccccactggacgcagtgccgggtgggcggggccggaagcggaaacgggcagctgaggaacgcccgatcgctggactacacgcaactcgagcgggaggagaacgccttggacatcgccgagttctattggcgattcgatgcggaagctccgctcgaccaagtcgatagctacgcgggtgagtggcggccttcgggtggattggatccactcggccatgtcggatgaatgaagaaagatgatgaagatatcagtttaagtgtcgcataaatatttcaattgtctgactgatatcttctcgatattgatatttgatgatttactacaatcgtacaatttatagacaaattcaattaataatacttgaattaacgtgcaaaataatggattgctataggcacatatttgttttggtatacaatttgttaaactatcaacaaaagctgacaaaagccaaattgacctacatttttgtaaatgctttttttcgtagtttattagttgttgagtggcgtcataatagacgtgataaaaaatatgaactgaataatgcaatattttacatttttccctgtactttcttccttctcagtactaccaatcaatgacaactttgagccttcggctgcaacatcaacggctgtaggatcaaaggagacaaccaccacagtagccaacaaggcaaatggtagtgccaccaccaacgcaaccactgccgctgcaaacgccctgctggacattttgggcagcgaatcgtgcagcttgagaagatcgcgcagtttggccgtaatacgtgaggagacatttagcgacctgcaaattggatcggccaacagcagtcgtcgccgatcgcagctaataccgcgtgcccggctcgttaatcgcggatttttccgtgaatcgccccggtaagtgagtcacaaacactgcactacatatgtaaatgaaatcgtacaggtttttgtttttcaattcttaatatgttttgtacagatttttgttgataagtttttaaaattaatatttctcatatccctctttgagattagaaatattacatttaaagctttaagcagaagtgggacagagctaagctaagctttgacttgctctcaagtgtttaaggcccggccatcacgcatacgccgcgtaggcacggcgcgatttgagctgattttggccgtgccagtcgtcagtcgttgagcgacgctcgccgcaagctcaacaggtctcggcacaaatttcagtttaaacaattcaaaaaaaagccgccagccaaattgttgcggtcggtttgttgtcgccgtttcattttccgtttgtgctggtggtggtttctgtggtttgtgtgcgccttttttttatttctgaacctgactggcctgtcagggtcattatcccggggtcagtgttgctgcacataacctgcggttgtcgatttaacctaagccagattggtgacaactgcaaagtgcaaactatcgaacggttaagcacgttacataagaacatttcgtttttatgagcacttaaaatttagtgcgaagttgggttttttcatatcacatttgctagtttataccctcgttgtttaattaaaattgcaaaagtttgttgtttgtcaattgtttgggtagctgcatgtatgagtcgtataggtggtgtgagtcagcgcgaatgtgacagtaaatcgggaaagcttttagctacgcgccactcgttcgtcctgccattaacacacgcgttatcctgcgcatcctgacaatggcatctgcagttgtcgagctgccactgcacttggaatcgcatccttcccgctctgtcgcactctgtgccgggggcttttcattcttttatttaatttcccgcaaatcgtcgcgtcaagtggctgagtaaaccatcaacaaagcccgcccgagagcaatgtgcaactgaaacggatccagtccaaagtgacggctcattcttgatgcgggataatggaggttttagctattgaatggccgttggacccagagtctgacaagtgagctcgtttgaaatcaataaagataattattgcaggttcagtagtttgtgaatgaaattgattcgttattccacgaattattggcgtggttaaaatcacggcaattaaacattaaattgaaagccagtcataaaaataattgaaataaataaaacaaaaataaaattgaattcattaaatggcttcaaaatttagaatatctaaatctttatattttacactttctttaaatgcttctgtttatctttaattgaacacaaattgctttttgcacgcagtcacagttctactgtaactaaaagaaaaaagaaacaaacttgacaatccatttaaacgctactcccattagaattgcaacgttttctatggcccataccttcgtcaccgatttgacacatttaatttcatgtttgcctgtacaattctatcaatcacctgtcgcagttctcttttttttttttgctgcagttgaatgcccatttgaatgacaaacaagaacccacttttgactgcctgacattcttagttgggtttctgttgatttatctgatttgtgcggattgattgatttagacatcacatgcctgaaactacttgcaattgagggtcttcgaacgaggccaaaacagtatggttggagaagtgcagggggcattcatcattccattagatgtaatttacttatgataggcccacatgtaaaacaatggcatcattaacgagctcatcctcccgtttcgattctcccacttgcagattgaacggcaaaccgaatcaggcgaccttggtgggtgagcagccagcggatcagcctacggcggatgacacccagagccagagaagcaactcggccacttgcgattcgcatcagcagcaacaacagcagcagcaccagccgcagcagcaacatcaacagcagcaacataggcttagtggagaatcgcgtgactttgatgtctactatgataatctgaaacgcttggacgccttggctttgaatctgagtgagcaattgcatccttggcacaacgacaagagcgacttggagagcttgaactcggattacttcaaaaattcattgcatcagaaccatctggatcaacagcaaccatcatccctggaattcgaagctctcgaacaggtggcagctagtttgctaaaggaaagaccaaggatttatcaatcaaggcggcagcagcaaaaaaggaataaccatcattccaactgcctgcaacgacacctcgacactgggggagaatcgtgtccagaacacagtcagagtagtgttttcccagagactacaaccagtaactcagatgatcagaccgatagtccatcgctatcggaacaggaatacgacttaacccacattgaggagatctaccagcagggtaacaacggtgaggagagctacgagatcataagtcttacgaccacaacaaggacacgtttcgagagcagtgaggagggcgaggaggagcaaactggagaggaagttgtggacagtctgaccacgcccacggaaccacagaccagcgatagtgagagcaccttaaggcaaaaccacaacgaacagttggacaaactaatagcttatgattctgtttacctctcctcagaagatagttcagattgtactttagttggcgaaagttgcgagtccttcgagcagagaactttcactagttgtggcgaaagtggcgagttggaaacccgcagcttactacacatttcaattgaggacacggtttatgaaccacaagcgaagcagcacaaaaaggccacaaatcaagaagatcaacctgctcctctgttaaccaccacagccaaagttgaggcacagatctttacgcaagttttgaaggtagaacacactccaaaaccgaatatcctagctgtagtggaaaaacgtaagctcaaacaggaggaagtcaagcaccagccgccggaactgaaacgccaggcaaccgactccttcgtggtcactgccaacaagtccaatctcgcagagaatcagtatcatagcctgccggatgttaacataggagttagtctgaaggtctgcgagagcatcgacaaggagcttagatcatcctacaatcagcagaggcagcagcaacgcaaggaagccaaaaaggagcagcaggtgacgcgggcagaaacgtacgattccattagacgtttcggacgcgcccatcaaaaagccaggcaaagggaataccaggaaagggaaagagaacgtgaaaaagaagcgtcagcggctcttcaggaaaaggacaaggaaagggaaagagaaaagccaaagataaacaaggaattttccgcacaggagcggcaaattgaagtgaaagagacgacaaaatctcaagatataatcaaagaaaaagagcaagtttctagaaaggaagaggctgaggacgacgaggaagaggaaccactgccaccaccgccgccacctttgaccgaggagtctcaacaggaggacactgtagcggatgtagaagaggaggacaatctgtctgtatccatttcacagccggaacaacccaaggaggcgcccgtcatcgaggtggccaatttcagcaagctaatcgagcgtcgtgcccaggaaatccgcgagcgacaggagcaaataaagccatcctttcaaataatcgtcaccgacgctcagaacaatatcatccagaaggaggcaattcaggagaacaaggaaaccagccaaaggattgaacccaaacccagcccgaaaacaaattctaactcaagctcaacttgtaatctcgttcagcgccctcttcgccgctctgtgagttcctcgagtggcaaaccgctggaacatcgcatcctcagcactggtgccccaatttacaaggcccgacctgtcagggttttgccctcctccagcagcgattcgagcttttccaggggcaaaatgtcacgaccccaaatacttcatgtggtggatgggcgtggaggagttgcgggcggaggagcaggtggcaccctgcgaagaagaagcagtgccaggagcatagccagcacaattagctcgccgggtggtgaggtggctaatgaatatctgcagaaagtggatgcagtccgatgctattggaacaaacttgcgggcaatgaaccagaaacattaaaaacagagcagccggcaaaggaaacccagccaggcattcacttccagttgggtggagagaccacaacacaaggcacggataaatccgctgttggcaatgacttctgcagcatgatgccacatccctcaattgaaattgtagaactaggagagggtgcccaaaaagccaccattgtaaaggcagctccggaacgagaggaggatccagatgaggatcaggatcagttcgatcacataaggtataaggttctgaagtcacagcaactgattcgcaataatttcctctcgaccagaaataaaaaggaggcccagtttgatggtctaattcagtacctgcaggaatatagtttccaggagttgctgagcaacaataatgtggtgatagttgagcctgtaaggaccaagatagaacgacctctgcaggtgggaattaacagtggttctacaactacgcctacgactgttccacccccgaagcctccacgggttgttaatgcctctgcttcccagccacgaaaaacgcggcaaaaacaaacgggaggtgcggctgccaaacgacatttcttctaccaacccgtgcgggtgaacagagagctctacgaagatgagctaccagatcctgacacagttcgcaatgttcgtcgcttttttgagcagaatgtcctgccaactcccggtcagggattattggtacaatctcagcaaaagtttggtggctcagcctgccaattgagtcccaagtcgaggagagctaggggttaccgatacctgacaattgatacgagttatggaggagcagaagaacaacccaaaggcatggagatgctggaggagcacaaggcgaagcactgggacaatgccagcctatcaagtggaatttccagtggtgttttaagttccccctgcggggaatatcatcatcaggaatccccggtgatggcctgcaaagatgtccatgttcaggacgttgttcggaggcacaatagcaatgctgccaatgccaaagctcgagctaaattcgccagccgacgtacctggtgcatgggtgctggaggaccaggagcaaatgaatccctttatcggcaaatttatgaaaataatttgggaaattcagagcagcaggaaaatggagaacatctggaggaagaggacgacgaacaggatgaccagtatgaggacgatgtggagcaggacatgtgcgagaattattacgtcagcaatgtgagtacacagaaaaaatcgagttagcttgaacacttgttatattattcttatcaagacatacttgagataagcccattatattcatgataatcgcaccactttaatgtctaaaagatattttagacacgataattatgttaactcatttactaagttagctcctttggagattcgtgtttcttatttgatagttttcaattcatttaaatatagctccttgaaagtttcaaacttaattaattcgagttaaatggagaaatttcgtgtttagctcgagctactggttgcgtaagcttaggttttttttttttatatttgtttagcacatgggggtgcggtccttttgcgtgtggctttatggaccattagcctttgatggcagccagtcatctaatcttttccttttgctttcaggacgtgctggccaagataagggagtgcggctcaactgtcacctactacggaggaagagtgctggacaaaaccgcaaccagcaccgcagctccgtcgacaaaaaccactcaaccgatgacgggtagtgccacccgctcccgaatccgtcaaatcgaggcctgcaatgtgtgcctcccgagcgagagatgcgaacatcgattgcaaaccaaacaagctgcagctaagcagcagcaggactcttatcaaggtgggtaatcatcctggccaggcacatactcataattcggttgcacaaagtgcacactcgttatgaacaattttaaagattttttgagggcatttgtgccatttgttcagtggtttattaagatttatttttgctttaaaagttgagttatctagcaaatttatttaatactttttgtaatccaagtcactaacaagttattaaatagtaaacaatacgttttatcgcaaaatcttgacggacaacgtgtatatacagtgtaaatatttttataacttcatgccacagcttgtgctcatcatatcaaatgacagcataaaaccgaaatgattatttcctttcttttactgtacaggcatcaaatttaagctggtaaagtcgaacagctgcagcagtcgcctggagttggccggaactggagaagatgaggtcaccgccgacagcgaggtggttcgaaaaatggtacatcactttgaggcgaatcagacaacggcaagtaatgatgtccaagtgaccatcaacagtcagagtcagataacgtcaacgaaaaaggagccggaggaggatgtgccgcgccgccaagtgacagtaaataatcacatcaatgtgcttggagacacgatgccccaggcgtcccaggagaaggctgaaaactttaatggccggccggaggagaatggctatggcgctgtggagaccgtgcccacatacgaaagtcaagccatgaacatacgcctcgatgcgactgaaaataagaatatcctgcaaactgccgctgcgactgctgctgccaacaaagtttgccgcaataaaaacgttgacttggcctacacgttggtgaagacaacgacaaattctcccaagggcaagcccatcgaagctccgcgccagaaaattggaaaacaactgcgcgaagttgaggaaaatgtggaaaaagcagccgtgacaaaggccaccatcaagctgacgaagggcgccccatcgcaaatcattgtgcccgttgatattcacagtcaggcctcgatagttgcacacactgccccgattccagagcgtcgactgagcaatgccagcagcagtaactcggtggtggacaagaccgtagttcggcattatgtggccaatgataagagcatctacgagcggcgcaaatatgatgagattgagttcgaggagttcgaggtctacgatcccagcaaggagccaccaccccaagtggaggaaggaaccgacaaaatacccacagatgcagagctctacgacagcctggatgacaaaatgtaatcagcaaactaatgctcaatggaaacacaaacggcaacgacgacttcttggggttttgggttaaagcttaaatctaaacacacatctcgtagttaaccatattggtagcctaatttagctttacaggtaaagccaaaaagattataccataaactatccaaagtatgatatattttaatatttaatcttaatttgcaaaaccaacttttgtccaaccgtacattgtaagtttatgcttaaataaatatgcaatttatttatcgagttgtgacagctgtcaactatttatttattatgcatttcattttcagtagccaatgggcaatccgcactatttcattactaaaattatatatcacatttcaaatcgccggttaatgagagaccacaacggccactaatttgtcaaacttatctttaattaatcgataatttatgggcatgtgcaatctaatgcaaatacgtaaagcaggggaataaagtgattagaaagggaagcggaatttcatcacttaatcaattaagttttaagcaatcggcaaatgaacttcatccgttttatcaattaagaagacttttaaacataacatataaatgtcttaccattacaagttttctttttctttttctttctatttagtatcaatttcttctttattttcctattcttgattctcttcttgagtgaatgaacttgagtgccagcaaacgaatttgattctttaaattcttgagctccgcagggattggtacctttttcagtttcctgatccccttttcgatacttaactaaacagtgattggatttcgatttcttttctcttattttatcatcacatcctgcttgctcatccacatgctgacttgaactgtgacctgcgattgggatgatcgataagcttatattaacacccgcccacaaagttgtcaaatccaatcagttatctcgcactaaacgaaaatatttacaaaatatctgcaaggtaaatatctccatccatttccattccatatacccactcacctcccgtcgtcggttttttatgcttgtccgtttcgccatcctccgccgtggatgcgaagcttctgtgctgctgaagctcatgacatggccgtaagtgctgtggggggaaaggaggagaaaatgtttgcaaattaacattaatgactccatttcgcattattggttgcggcttaaattggccttacatctagctactcgaaaaatgtgctggaatatgtagatatacaatttaagcctacaccattctaaaagtatgaggatattattaccaagcctttccaagtggttctaaggaaatgtacctaagggtgagctttcgtttattataaatatcattggaaaatttaaagcctactccaatttaatagcataagcataatattactaagcctttgcgagttctaagtaaatatacttaagggtaagacttcgtttattttaaatttaattgggaacacagtgcgtacgagtaataaagttagaacggtatcgctatgaaataaaagatactcttaaaaatataataaaaattattgcatataataaaataaccaacaatctttcatagttcagtaaagaagaatttgacagctctaaagttcaccctggtttactttgaaaattcctttatatattcagtagctacacgtcctttacattttagaactggcattccttgcatgttccagccgaacctaattaagttaaaatgctcccaagtgaaatcacgtgctccccataacgaacgacgaaaacgacaacgaactggcactcaaaacaaaaacaaaaagcggaaaaggaaatggagcaacggaatatgggatgcgtaaatacagttattgtaaggaccgcacggatgtgcgtgagtttgtgtggctttaacccacaacatggtctttgtctggcacttttcttttacaacttttttgtactccttccttctgccggtaacattgcgtatgagtaatcacacacgcactaacacattcaaacactccagggaggacacaaatgggcaaaggaaatcgaaaccgaaatcgtttaccgtgtcattttaccaacgaaacaaggcaaatgtttgggtggatttaaaagtttaaaggaaaggaaatataaaataacatactaataaatattttagtttttgagtagagtttttgaatattctttagtaattcaggatcaaccctcgcactttaagctgctgcttgaaaatataaaacagcattgcataattttaggtgcagctgtcaaagagtgtgtggtgtgtgtttgcatagaagcagaaacatttatgcataacatttagacccgagttggggaattgcggattttcttatacggtatgcacgtgttgtgcgccgattttaacttttactgattggatttcacgctccactccaatcaggcgcttcaataattcaggccctctcgaatgcgcagtgaaaaatgtagcaaaatcaaatgtttcccacgagtaattgaaatttaaatggcaaataaattttcaaaacacgcccatgcagtccctagatcaaattttgttagctgtttttccgcagaaactttggtgatttgttggcacgcattattgatggacttttgcttggccaaatgacaattggaacatctctgacagttggtcagagttttatacccccaatggcgcaaccgggggggcaaaagttaaagttatgacccccgatgagctgtcagccagcatcaaatgttaaaaagttgccccacaggcatttgcaccgaaccaaatgaaacattaggcgtcacataaatttaacaagctccgacagtcacagaaatccaagctccagccggatagtatgctacttttcttttactggtggcaaaaagtttttacgatcatccgaataaattgaaatcgcagctcggcttagttcagcttttccccaagatgaaaatgaaaatgtaatttcataaattacacctgctgtttttcccgagaaaatgataaccagaaacttgtgaccgcaactggaggcaaatcatttcaagttaatttgccttgtgggtcagctttaaaaaattgttgaagaacagccgtatactcgtacgtaaacatcaacatccttggcctcagtctgcgacatgttgcagcaattgtctcttaatgagcccgacaatgtgaccacgtgcggcgatgtcctggtctaagtcgaaagaaaaacaagtcagcacacaggacacgccaggataaacaaggagacaggacaaaaagctctctgaaagaggcaaataagtggaggccctgggtcataacaataaacaaagcgagccgagtggatgtctctgggttcctcaaatcttccgtctgcgaaacacaaaaaaaaaagtcaaacaaaagtctgcaaacgttagagataaaaataaaattacagtggttcgtgtaatttgcatagcaatttcatttctcccaacttttagggaccatctcttgaattttccacattactattcatattttaaagcaagctgagccccttaaaatgaatggaaatgaagtttctatttcagtaactataatacaagcgaccatttcataaaaagctttaaaagtcttgcacatatagttaaagcaacccaacaatctaaatcttctaaaaattatcattgctttctaagttggtctttttattgataaagtataaagcactttgcaaaactccgcagcgaatttctaaattgattgaaattaaatgttaagaaccccgtcacaaggaattctgcatggaaacttcccggttgaggaagtcatgcaagctgaaaacttccaagacaggagaagccctagacaaccactcgcctttcagccctttgttcttggccaacaaagtcgcgtgtcaagtgccacattcctgggcttctagccaagaataacacggcgccgggcatattgttctttatacgtttgattgtctctgaatgagctcgttaagtcgtgggccaaatggaataatgaatctccgtcaaagcaatttgtctgaccgaccggtggaaatgcaattgaagtttcgcgcacagatatattttatagctcgtaaaagcaaagcaatttgttatattggaatcgaggctgctggcaatgaatcataaaaatattatatgagtgagcaaatcaccgagaaaatgagattagtggaacgacatcgaaggatgtaggcgagaagaggataaggcttaaggaaaaatccccgtaacatctcgacgaaatctcaagccatgtcgatataatacatttctataaatatattaaaaggagacgcagacggagagaaagctaataaattagacacatgttcggttcacagcaggcggcgaaattttttgtcggtttttgtttttcacaggcatatattcacttagtgaatagatttgccagtaaagattttctgcaagtaaatatttagctgagaaaaagcagagaaaaatagataaacaagcaaccacatattctgacgttgactatcaaaaatcatcagatacagagagagaaaaatggcagagacaaaccagacagactaaaattagtgtgcgcggcatacacaaactgataaacatacacatccccaatagataccgaaatacacaaccatgaaacggaaatagatatctttttattccacttgaaagagtgcaaaacgcggccagaattttgtcgccaccctcacagttcacagatagccaaagaaaatttggttaaaagcggacatatgcctgttagacagtaatatctaatatggccagaatgaggcagtaaaaacatacagaaaacgaattgtgtgtgtcggaggcaaagttttcgcatttgcccaaaaattcctcgaatgcctgcttatgtaggccatttcatctgaagttcacccatcctctcccttaagagttggccaaaagtgagttttatatgctcatttgtaagcgttttacttcagtttaaacgcaagctttgggaattgctttggccttctagtaaaattcatttaaattgcgtatacgtcagtttgcccctcggtctgtttgtttattcagtcaattttgttaatggaaatttggaagaagaaaataaatgaattgcatttcatttataggattcaattacaagggaattaggtaaatgttgtaacatacatgtcactcgccggaggctaattaataatgcaaaggctaaagtaaaattcgagttaattaagctttaattgcaattggaaaaggtaagaaggtggtggtgtgcgaaaatcccacaaggattgcgcggtcacacatttacaccctcgtcgccgtgtttcacccttattcaacccccatgttggccaagcgaatttcaattacagatattccatattcatagagtctgtgggctgcccccaggtaacagactgccatcagtaaatattgcacacgatagagcgatgtacatgtactcaaagtggcaagaactgtggaaaaaaaggctgcaacaaattgaagcactaaagtcaatacaaacgaaacaggaaaccataaacttgtgggtttaagtacatagccatatcccggaatcaggatccgtcgggggccagggcacacataaaaaccaactcagtaattgtattactcactcaaaataatggctcattaagccgcaggccaatgtataagaatgtagaagctgctcgcctttaattagtgactacggtatccatcttggccctctcaggcttcactacactttgagttgtccaacaaaagtacacagagtaaacgtgttcctctgaggaaaatattactttcttgcatacaaatttcccttttttgctgaaaatatctagctgctaacgtttgcgagagctgctccaaaaaaatatgtgccttcaaaggacctcttacactttctctcccaaaggctgtgtgtgctttctttgaaaatatcttggccatgtgcatgagcaatttccaggacacgaccttgcgcaagtaattttcattttaattttaatacaattaacactcagaagagacgataaaataggtctcagtgaaaaagtgacaggctgcgggccacgccccaatgcttatcagaaaggacccgaggccacatcccattgtaattagtaggcgagaaaaaagcggcagcaaaaaccgagtcgcatgttgagtgctccatttagggaaaaccgcatgaaaacaacattatgcagtcccttttttatggctaaaataaactagaatggtgacaacaaaaacgagtactatataaggactctgctgcaagtattcagtgtcccttttagaggacaggcaagaatatgtttttaattgttactttaaagctgtggattttaatatacattaacaattgtaatattatgcattcaaaacaaaagcaccatattaattatgttaatttaagaagctaagagacaggctcgtatttgttgtatctttctttggatcgctacttttcaaccgtatgacaaacttaagtggatattatgaaagcccttaccgagagtaggacaagcaaagtaaatttatgtagctcatttttgagtctagctcgccttgcctgtggagcgcaacgaaaatttgcatataataggagaattttcgccttcaaaaccgagagaagcgacaacaaaaacagcagctgacactggagtcctctagtcgagaaactcggaaacctgggaccaaaactcacccaaagaagcctgctatgtggcctgaattaataacgaaccttttatgcggttcccttcgagtgggctgcctattcccctttttgtttgggctttaaattggctagaatttattcagagattgggacagcgatagagttctgcaagtggccaaagccacaaatatttactaaataaattagcagccacttggcgctgtttggcaaacgcgcttggtagtcaatacactgaatttaaatcaatgcaccacaagaaaaaaagtgtacacaagagtggcgcttcacagaattattctgataacattgaaatattttatggcgcaggtcaatcgccagtttcgcagattggattacaagggctcggcgaaaggggaaagatacacagagggcttttggccacttgtatctatcagatactcgtgcaacccaactcggtgcagagtcattagataaacatcaaagcgaacattcaagccgacaagttgggggccaaacgggattgggggttttaattgggggcctatatgtggggttcatgtggggtagggtatggtagacaccgcccttgtcgacagcagaagtcaagtgcaggagcaatggccacatcacgcaaaggctaagttgccagaagttatattactatggagattggaaaagacaaacatcaacatgaatacacttataaaccatatgtgcgatccatttatacaataaaatatattaggatctatctttaactatttgattagaattttgattttagtttttaaaagtttttataccacaaaacctttattttacttaaatttaatattactaacattttcaacattttacattctcttcaacaccttaaagtagttttctacttaaaaattatgtaagggtatagtaagttaatttattaaacctgtatttataggttccttaaacaatttctgtaagtgtaagtttgttgtaaggaaaagatattcactctgttagctatttgtcggctacattatattatggccaagttatgctggcaatttggaaggcataactttaagttctgctgatgaagcgacagcatctgccctaatgaggtctttctaaattgtgacatactgccaccgccgtttacgatagcattaattactcgtataatcctcgctcgtcccttccacgaatattctcattcagcgtgcacttactgcatatatatgtatgcaaatatttttgcaacgtctggtggggaaaatttgcttttcgtttttccctgatagctaagcaaagattttgcagcgctgataaattggcgaaaacgtgcacaagtttgcaaggaaaagccctgtggtgaaggataatatggggaacgagtaccaatgccgtttctataatatgcggattttctgcggcttgagtgcttgtgtacgggttaagtcgaatgctttttggtgactttaaggtgagagccacagaaacttgctgatcaaacaatagttgatagtatttaagaaggagataagcgtaaggcggaaaataagtgctgataagttaagtgcttttctgggccctgacagccggcaaaaaaaaaacttggcggaacgttgactttgctggaaataagccggtaaaacttgggattagggttgagcatgtcttaaaatgattaaaaatcttacaacagaagtactcttcagctagaatgtataagaagcgcggaggagggcactaataaccataaagcgaaataagataatagtttgggtaattataaaaatgtagtattcaacttgaactgaatctgtgacaaaacttaaattaagtaagttttagtccgcaaacgtgataaaattgcaatcaaggttgttaactttaaatggaaaagttgaaactgatttcagttgaatgtattttgagtcttaatacgtccaaataaatcatgaaaactgcgcgggaaaaaaaaacgaaaaaaatttgcactattgcaaagtgcattttaagtatcacttactaagcctgatttaatgagcagacttcgtaaaagtcaccatatacccaaaacgacgaccataagacctggctttaagctgctgacctctggctgcattatgtgcaaccagcggaggtttgctttggatatgatgaattccatttgcataagtaccgccttgtttttgtttgccgaccatcgggctttatttatgtatgtatgtctgtgtttgcacacacacagggatgcacaaataaagccgggtccaaagcctgaatcatggcactcgtgtatttaatcaaatatcaattgatcgcccatcgcaagcgttgcatctgtcggaaaataattgttcaccggcacagcaaattcccagtaacatacagttatggttaaaacaatagggtctgataaggtatgagagtattaaaatcatattcctattattaatcagcattttatgaataagcactcaactaattttaaaccgcaactgaagtaatgatggccgtcttcaagaaatgtattttttgacttatgaaactatcccattaatgtttcatccaaaactttcttttcatgaaaaactttatgccgaaacaatttgtggaaaaactttcgagtgagaaatataattgtataattggttagcattatattttcgccatatttcagaaacaataaaggggtttactagaatttcagctgtcagtgttccacatatacaggaacacaaccacatatatttttgtgtatgtgtgccacgccccaggaaacaggacgatagcaaaacaaatggcaacacacaatgcaaaaaagccgaaattcgagggcaagccaaaaatcccattctagtgaaattgtcggaaagagacagttgtaggaggggaagaaagggatggaaagatgtaagagcacacgttctgtgtctgtgagtccgtgtgccgcctgcctgtgtgtgcgtgtgtattgtggggcagaccaaatggcgccaataaaagtttttgtgccctacgaaaacatagaaaaaactgcaagagagttcccccaaaaattctacaaatcctctggattttatttattttttcacgtacatccagagatttcaagtaaactaagtggagcgtgatgtggagacactatgacaggttaagatgccaaaaccggaaatccgggtcaagaagtttggcaaacttttgagcttgacaatcaatgatgtcgttttttgtcatcgcttctatttgctttaatcagctgggagaagctcgaaaaacagaatgcaaattgagatagacacttgtgggcacaaaaagtcgagcaaataacttgctaaaataaaataatctaggtacaaagtatctcgcccccttttcgcccaatgtcatcaacactcgcttttgtttgtcccgctctcttcacaaacaaaaaagctcaaagccgcccgtttgcgttgagcaaataacggcgtatttaatcatttcgtatgcaaatcgagtttgtcataaaagaaatactatactagcacacaatacaagccggttgaatgagcctttttggtacagtgaagctccaatcaggaaaatatatttggtgaagaactttttaaaatctaaggatcttaaatttcattcaattcacacctataatatttaaaattttgatttagatttacgattaaattcgacatttttgaggcttatcaaatattcatcattgtcgagtttcactgtgcgcggattgtactcatatttcagatgctttcgctgactcacctactttagcttgaaatgtaaactgataagcattagcgtttataattgttagacaacaaaaatcagtggcagcattaaaaaaatgactcactcacaataattaaatcaatgacctacagttttgcaggaattgggatgccatagccggtgctaattgttccaaacttctctctctgaaaaaaaaattatcccaatcgctcatctatcagcgcccctccctcttcgacaacccgcctccaactacatgtcatgtgatgataaacatttctgacagctgttttgttgttattgccttggccttttcgcgcaggtgcaaaaacaacaacaagtcaaaatgaagagagaaaaatgccggggagagagagcaaaacttcaaatgaagttagcaaaagaaaagggggaaagtgaacgaaagagaaacagagtgagaaccatatgtacatatgacatgtggatatggtgtatggtatgtatgtaaggttattttgtattttcggactggttctttgcataaattttaaaaattcgaaacacaaaatatgcccagcacagcagaggacaagacatttctatataagtttgactgtgcagagctacatttgtgtgcagacagtggcgcccaagagaatagcatttctcaaatttttagaataccattcgtctataccaacttcatctaaaatatgtattttttttataaaatcaaagtttctaaaataaatctatattataaataagacttccaatttgtcatatgctgatatttgtaaagtgataaaagctttaaaaactgacctagataacttctcaatacgtcgttgaatggctcatttcttaatactacaatactaccccttgttgttagcatgcgcttattcacattcgaaaagcaagtgcgtgtatttttatagatccgataccgtggcaaacagctgctcccccggagcgcgacttccccagatagttttcctgaactgtgtatgtgcgtaggtactttgtatgtagcactcaccagggcgaaggtggtgccgggggccaaacgcagggcgagacttctatgggtggtggtggtcgctggtcgcaggaagagccgaaaggcgctgaccatggcagccctatttctggacatgatgcggctcgcttaacaggaactggttgtacggctggattgaacactacaccacagcactgaatactcctttttatttttattgtaaatcacgataacaccggttatgggggggtaaataatgagtaatgtgttgcaattccgcgcccaacttattgtttggattagaaaataaataagaaatacaagtacactaagaggcttggcactacctttcagccaaaatctaattttaaacgcctatgtgcgaaacgggtattatttattcgaaccggaaactttagcgaagcctctttcatcgtcgtggatttcaaaggcaccgttagaatcttccgataggctcgaatagatagctcccacgataaataaacaaaagcggccaatgcgaatttcactttcacctaacattttgacatgattacgtttaattttgactactttaacaaagtgtataagttgtgacagggaaaatgcaacaagccgcaaccaacaacaaaaacaaccaagaacgggcgcgaaaaaggagaacgggagaattttctgtgagaaggggcgaagagaattaccggttttaccaagcgaatcttctttaacttttcatgcgcggcacatagggctaaaacccagcgattagcactcggaataaaattatatatacatatgtggaaagatatatattctgggaatttaattattgggaacgcgccgttttaatggaccattcgctgcacggcactctctctttcgctctctttgcactctcttcgcccacgactttttatttaaagccggctgtgagaacacgcgatattattattaataattaactctttttgcaactgtcgtttgtggccgaatacctgttagcacgtgctacttttatcgttctatggcttatctagctgatatttaaatttatagcttgcggtttcgatttgaaaccgacgcgccaaccatatataccgttgttttcttatataaataaattttagttactcggaaatatacaccgaaattgcgcgtatttgaatgttaatattcaaagttgtcaataaaataagaaaacatcaactcccacaaccgacacgaacgaactacagaaatgaactaaccgaagctgcaaacgaaaagctatgcctaatcgatactatcggtgcgcacccagcaccaatcgattaccatgctgttatgtcactgttttcactgaataacgtggcgccaaaaaaaatatttaaaaaattaaatatgcttgtacagaaataaattgttttttaaatttgttgtctatttatttatattttgtaatatggcaaagcggcacagtaaaataaatgtaattgtgcttgtccatcggatgaatttttactactcttacatataattataatagtcaatgagaagcaaagctttttgaaaataacgaattttggggtcatatgctgaagttgccatttcgatttctacacacgtttattcgataaaaatacacaattttttatccgtatctagcgaatactctttccttttggttcctgaactcgataaatgtggatggtgccctcgttaaaggtgcatgtcttagcttgtcgtgtttacttggttttagaacattgtttaggttcgtgtctcgactgtttagtcggcttgtgattgaaatagtttttttagtacaaaagtaaacctacttttcaaatttcccgcataaacgcgccaatgaataattcgcatccattttacacttgcaataatttcgcttttattattgtcgcattaccaatctaaacttgaactagtcctcatacatttacgcatatatccaactatacaatagagctttgcttagtgctgcgttaaaaatacaactagagttttacacttttacatcgaggcctgtgacaagcgcattttaagtctacttaggctaaaaacatctataatacacttaggggatagaggcagccttatgcttaacgtactagtccgatatatatatatatctgggttttactgtagcattcgttaactgctggaacaaagtcacagtcgtggcatggatttgaaatgcttaaggtacacagaagtttctgtgg

SEQ ID NO: 28547 - DNA, 1147 bp, DROSOPHILA
ttcgtgtcggttgtgggagttgatgttttcttattttattgacaactttgaatattaacattcaaatacgcgcaatttcggtgtatatttccgagtaactaaaatttatttatataagaaaacaacggagtattcagtgctgtggtgtagtgttcaatccagccgtacaaccagttcctgttaagcgagccgcatcatgtccagaaatagggctgccatggtcagcgcctttcggctcttcctgcgaccagcgaccaccaccacccatagaagtctcgccctgcgtttggcccccggcaccaccttcgccctgcacttacggccatgtcatgagcttcagcagcacagaagcttcgcatccacggcggaggatggcgaaacggacaagcataaaaaaccgacgacgggagaagacatctatgtggaatacgtgaatggcatgccacacatgactgtacgacttcccagtcgcaatgaactctgccagtttgccctgaaacccatctcccacaacgttggtgatctgttagccatgctcagggctgaggatcggggcatcgatcgagctgcggtgatcaacaagcatggtgtgcgaatcgcgtcgtcctgcaccatcgaaagcttgctggatgactcgtttagcatacaaatcaacaatcgcacattggatgtgaatcctcccaaacgtgacaaagtcacattggagtccatggacaaagtgggcgatgttcgtaaggttattgctcagctctacgaggcattcaacgtcggagaatatcagctggagaagagcaatcaattggccaaagaactggagaccctacgctatgaactagaaccactggaagagaaaaaactggaactcagcaaaaaggccgctcgtcgcactaactttatgacttggatgggtttgggcctaatgtcggtgcaatttggcattttggcacgactgacttggaacgccaaaaaggttcagttcgatgtagaacactacaacgaactgaagcgaaagtcggcggagttggagtacaatctcagaaggatcaacgacccgctcaacatgcaattgccatcgcatttggttcggacccaggaaaacacgccaccaaccttaactgaggaaaaggcggagcggaaatacacttaa

SEQ ID NO: 28548 - protein, 309 aa, DROSOPHILA
MVSAFRLFLRPATTTTHRSLALRLAPGTTFALHLRPCHELQQHRSFASTAEDGETDKHKKPTTGEDIYVEYVNGMPHMTVRLPSRNELCQFALKPISHNVGDLLAMLRAEDRGIDRAAVINKHGVRIASSCTIESLLDDSFSIQINNRTLDVNPPKRDKVTLESMDKVGDVRKVIAQLYEAFNVGEYQLEKSNQLAKELETLRYELEPLEEKKLELSKKAARRTNFMTWMGLGLMSVQFGILARLTWNAKKVQFDVEHYNELKRKSAELEYNLRRINDPLNMQLPSHLVRTQENTPPTLTEEKAERKYT

SEQ ID NO: 28549 - DNA, 3769 bp, DROSOPHILA
tcaacaagaacccgaattgctaatgtccatattttttggtaaacgggtaaaaggggagatacttttgcttttttttcgagcgggttgaacagatggagccgtagtcccttaaactatccggcgcatcacctgtgtgggttgctcactttgtatgaagtacattgggtacgcatggtgtatgaaagcgtcgattagacgcttcaatggctgcaccctgcaccctggatccagaacctatctaccgcaccccgccccatgtcagcgcgaaattggctaacggacagcttggcgcacatgttcgattatggccaaatcgagcgaccaagcagaaccagcggcacatgacctgggctcagcgatgccaagacctgggtggttgtacctagaggtacttgattgctttttaaactcagcttggtacagcgtacacgactgattatttagaagctatgacagctttctttgctttgatatttttcatatttatatataaattataaatatatatttataagcaggtgatatggttgaaacatatatcaacgaatatgtcaaatataatacagtgaagtgtctgcattattttattgtacctgcgccatcacaggtacggctcctctttccatcgactgcagacgtaccgcttatgtgcatgactgggtgtccggggtggtggatgtgaatgtggatgagtggcaggagggcgcaggcgcagctcagcccaacagccaagttggtctggactcctggcggcccatcgcattccgtggccagtcgcagcgcgagacggttagccagttagccagtgcggaccgactaattcccaatttccgctcttgactaaactaaagattgagaaataaagaaagaaatatccttcgtccgtcccccagacgaagcaggtcaatttttttttcgtgttacttgctctttttcgccaagtgtgagttgtgtgttttggcttggctaacgtgattgaaatcgagacagccgggacatcatgattgtcaacatgcccgtcaatggaacgggcagtgcatccagcccaacatcgaatcccagcagcaacaacaacaacaatagcagtaccaccaatcaaaatgatacgaacactaatcttcccggtgattacaactttcttaagcgcaagttcgacgatcaggaggatttggctttgggccacgactacgagcccatcggggcaaatccctggaagaagcgacacttggactacgatgccggggacctgcacttccacctgcagctggaacagccacctagtaatccgccaaccaacgctgcacccgcccaatcctcgacgtccttcatcaacgatctcttttcctatgagagcagtcttctggtgcccgccgtcgcctattcgcactgtccaccatcgagtgctccattggatgacaatggtggttggaccggtggcgagctgctggagctggatcatcgttataactccggcctgcaggcggaactggggcaattgaatgccactttgccgccgccaccaccaacatcatcatcagctcaaaatgcatccaatcatacgcagcagtcaacacaacagaatgtcagtcctggtcagaacccacatcagaatcaacattttctggtgccgcagaagcagcggatacagtcggcgggccgacgcacctcatccggttcggttagtggggccaatgaagccaccgaggcggacttcgaggataagaacctctcgtggctgctcaactttaagttcgacgagttcccgcacctatcgccgcacaatcagattcacggacaggcggtcaatctgccggagggcagtgctccacctcatccaccatcgacggcagtgccgatcgccacgtcgccctgcagttcctcctcgccatcatccgcctccgccgcatcggcatccgcatccgccataagcacaaatcaatctctcggatcgggtttggtggatcaacgggccagatcgcccaagagttgctccagtgcagcgatgccagcggcattaggaggaggaggcaacggctccgctggcgcttcagcagcggggggcgtggccggcgtgggctccaccaagactgggcgcaagttcgaggagctggtgatggaggtcacctcggagttggacggtaacgacatgatagttgccgagcacgttgtcgtcgaggatacttcgtccaaggcgtaagtgttgcagaaataaaacaatatgacagtgtcaacggttaaattctatatttcctaatttatttgaaacatctatttattcccgttactcatagaggaaaagggtatactagattcgttgaagtatatataaaatttgttgatcaggatcaatttttaaatttttttctcattttattccccaatatctatcgacatcccagaaagatgattaaatttcgcgttcgcattcacactagctgagtaacgggtatctgatagtcgggtaactcgactatagcattctctcttttgttttaatatatttaacaatctttttctctgatttgtgcgttctccatttgctttcaatgccgtcctccaatcgatgccgccaacgaatttccccaaccacgcaatcgccgatccactaaaccaccgaaccacccaccaatgtggctgaaatccaaaaccaaccaccgcaaaacaagcaggccaaagaaaccaccgttcacctacacggagctcatcgaatacgccctcgaggataagggtgagctgactgtgtcgggcatataccaatggatatcgtaagtactgtcccccatcgaaccacccactgaatcaaccaccaccgcccaccgcccaccgcccattcggatggacgccattttgtggagtgctagccatcctgttattttttttgatggcaaaaaacgccagccaggatgcaattaaacaaatctcaagcatttcgttttggccattcccgttggccatttgatttcctcgttcgctgggtatttcttcttaccatgttttcgttccttggttggtaaccaaacttaaacaaagtgccacacaccggcaaacaaacgatagcggccacaatgaaagtgcaaaaagttagcagctcaaacaaatttatgggctagaaaattgcatttaccttgccttcgctcgcataaggtgaaaaacaaaaatgttgttaaccaaactatttgcgggttgttcaacaagttgtttatgccaaactggtattccctggtattatcagcttatacggatagcgacccattaattttggcttttggattgtttagtggcaattgttgagtataccaaattcttagttttatggtgataagtgcttaatacggctcattccgtattagttaatcattcaatagtattcaaaactagttaatcattacctacttttcgcaaaacgttaaaatttttcaaaattccatttttaccacgctgagttcgaaaatatcaattcgtcaagaatcgctgacgaagaaaacaataagttttaacacatttttcaaggttcatcaatttggcctttcgcccccactgctccccacctgttttttgttattcatttcttttgttgtcttcgaatacccggaatcagtgtaaatatttgatgccgcagccgcgaatgttgcgtgtaaatatcctatataaatttacatataaaaccaccccgctcgggagggggaggcaaataatttatgacatttgcccatcacctgcgcacctgcactcctcaccacccccccgcatttaatgtaatgaatcgaca

SEQ ID NO: 28550 - DNA, 1293 bp, DROSOPHILA
atgattgtcaacatgcccgtcaatggaacgggcagtgcatccagcccaacatcgaatcccagcagcaacaacaacaacaatagcagtaccaccaatcaaaatgatacgaacactaatcttcccggtgattacaactttcttaagcgcaagttcgacgatcaggaggatttggctttgggccacgactacgagcccatcggggcaaatccctggaagaagcgacacttggactacgatgccggggacctgcacttccacctgcagctggaacagccacctagtaatccgccaaccaacgctgcacccgcccaatcctcgacgtccttcatcaacgatctcttttcctatgagagcagtcttctggtgcccgccgtcgcctattcgcactgtccaccatcgagtgctccattggatgacaatggtggttggaccggtggcgagctgctggagctggatcatcgttataactccggcctgcaggcggaactggggcaattgaatgccactttgccgccgccaccaccaacatcatcatcagctcaaaatgcatccaatcatacgcagcagtcaacacaacagaatgtcagtcctggtcagaacccacatcagaatcaacattttctggtgccgcagaagcagcggatacagtcggcgggccgacgcacctcatccggttcggttagtggggccaatgaagccaccgaggcggacttcgaggataagaacctctcgtggctgctcaactttaagttcgacgagttcccgcacctatcgccgcacaatcagattcacggacaggcggtcaatctgccggagggcagtgctccacctcatccaccatcgacggcagtgccgatcgccacgtcgccctgcagttcctcctcgccatcatccgcctccgccgcatcggcatccgcatccgccataagcacaaatcaatctctcggatcgggtttggtggatcaacgggccagatcgcccaagagttgctccagtgcagcgatgccagcggcattaggaggaggaggcaacggctccgctggcgcttcagcagcggggggcgtggccggcgtgggctccaccaagactgggcgcaagttcgaggagctggtgatggaggtcacctcggagttggacggtaacgacatgatagttgccgagcacgttgtcgtcgaggatacttcgtccaaggcgccaaagaaaccaccgttcacctacacggagctcatcgaatacgccctcgaggataagggtgagctgactgtgtcgggcatataccaatggatatcgtaa

SEQ ID NO: 28551 - protein, 426 aa, DROSOPHILA
MPVNGTGSASSPTSNPSSNNNNNSSTTNQNDTNTNLPGDYNFLKRKFDDQEDLALGHDYEPIGANPWKKRHLDYDAGDLHFHLQLEQPPSNPPTNAAPAQSSTSFINDLFSYESSLLVPAVAYSHCPPSSAPLDDNGGWTGGELLELDHRYNSGLQAELGQLNATLPPPPPTSSSAQNASNHTQQSTQQNVSPGQNPHQNQHFLVPQKQRIQSAGRRTSSGSVSGANEATEADFEDKNLSWLLNFKFDEFPHLSPHNQIHGQAVNLPEGSAPPHPPSTAVPIATSPCSSSSPSSASAASASASAISTNQSLGSGLVDQRARSPKSCSSAAMPAALGGGGNGSAGASAAGGVAGVGSTKTGRKFEELVMEVTSELDGNDMIVAEHVVVEDTSSKAPKKPPFTYTELIEYALEDKGELTVSGIYQWIS

SEQ ID NO: 28552 - DNA, 3427 bp, DROSOPHILA
ggcagatgagttggtgatgcgggggatcggattgccggttcgacaggttattggataaggcacgtgctgattcacgatgtgtgtcaccatgtgatgaaaccgacaccctgcaactggggaggctaagcgaagagtgaggtaattcccagccgcactttcgccacgctctgctgagatttagttggtttatttatcagttaatatacgtatttgagtgagttgcgtgtgtatacatatgagttaattggcttaagacctactgaccactagcccgaactttcagttacattgcagttacatgtgtggagtaaatactgtagttcgtacattatcttgtgagcgtatgcgcctacatcttatactcgaaattgaacaattgacactttcggccagcacacaacaatgacatctacaagcgcgtggtattctatgcgtacaaatacataacatatacatatctatgcagtacagaaacaggtacaactatgtggaatgctcggcccagtcttggctggcccttggaatatttacgctagctaatatagagactagtactgtgtggctttcgcttttgcttataaataattgatgcttaggtaaataattgatataatttcattgagtatggtaataccagtgagatttcatcagtgagtaaacaatttgcattcgccaaaagggcgcttttaacaattacaatacagttaatcaaataatacggagagtggaacaatataaaacttatatatatgtacaacagtaaaactgtggaaattctcggggagtgtattctggaatttggttcaaagtgaacacatcgagaaagatgtttgatcgctaatgctaatctcaaaacataaaatcagtcctaacatatttacatggattgctgaacggttcagatagagatacaattacctaataggactaatacaacaagtgtgcgataccaagtacttgctgatctggcacaaagcggagcgacacccgtcgcggatctttatctttccgggaacagggactcatagctgggcggtagatcctttggcgtggcgggttgctgttgctgctgggtatcgtgctcgtgcaggacgctatcatcgtagtgcaccgatggtggcagctcaatggtgggcacatccgactggaaatgtgattggtcatttgttgcccatgcagacttggctctgaagtaagctagctatactcactctgactcgacgctgattgaagcgggcagcggaggcttcgtgcgcccgttgctgcaccgttatgcagttccaatacttccagcagatccacacacaaaaacccacgcccaccatggtaaagatgagcgaggtcagcgccgatatagccacattggccgtatcgatctccggcacaatggcgtcgtgaaagcaggtgccctcgtcgcggcacggatacaggcaattggtgatattgtcccgcacaaaatgacgcgaaatgcacgagtactggtcgttgggctcgcaaaggaagtctccattaaactggcactccgagtgtgccgttagcaccatgcgcagctccaggggatcgcctagtatatgacgcgatcgatcgataaatatgtgcacgttgacgtcgcgatcacgctgatcgaagatcagacgtcccgccgggccatcaatggagatgtccgtgcaaatgcgttcgctgggcgagcgattgccgctgctgaactgaatgtagtcgatgcactccttggaaacggggtcgcgccgaaacttaagccgcgtaatgatagtgtaaatgccgcgtcgcggtcgctcgctggtcaccaccctaaactggcaatcgtacttaatcttgttggccgtatggccgtggggcagtgtcaaattccacatctgcgtcacgatcgctccggaggtgtcctcgaactccagccgcacagtcggatcgccacggaacggcttggccagcgtgtagaacagtttgtccgagcacatgttgtcctggagacgaactggatagtggaaaagctggttattagcatgcgcttgacaggaggatgcacgcactcaccgttcttgtaggcagtgcaaaaggccaccatcatggccagtggccagagtgacccaaatccgatgcagcacttgaccaacatgtcggcacctgacttttcgcgcgtcctcacgtcctgcgtgtatccttgctgttcccacgcgactgtgtccagctagattctcagcgtttgcatttgttgcaaaataagttagaaatttgtttattgcatttagtgtggtgtgaccgccgctggtctgcgcaaatataccaacattaagattattgataaaatataccgtacaggtctgaagactttttaaatacaaaatataccaaattattttgaaaaagtatgttttcaattttttctttatcacatatttttatatcttacaacttaatttaaccaaattcaaaacctgggaaaatgtttggaagcgagggagtattgctttatttagtttatcttagaaataatgagttaaagtttagctctcacagcttcgaaattttcgctcctgtatctccggtacatgctcctccaaaagtccattctttcgccatccggattgctgcacatcttcagctcccgatcgattagcaggcagtcgagttggatgggctcgccattgtgtggcttcttgactggtttccaaatgggcgaaggttttccatcgcgcgcgaagttcgcccacatttcacatagccgttccgtgaccatcaagtcatccctattcatctcggtctcgtcacctgccatctggaacaggtagcaaatatcatcggcatgagccactccacgcaggtcttcgttttggaagatcttcttgtacagattacgaccgcccacatagtccaagcgatagaagtacagaggagattgcgtttggcagctagcgtgaatctccactgcgcgctgcagatccatgctgaaatgatagtcggagaacaggtccaccaggttatccatgttttccttagacagcgcctgcccgttaaagaagaaggctcgtatgtcggaagcagcttcctgtgcctctggagcctgtggatctagcaccagattgcggggaaccaacctggccaagtcatcttcgtaggcctccagtttttgcttcgcctttactacaatagccaacccctcggcggagttgtaacccattatcactggcatactgccgaggcagtcttttttgtgcatcagctccatgatgtcctgctcaagaaaacgatccggactgctgctgtcctccactactggcttgaatgcaaagggcaggtgacgtcgtcgctcatcggggcttaagactttcaatgtgttagccaaaatggcagtgggtgttgccttctctgactgcaggaaggtcaaaagtgctttgctgtcgccgccaaa

SEQ ID NO: 28553 - DNA, 1174 bp, DROSOPHILA
taagatataaaaatatgtgataaagaaaaaattgaaaacacaataaacaaatttctaacttattttgcaacaaatgcaaacgctgagaatctagctggacacagtcgcgtgggaacagcaaggatacacgcaggacgtgaggacgcgcgaaaagtcaggtgccgacatgttggtcaagtgctgcatcggatttgggtcactctggccactggccatgatggtggccttttgcactgcctacaagaacgttcgtctccaggacaacatgtgctcggacaaactgttctacacgctggccaagccgttccgtggcgatccgactgtgcggctggagttcgaggacacctccggagcgatcgtgacgcagatgtggaatttgacactgccccacggccatacggccaacaagattaagtacgattgccagtttagggtggtgaccagcgagcgaccgcgacgcggcatttacactatcattacgcggcttaagtttcggcgcgaccccgtttccaaggagtgcatcgactacattcagttcagcagcggcaatcgctcgcccagcgaacgcatttgcacggacatctccattgatggcccggcgggacgtctgatcttcgatcagcgtgatcgcgacgtcaacgtgcacatatttatcgatcgatcgcgtcatatactaggcgatcccctggagctgcgcatggtgctaacggcacactcggagtgccagtttaatggagacttcctttgcgagcccaacgaccagtactcgtgcatttcgcgtcattttgtgcgggacaatatcaccaattgcctgtatccgtgccgcgacgagggcacctgctttcacgacgccattgtgccggagatcgatacggccaatgtggctatatcggcgctgacctcgctcatctttaccatggtgggcgtgggtttttgtgtgtggatctgctggaagtattggaactgcataacggtgcagcaacgggcgcacgaagcctccgctgcccgcttcaatcagcgtcgagtcagatcggatgtgcccaccattgagctgccaccatcggtgcactacgatgatagcgtcctgcacgagcacgatacccagcagcaacagcaacccgccacgccaaaggatctaccgcccagctatgagtccctgttcccggaaagataa

SEQ ID NO: 28554 - protein, 335 aa, DROSOPHILA
MLVKCCIGFGSLWPLAMMVAFCTAYKNVRLQDNMCSDKLFYTLAKPFRGDPTVRLEFEDTSGAIVTQMWNLTLPHGHTANKIKYDCQFRVVTSERPRRGIYTIITRLKFRRDPVSKECIDYIQFSSGNRSPSERICTDISIDGPAGRLIFDQRDRDVNVHIFIDRSRHILGDPLELRMVLTAHSECQFNGDFLCEPNDQYSCISRHFVRDNITNCLYPCRDEGTCFHDAIVPEIDTANVAISALTSLIFTMVGVGFCVWICWKYWNCITVQQRAHEASAARFNQRRVRSDVPTIELPPSVHYDDSVLHEHDTQQQQQPATPKDLPPSYESLFPER

SEQ ID NO: 28555 - DNA, 2315 bp, DROSOPHILA
tgcttttgcccaaagagttgaactataaataaactgagaatacgccctaaacagtatagtaatcattgagtcttcaacgatctaccacgtcttcaatatgaaattcgccatcgtcctgttcgccctctttgccgtggccctggctgcccctactgtcgaggtcctgcgatcggatagcaatgttggaatcgataactactcatatgcgtaagttcttaaagcgcatagatggcaattcgagtatgtaattccgatgcaacccccttctccgacagagttgaaaccagcgacggtacctcgaagagcgaggagggtgtgctgaagaacgccggcaccgagctagaggccatctcaacccacggctccttcagctacgtgggccctgatggccagacctacaccgtcacctacgtggccgatgagaacggattccagccccagggtgctcatctgcccgttgcccccgttgcctaagttaaggagttgaaataaattgtttataaaagaatactctttgtttggctttcaaaaaagcctggacatgcagtgggggaaaatcatttactatgtctagtagtgaaaaaaaacttaattggtacaaaaatgtgtcttggttaactagttatttaattaattttacggggtacgtggttgctgttacagtttcccagaagcaaaagacgtttgcggcttagtggggcaacatattgaaccaacttttgacgtcacttcatctgcatccctaatcttcgttgccaacaactcagaagtacgaaatgtggaatcgaactagaatttgttttgacttctgtggatttcttaagaacgtataaataattaccgcacacctaactggtttttttttttcaattaaaaatcttgttcaaatcaaccaaatataaatagagggaagatataagaaccatgaaatatagctactccaatttaatttaaagcattttgatttattttaaactctttgatcgatttggaaaacatcttaagcaactggtgccacgggcagatgggcgccctggggctggtatccgttctcatcagccacgtatgtgatggtgaacttctcgccggtcttctcatccacccaggtgaaggatccgtggacgacagcggcctcgttgtcagtgccagcgttcttgaggacaccctcctgtttgatgctggtgccatcgctggtctccacgtcggagctccacttctcgggctcaacatcggagacctgcctcacgatctcggcaaggttggggcgggccactgccatggcgaagagggcgacgaagacgatgaggaatttcatgttggagctgtgtggtgtttgttagaaaacttggaactgtttgatgctctggtgcagatgggtggagacttttatacgactaggaattacgaattgtgagttttaaaagtcaaaggttaagtatggcattgtggctaactgccaaattagcttggacaattgtatgacgattttatttgcatctgttccggtctaactggaaactaaagcaaaggctgcacttcaataacgaagccagtagcccaaattaaggctgaagcagattatgaatctgaatccaaactattgtcgcctaaccagctgggccggtgcatccgcatgcaaacagcttgctaacatattaactaaggccaagatcatgtccacgatttccataaagtcataagaggctagtccggcgctttcgtcctttagtttaaatcataatttttttggagttgatttagagtgagtgcactgtgtaccataaccggtgtacacaaattagatacaattgctttttgatataaaaacaagggagaatgttagagtggagttccccgactatcggatacccgttacgcacctagagtgaatgcgaacgcgaaatttcttcgtttttctgggatatcgatagatattggggaataaattgagaaaaaacttaatattgttcaaaaatgtgggcgtggcagctttgcgcgattttaaggcgttagagttgccgtgataaaaagttctatatcatttgctgcgaaaatgagcgcatcattattttagcattgtttccagtcaaactggacctgatagcttcatactattgtcgcccaaccgtctgcattcaatggctgcgtttggccgaagatgaaagggatgaaagcggtccaccggtcgctgatctttgagcaatcaagagctattatttttcaatctaccttatattattcaaattccgcagaagagttttcttattgctaataatgaaaacggttttaggtagtattgggacactgtggatttg

SEQ ID NO: 28556 - DNA, 315 bp, DROSOPHILA
atgaaattcctcatcgtcttcgtcgccctcttcgccatggcagtggcccgccccaaccttgccgagatcgtgaggcaggtctccgatgttgagcccgagaagtggagctccgacgtggagaccagcgatggcaccagcatcaaacaggagggtgtcctcaagaacgctggcactgacaacgaggccgctgtcgtccacggatccttcacctgggtggatgagaagaccggcgagaagttcaccatcacatacgtggctgatgagaacggataccagccccagggcgcccatctgcccgtggcaccagttgcttaa

SEQ ID NO: 28557 - protein, 104 aa, DROSOPHILA
MKFLIVFVALFAMAVARPNLAEIVRQVSDVEPEKWSSDVETSDGTSIKQEGVLKNAGTDNEAAVVHGSFTWVDEKTGEKFTITYVADENGYQPQGAHLPVAPVA

SEQ ID NO: 28558 - DNA, 2403 bp, DROSOPHILA
taaattgaaaattaatattgttcaaaaatgtgggagtggcagctttgcgcggttttaaggcgttagagtgggcgtgacaacaatttttttggcaaatcgatagaaatttacacaactaataattttatgaaaaaatatccaaacatttttcaaaaatttgggcgtggaagttttgggcggttttaaagcgttagactagccgtggcaaatctatagaattttacaatactaataaatttatgaaaaaatatcgaaacaattttcaaaaatgtgggcgtgccagctttgggcggttttagggtgttagagtgggcgtaataaacctcatacacccattaataggtggggaatcagttctggggttggaatccgttctcatcagccacgtagctgatggcatgcgtctgtccatcgtctcctacgaagctaaaggatccggccacctgcaaggcatcctcctcgggaccaaggctcttcggggagccgttctgctcctgcttggtgccatcgcttgtctcaaacttgtagctatagctatcggcattgacatcggacaccaggtcaacaatctctgcatccggagcggcagcagttaggcacagggcaattgaaatggttttgtagtagtcggaagtagtacttaatattcaaaatgccagattgcaggactcttttttacgattgcagcatcggcggataagacagctaatgtaattagcactttggggcaagtctttaacaattgaactataaagattttctccaaacgcctttcagacaattacaatatattaaaattaaattttgcatataaaccaggcttctaaacttttcgtttaaatttcgatccacatatttattagctcaaactatagatttcaagttttaagcttagcttagccgaaactagttttgattgctgtagcgcgtgcttttgcccaaagagttgaactataaataaactgagaatacgccctaaacagtatagtaatcattgagtcttcaacgatctaccacgtcttcaatatgaaattcgccatcgtcctgttcgccctctttgccgtggccctggctgcccctactgtcgaggtcctgcgatcggatagcaatgttggaatcgataactactcatatgcgtaagttcttaaagcgcatagatggcaattcgagtatgtaattccgatgcaacccccttctccgacagagttgaaaccagcgacggtacctcgaagagcgaggagggtgtgctgaagaacgccggcaccgagctagaggccatctcaacccacggctccttcagctacgtgggccctgatggccagacctacaccgtcacctacgtggccgatgagaacggattccagccccagggtgctcatctgcccgttgcccccgttgcctaagttaaggagttgaaataaattgtttataaaagaatactctttgtttggctttcaaaaaagcctggacatgcagtgggggaaaatcatttactatgtctagtagtgaaaaaaaacttaattggtacaaaaatgtgtcttggttaactagttatttaattaattttacggggtacgtggttgctgttacagtttcccagaagcaaaagacgtttgcggcttagtggggcaacatattgaaccaacttttgacgtcacttcatctgcatccctaatcttcgttgccaacaactcagaagtacgaaatgtggaatcgaactagaatttgttttgacttctgtggatttcttaagaacgtataaataattaccgcacacctaactggtttttttttttcaattaaaaatcttgttcaaatcaaccaaatataaatagagggaagatataagaaccatgaaatatagctactccaatttaatttaaagcattttgatttattttaaactctttgatcgatttggaaaacatcttaagcaactggtgccacgggcagatgggcgccctggggctggtatccgttctcatcagccacgtatgtgatggtgaacttctcgccggtcttctcatccacccaggtgaaggatccgtggacgacagcggcctcgttgtcagtgccagcgttcttgaggacaccctcctgtttgatgctggtgccatcgctggtctccacgtcggagctccacttctcgggctcaacatcggagacctgcctcacgatctcggcaaggttggggcgggccactgccatggcgaagagggcgacgaagacgatgaggaatttcatgttggagctgtgtggtgtttgttagaaaacttggaactgtttgatgctctggtgcagatgggtggagacttttatacgactaggaattacgaattgtgagttttaaaagtcaaaggttaagtatggcattgtggctaactgccaaattagcttggacaa

SEQ ID NO: 28559 - DNA, 335 bp, DROSOPHILA
cttcaacgatctaccacgtcttcaatatgaaattcgccatcgtcctgttcgccctctttgccgtggccctggctgcccctactgtcgaggtcctgcgatcggatagcaatgttggaatcgataactactcatatgcagttgaaaccagcgacggtacctcgaagagcgaggagggtgtgctgaagaacgccggcaccgagctagaggccatctcaacccacggctccttcagctacgtgggccctgatggccagacctacaccgtcacctacgtggccgatgagaacggattccagccccagggtgctcatctgcccgttgcccccgttgcctaa

SEQ ID NO: 28560 - protein, 102 aa, DROSOPHILA
MKFAIVLFALFAVALAAPTVEVLRSDSNVGIDNYSYAVETSDGTSKSEEGVLKNAGTELEAISTHGSFSYVGPDGQTYTVTYVADENGFQPQGAHLPVAPVA

SEQ ID NO: 28561 - DNA, 2645 bp, DROSOPHILA
acgaagacgatgaggaatttcatgttggagctgtgtggtgtttgttagaaaacttggaactgtttgatgctctggtgcagatgggtggagacttttatacgactaggaattacgaattgtgagttttaaaagtcaaaggttaagtatggcattgtggctaactgccaaattagcttggacaattgtatgacgattttatttgcatctgttccggtctaactggaaactaaagcaaaggctgcacttcaataacgaagccagtagcccaaattaaggctgaagcagattatgaatctgaatccaaagtattgtcgcctaaccagctgggccggtgcatccgcatgcaaacagcttgctaacatattaactaaggccaagatcatgtccacgatttccataaagtcataagaggctagtccggcgctttcgtcctttagtttaaatcataatttttttggagttgatttagagtgagtgcactgtgtaccataaccggtgtacacaaattagatacaattgctttttgatataaaaacaagggagaatgttagagtggagttccccgactatcggatacccgttacgcacctagagtgaatgcgaacgcgaaatttcttcggttttctgggatatcgatagatattgggaaataaattgaaaattaatattgttcaaaaatgtgggagtggcagctttgcgcggttttaaggcgttagagtgggcgtgacaacaatttttttggcaaatcgatagaaatttacacaactaataattttatgaaaaaatatccaaacatttttcaaaaatttgggcgtggaagttttgggcggttttaaagcgttagactagccgtggcaaatctatagaattttacaatactaataaatttatgaaaaaatatcgaaacaattttcaaaaatgtgggcgtgccagctttgggcggttttagggtgttagagtgggcgtaataaacctcatacacccattaataggtggggaatcagttctggggttggaatccgttctcatcagccacgtagctgatggcatgcgtctgtccatcgtctcctacgaagctaaaggatccggccacctgcaaggcatcctcctcgggaccaaggctcttcggggagccgttctgctcctgcttggtgccatcgcttgtctcaaacttgtagctatagctatcggcattgacatcggacaccaggtcaacaatctctgcatccggagcggcagcagttaggcacagggcaattgaaatggttttgtagtagtcggaagtagtacttaatattcaaaatgccagattgcaggactcttttttacgattgcagcatcggcggataagacagctaatgtaattagcactttggggcaagtctttaacaattgaactataaagattttctccaaacgcctttcagacaattacaatatattaaaattaaattttgcatataaaccaggcttctaaacttttcgtttaaatttcgatccacatatttattagctcaaactatagatttcaagttttaagcttagcttagccgaaactagttttgattgctgtagcgcgtgcttttgcccaaagagttgaactataaataaactgagaatacgccctaaacagtatagtaatcattgagtcttcaacgatctaccacgtcttcaatatgaaattcgccatcgtcctgttcgccctctttgccgtggccctggctgcccctactgtcgaggtcctgcgatcggatagcaatgttggaatcgataactactcatatgcgtaagttcttaaagcgcatagatggcaattcgagtatgtaattccgatgcaacccccttctccgacagagttgaaaccagcgacggtacctcgaagagcgaggagggtgtgctgaagaacgccggcaccgagctagaggccatctcaacccacggctccttcagctacgtgggccctgatggccagacctacaccgtcacctacgtggccgatgagaacggattccagccccagggtgctcatctgcccgttgcccccgttgcctaagttaaggagttgaaataaattgtttataaaagaatactctttgtttggctttcaaaaaagcctggacatgcagtgggggaaaatcatttactatgtctagtagtgaaaaaaaacttaattggtacaaaaatgtgtcttggttaactagttatttaattaattttacggggtacgtggttgctgttacagtttcccagaagcaaaagacgtttgcggcttagtggggcaacatattgaaccaacttttgacgtcacttcatctgcatccctaatcttcgttgccaacaactcagaagtacgaaatgtggaatcgaactagaatttgttttgacttctgtggatttcttaagaacgtataaataattaccgcacacctaactggtttttttttttcaattaaaaatcttgttcaaatcaaccaaatataaatagagggaagatataagaaccatgaaatatagctactccaatttaatttaaagcattttgatttattttaaactctttgatcgatttggaaaacatcttaagcaactggtgccacgggcagatgggcgccctggggctggtatccgttctcatcagccacgta

SEQ ID NO: 28562 - DNA, 312 bp, DROSOPHILA
atgattactatactgtttagggctactacttccgactactacaaaaccatttcaattgccctgtgcctaactgctgccgctccggatgcagagattgttgacctggtgtccgatgtcaatgccgatagctatagctacaagtttgagacaagcgatggcaccaagcaggagcagaacggctccccgaagagccttggtcccgaggaggatgccttgcaggtggccggatcctttagcttcgtaggagacgatggacagacgcatgccatcagctacgtggctgatgagaacggattccaaccccagaactga

SEQ ID NO: 28563 - protein, 103 aa, DROSOPHILA
MITILFRATTSDYYKTISIALCLTAAAPDAEIVDLVSDVNADSYSYKFETSDGTKQEQNGSPKSLGPEEDALQVAGSFSFVGDDGQTHAISYVADENGFQPQN

SEQ ID NO: 28564 - DNA, 2419 bp, DROSOPHILA
tagatttcaagttttaagcttagcttagccgaaactagttttgattgctgtagcgcgtgcttttgcccaaagagttgaactataaataaactgagaatacgccctaaacagtatagtaatcattgagtcttcaacgatctaccacgtcttcaatatgaaattcgccatcgtcctgttcgccctctttgccgtggccctggctgcccctactgtcgaggtcctgcgatcggatagcaatgttggaatcgataactactcatatgcgtaagttcttaaagcgcatagatggcaattcgagtatgtaattccgatgcaacccccttctccgacagagttgaaaccagcgacggtacctcgaagagcgaggagggtgtgctgaagaacgccggcaccgagctagaggccatctcaacccacggctccttcagctacgtgggccctgatggccagacctacaccgtcacctacgtggccgatgagaacggattccagccccagggtgctcatctgcccgttgcccccgttgcctaagttaaggagttgaaataaattgtttataaaagaatactctttgtttggctttcaaaaaagcctggacatgcagtgggggaaaatcatttactatgtctagtagtgaaaaaaaacttaattggtacaaaaatgtgtcttggttaactagttatttaattaattttacggggtacgtggttgctgttacagtttcccagaagcaaaagacgtttgcggcttagtggggcaacatattgaaccaacttttgacgtcacttcatctgcatccctaatcttcgttgccaacaactcagaagtacgaaatgtggaatcgaactagaatttgttttgacttctgtggatttcttaagaacgtataaataattaccgcacacctaactggtttttttttttcaattaaaaatcttgttcaaatcaaccaaatataaatagagggaagatataagaaccatgaaatatagctactccaatttaatttaaagcattttgatttattttaaactctttgatcgatttggaaaacatcttaagcaactggtgccacgggcagatgggcgccctggggctggtatccgttctcatcagccacgtatgtgatggtgaacttctcgccggtcttctcatccacccaggtgaaggatccgtggacgacagcggcctcgttgtcagtgccagcgttcttgaggacaccctcctgtttgatgctggtgccatcgctggtctccacgtcggagctccacttctcgggctcaacatcggagacctgcctcacgatctcggcaaggttggggcgggccactgccatggcgaagagggcgacgaagacgatgaggaatttcatgttggagctgtgtggtgtttgttagaaaacttggaactgtttgatgctctggtgcagatgggtggagacttttatacgactaggaattacgaattgtgagttttaaaagtcaaaggttaagtatggcattgtggctaactgccaaattagcttggacaattgtatgacgattttatttgcatctgttccggtctaactggaaactaaagcaaaggctgcacttcaataacgaagccagtagcccaaattaaggctgaagcagattatgaatctgaatccaaagtattgtcgcctaaccagctgggccggtgcatccgcatgcaaacagcttgctaacatattaactaaggccaagatcatgtccacgatttccataaagtcataagaggctagtccggcgctttcgtcctttagtttaaatcataatttttttggagttgatttagagtgagtgcactgtgtaccataaccggtgtacacaaattagatacaattgctttttgatataaaaacaagggagaatgttagagtggagttccccgactatcggatacccgttacgcacctagagtgaatgcgaacgcgaaatttcttcggttttctgggatatcgatagatattgggaaataaattgaaaattaatattgttcaaaaatgtgggagtggcagctttgcgcggttttaaggcgttagagtgggcgtgacaacaatttttttggcaaatcgatagaaatttacacaactaataattttatgaaaaaatatccaaacatttttcaaaaatttgggcgtggaagttttgggcggttttaaagcgttagactagccgtggcaaatctatagaattttacaatactaataaatttatgaaaaaatatcgaaacaattttcaaaaatgtgggcgtgccagctttgggcggttttagggtgttagagtgggcgtaataaacctcatacacccattaataggtggggaatcagttctggggttggaatccgttctcatcagccacgtagctgatggcatgcgtctgtccatcgtctcct

SEQ ID NO: 28565 - DNA, 419 bp, DROSOPHILA
gcatcaaacagttccaagttttctaacaaacaccacacagctccaacatgaaattcctcatcgtcttcgtcgccctcttcgccatggcagtggcccgccccaaccttgccgagatcgtgaggcaggtctccgatgttgagcccgagaagtggagctccgacgtggagaccagcgatggcaccagcatcaaacaggagggtgtcctcaagaacgctggcactgacaacgaggccgctgtcgtccacggatccttcacctgggtggatgagaagaccggcgagaagttcaccatcacatacgtggctgatgagaacggataccagccccagggcgcccatctgcccgtggcaccagttgcttaagatgttttccaaatcgatcaaagagtttaaaataaatcaaaatgctttaaattaaat

SEQ ID NO: 28566 - protein, 104 aa, DROSOPHILA; identical to SEQ ID NO: 28557

SEQ ID NO: 28567 - DNA, 2377 bp, DROSOPHILA
tatttttaaggaacataacaattggttttattctttatttaaactgagctacgataaaaggttattcagtattatggtttctgagcctatttcgatttaatgacttgtttttccaattgatttctagttttcaactagaagacctttttaattaccatcatacaccgatttataggtggggaatatcctcgccctggggttggaatccgttctcatcggccacgtagctgatggcatgcgtctgtccgtcgtctcctacgaagctgaaggatccggccacctgcaaggcatcctcctcgggaccaaggctcttcagggagccgtgctgctcctgcttggtgccatcgcttgtctcaaatttgtagctatagctatcggcattgacatcggacaccaggtcaacaatctctgcatccggagcggcagcagctaggcacagggcacttaaaaggcaggcgagcacaaggatggatttcatcttgaatagtcaaaaattactcaatattcaaaatgccagattgcaggagtcttttatacgattgctaagacagcttatgcaattagcactttgggacaagtcgttaacattatatagccgacgcgatctgaggacagcaggtgttaattgaacttctgttcaatttatttattaaaaatctaatactcaaaaagaaaattcaagattttttaataagcggaataaagttgtaaaacaattaaactctaaagattttctccaaacgcctttcagacaattacaatatattaaaattaaattttgcatataaaccaggcttctaaacttttcgtttaaatttcgatccacatatttattagctcaaactatagatttcaagttttaagcttagcttagccgaaactagttttgattgctgtagcgcgtgcttttgcccaaagagttgaactataaataaactgagaatacgccctaaacagtatagtaatcattgagtcttcaacgatctaccacgtcttcaatatgaaattcgccatcgtcctgttcgccctctttgccgtggccctggctgcccctactgtcgaggtcctgcgatcggatagcaatgttggaatcgataactactcatatgcgtaagttcttaaagcgcatagatggcaattcgagtatgtaattccgatgcaacccccttctccgacagagttgaaaccagcgacggtacctcgaagagcgaggagggtgtgctgaagaacgccggcaccgagctagaggccatctcaacccacggctccttcagctacgtgggccctgatggccagacctacaccgtcacctacgtggccgatgagaacggattccagccccagggtgctcatctgcccgttgcccccgttgcctaagttaaggagttgaaataaattgtttataaaagaatactctttgtttggctttcaaaaaagcctggacatgcagtgggggaaaatcatttactatgtctagtagtgaaaaaaaacttaattggtacaaaaatgtgtcttggttaactagttatttaattaattttacggggtacgtggttgctgttacagtttcccagaagcaaaagacgtttgcggcttagtggggcaacatattgaaccaacttttgacgtcacttcatctgcatccctaatcttcgttgccaacaactcagaagtacgaaatgtggaatcgaactagaatttgttttgacttctgtggatttcttaagaacgtataaataattaccgcacacctaactggtttttttttttcaattaaaaatcttgttcaaatcaaccaaatataaatagagggaagatataagaaccatgaaatatagctactccaatttaatttaaagcattttgatttattttaaactctttgatcgatttggaaaacatcttaagcaactggtgccacgggcagatgggcgccctggggctggtatccgttctcatcagccacgtatgtgatggtgaacttctcgccggtcttctcatccacccaggtgaaggatccgtggacgacagcggcctcgttgtcagtgccagcgttcttgaggacaccctcctgtttgatgctggtgccatcgctggtctccacgtcggagctccacttctcgggctcaacatcggagacctgcctcacgatctcggcaaggttggggcgggccactgccatggcgaagagggcgacgaagacgatgaggaatttcatgttggagctgtgtggtgtttgttagaaaacttggaactgtttgatgctctggtgcagatgggtggagacttttatacgactaggaattacgaattgtgagttttaaaagtcaaaggttaagtatggcattgtggctaactgccaaattagcttggacaa

SEQ ID NO: 28568 - DNA, 309 bp, DROSOPHILA
atgaaattcgccatcgtcctgttcgccctctttgccgtggccctggctgcccctactgtcgaggtcctgcgatcggatagcaatgttggaatcgataactactcatatgcagttgaaaccagcgacggtacctcgaagagcgaggagggtgtgctgaagaacgccggcaccgagctagaggccatctcaacccacggctccttcagctacgtgggccctgatggccagacctacaccgtcacctacgtggccgatgagaacggattccagccccagggtgctcatctgcccgttgcccccgttgcctaa

SEQ ID NO: 28569 - protein, 102 aa, DROSOPHILA; identical to SEQ ID NO: 28560

SEQ ID NO: 28570 - DNA, 2746 bp, DROSOPHILA
caaaccaatcctatccctgttttcaaaggatgggaactaagtcaaccagcaccacttgttaaatattaaaggaatttaattacctgaacttatgtgtgtttgttttcataaaattcataattattttatttttcagaagaagtcgaaattaagttttgaatacaattagcttttgattaacatatggggaaggtcgtagtcgaaaaagaaccgactgattatagatattcgaagaatagaaactggtcacagcgtgtatacgtgaccgctgcacgattaaatgtttgtaaaatactctgatatttgatatagaatactctgatatgtagaatattccatgcttgttggattgctgattgatattttctattaataattaatgtatataccaatagtagtgtacacaaagcatttgctgaggctttacttattcaaacattagatgataatatgagaaatgacaatggcaaaatcacaatgcacaataataaaaagttcgaatacagaactttatgcatctcgactagaagacatcgtttaaacctgagtttatatgtatatagcaaatggtgatcgtgtactgttttttatacaaattttcaccgttctatctgtttgtttcaaacaaacatgttcacgattagcttaattaaccaataagatttgagaattcaaaggtgatggcaaggtaaggcgtcattctgtctatcaattgactgtcgacaaggtaattgcatacattaccatctgttggatatacctgcatgcacgattagtgcagggtacttagagtgttaatctgtaattaaaatgtgttttattgaatgtttgcattatagctgatttctttatttttaatttgttttattattttgcatttttcgccgatgaggacataatccagagatttcgtataaaagggcatcagatgatcgcatcgcagctcagtaaagtgcagctagctgtgacggagactctgaaaaactaattctttccgcaatgcaatcgaatttcatgtggctggtagccttcctggcaattggtatctgtttggcctttcccgctggtgaggatgcccaggcggagaccatcaaactggagagcgaaaacacgggcgataaatattcctttgcgtaggtattgcccagaaatgatttggacataatgcatttaattgtaaaattttttaaccttaaactgagatactattactattttgcgtagaaacggcttgactattgaaactgatgtatataaatatgtacacatatataaactttatttagttgcacatgtctccctcactgcgttgcaaacttctgactgatatcagaggtataagcctctgcaagggcaaaattaaagagggtagctttgaaatgcttagttgtaacaggtgtttaattattcgatgttcctatatacaatttcaatcaataattaatttattaaaaacaattaacatcgaattccagctatgagacgagcaacggaatctcacgcactgagaccggtgaggtgaaacctggagccggcgaagaggatggttccttgtctgtccagggatcgaccagctggtcagctccagatggcaaaaaatacgagattagtttcacggccgacgaaactggctaccatcccaagttcaggctagtagcctaggagatacctggatgtataatgattccggatgcgaataaataagttgactttatttatccaatgtaaaagattcgtagaattagaaaagtaaatagaaaaaatgtatatatttgaggaagctcccgagttttattgacgtcactaagactggctggattattataaatataataaagctcaatgaattgttaaaaatttgaataatgaaatatttatgaacgcgattctttttggactatagtgttattaaaattttatattaggccttttaatgctcctacttcaaacgaaaatgaaatccaaaccagacatttcacattaacattgattttgctcattatgtcttgtacacgtttgactagttcggccgcgctttgaataatcgccaagagggtgccatctataaaagggtttacgcggccgtccatagttaccattcgacttgaactgttcgatagccgcagatctaagcaccaaacaacaatcaccatgaaattcctgattgtcttcgtcgccctcttcgccgtggctctggctgctcctgccgctgaggaacccacaatcgtgcgctctgaatccgacgttggacccgaaagcttcaaatacgagtaagttgcctatgagaaatgacccaaaaggatacctagctgacactgacttccttcttagctgggaaacctccgatggacaggctgctcaagctgtaggtcagctgaacgacattggaactgagaacgaggctatctctgtgagtggatcctaccgcttcattgctgatgatggccagacctaccaagtcaactacatcgccgataagaacggattccagcccgagggtgctcatctgcccgttgcccccgtggcataagtgaagttgctttcactgtaagcagctttaaacccaccaattctgcaacactctttgttatcttccccaacacttacctactttcggttttcccttttaaaagggaaagaatcctaagttacagaacgcagtttgttgaatattaaaaaatgtagattttatatgaattcgttttattttaaatgtgcttttcgctcaaaaggtcggaaacgtcgt

SEQ ID NO: 28571 - DNA, 404 bp, DROSOPHILA
tgcaatcgaatttcatgtggctggtagccttcctggcaattggtatctgtttggcctttcccgctggtgaggatgcccaggcggagaccatcaaactggagagcgaaaacacgggcgataaatattcctttgcctatgagacgagcaacggaatctcacgcactgagaccggtgaggtgaaacctggagccggcgaagaggatggttccttgtctgtccagggatcgaccagctggtcagctccagatggcaaaaaatacgagattagtttcacggccgacgaaactggctaccatcccaagttcaggctagtagcctaggagatacctggatgtataatgattccggatgcgaataaataagttgactttatttatccaatgtaaaagattcgtagaattaga

SEQ ID NO: 28572 - protein, 36 aa, DROSOPHILA
MVPCLSRDRPAGQLQMAKNTRLVSRPTKLATIPSSG

SEQ ID NO: 28573 - DNA, 2566 bp, DROSOPHILA
gcgtaggtattgcccagaaatgatttggacataatgcatttaattgtaaaattttttaaccttaaactgagatactattactattttgcgtagaaacggcttgactattgaaactgatgtatataaatatgtacacatatataaactttatttagttgcacatgtctccctcactgcgttgcaaacttctgactgatatcagaggtataagcctctgcaagggcaaaattaaagagggtagctttgaaatgcttagttgtaacaggtgtttaattattcgatgttcctatatacaatttcaatcaataattaatttattaaaaacaattaacatcgaattccagctatgagacgagcaacggaatctcacgcactgagaccggtgaggtgaaacctggagccggcgaagaggatggttccttgtctgtccagggatcgaccagctggtcagctccagatggcaaaaaatacgagattagtttcacggccgacgaaactggctaccatcccaagttcaggctagtagcctaggagatacctggatgtataatgattccggatgcgaataaataagttgactttatttatccaatgtaaaagattcgtagaattagaaaagtaaatagaaaaaatgtatatatttgaggaagctcccgagttttattgacgtcactaagactggctggattattataaatataataaagctcaatgaattgttaaaaatttgaataatgaaatatttatgaacgcgattctttttggactatagtgttattaaaattttatattaggccttttaatgctcctacttcaaacgaaaatgaaatccaaaccagacatttcacattaacattgattttgctcattatgtcttgtacacgtttgactagttcggccgcgctttgaataatcgccaagagggtgccatctataaaagggtttacgcggccgtccatagttaccattcgacttgaactgttcgatagccgcagatctaagcaccaaacaacaatcaccatgaaattcctgattgtcttcgtcgccctcttcgccgtggctctggctgctcctgccgctgaggaacccacaatcgtgcgctctgaatccgacgttggacccgaaagcttcaaatacgagtaagttgcctatgagaaatgacccaaaaggatacctagctgacactgacttccttcttagctgggaaacctccgatggacaggctgctcaagctgtaggtcagctgaacgacattggaactgagaacgaggctatctctgtgagtggatcctaccgcttcattgctgatgatggccagacctaccaagtcaactacatcgccgataagaacggattccagcccgagggtgctcatctgcccgttgcccccgtggcataagtgaagttgctttcactgtaagcagctttaaacccaccaattctgcaacactctttgttatcttccccaacacttacctactttcggttttcccttttaaaagggaaagaatcctaagttacagaacgcagtttgttgaatattaaaaaatgtagattttatatgaattcgttttattttaaatgtgcttttcgctcaaaaggtcggaaacgtcgtttttttttaaaggcgattatttgaaaatattttgttaagttgttcagataaatagaactagattcttatggcaaacaacggacctaattaaaggtttttttccattaagcaattcttaagaagtgtaaataagtattttgaaagaataggtatttttttcatttagaaaattattaattaaaaaaaaaaacattttagaactgaaaatacaattttttattatgtattttattactctaaccgctaacatacccagtcgtcttcaggctttattaggtgttcttattacatgaacattattaaaaaagaaaaagtttttgggcccttataataatattaaaaaagaatatatttttcctatttttaacttatcttaacaaaatcaaacgaaaatttccagtatgccttaataaaataaaaacaaaaagttctcccaaatgcatagtcggctttgcggatttaaagtgcatagtttaatcataaaagactcttaagcttactttcaggctatagctattcagattgcattgaaatcgaatgacttaggcaacgaactttttaaatcccttgcatacttttgggggctaaatgctaattaccagtatcttcgtgatgcgtctctttagacgcgaatcatttatgctcgtattgaaagacaactgttatagcaattaatatgcaaattttagcatacaacatcagtcattgccgaacttgacagcaatatttcaattacaattgacttgcagtatccggcagaagataagctcactgctgattgccgatcgatgaaaatagagaagtgcaaacatcttcctcattgcattcgaatttgctcatcaagcaggtcaaatgcctggctatcgatgagactcaacaagttggattgcaaatacattggggtcgattaattattaacagatacaaatcggcatgaactacccttcaggc

SEQ ID NO: 28574 - DNA, 505 bp, DROSOPHILA
agcaccaaacaacaatcaccatgaaattcctgattgtcttcgtcgccctcttcgccgtggctctggctgctcctgccgctgaggaacccacaatcgtgcgctctgaatccgacgttggacccgaaagcttcaaatacgactgggaaacctccgatggacaggctgctcaagctgtaggtcagctgaacgacattggaactgagaacgaggctatctctgtgagtggatcctaccgcttcattgctgatgatggccagacctaccaagtcaactacatcgccgataagaacggattccagcccgagggtgctcatctgcccgttgcccccgtggcataagtgaagttgctttcactgtaagcagctttaaacccaccaattctgcaacactctttgttatcttccccaacacttacctactttcggttttcccttttaaaagggaaagaatcctaagttacagaacgcagtttgttgaatattaaaaaatgtagattttatatgaa

SEQ ID NO: 28575 - protein, 105 aa, DROSOPHILA
MKFLIVFVALFAVALAAPAAEEPTIVRSESDVGPESFKYDWETSDGQAAQAVGQLNDIGTENEAISVSGSYRFIADDGQTYQVNYIADKNGFQPEGAHLPVAPVA

SEQ ID NO: 28576 - DNA, 9863 bp, DROSOPHILA
caattcatttcaattgagaacatgtcgccaagaatttttgttgttgattgaccccaaaatgagactcttatcaatttgccgagcaaagaaagtgaaatgcactagaaagcattgggtgagacaacgcaagagaggaagctgagtgccccacaattttcatgggaaaaccattttcaattgcgcactgcaatgcggctcaattaaatgtcaatttcaattgtaaaactgtagccaagcggaaacgcttgcctgtcagttagcagtttgcatggacaagtgtaaaatgcgcaaataaatcagccatactggccataaataaatctgaccaaagaaccttgcgtaattaacccaagacctcgcgttccccaacctatgaattttcccttcttaggcagagataactgactggctgtctatatggcgcatatagcacctgccaatccgagaaaaacccaagcgaaccgaacctcttcctcgaaaatggcggccaagttcaatagaacttttgattcggaaagacctggcacaaaaataaaagtattttcccaactataagatacccagttttaggattgtcccaattctttgccaaatgctttgtcataaaacgaaagttctgaattttattttcaaatatattgtggaaattccaaacattattttaaaagaacagctgatatgtgcgaacaattaatattcaaagaaaaatgtgaaatctatatatctcataccaaaaatatatgcataactaatttatttgattaagatagcaaagataattttcccaaattaccaagtaggaaaatttaccacatacccgtgaatttttcagctagcgggtatgaaaatttcgcacgattttcccgccatcatcggcgtggctagaaaaacccgagagaagacgaaagacgaaaagccgagcgccgaaaaagcaccgacagtttcggtggcaacgtcaaggcattcgcacgatccgaacagaaactgggcgatcgggctaagagattgacgtaaaggagattccgctgtatcttcaagatacttatttggtgcagatttttccggttaatgtgaaatacaaacaatcttaatacaaattaagtcgcaatcccatcgtatttccagttaattgcagttaattattaagccaaatagattttggtaagtgacttttcgaaaggggtaaacgaacttatcaaccgtgggattccttcaaataaccggtttcggttgcatcagaattttgtgaaccgattagattttgaaaggtctcaaaaatgtgtatatgtaacaattagtttgctgtgccattgacattcaacaataaaaccatattgcgacttagtgaaggaaaataaatactttaaaaatgaaaatgcatcacaactgttaaagaacacagatcaaatacaaaaacattttcttattaataatttagtactgtacagttttatggtgatgttcttatataaaggtcagcccttcaaaagggcgtaccattcaagttatatcacttacttatatcatgagttcgatagatcaccttcctctgggaaaagagattcatttggggacaatgaaattgctttgaatatgcctaattattcacgaattcaaagcgatcgcagattatgaacacaatattgtccgccgatttcattagcatatactaattcagaatttcccgcacaagcccctagctaatcaaattgttgccatattctataatctgattaaatcagcgaactgaacgtatcattcacaactcagtttgcaatcatctggatgggttgttagcatctcgattatcattcgattggagcgtgttggatcgaatcagctgagatgagtggacacggtagtatctggatggaattctacgcctttggcttattacaatgccctgttcactgttcagacgatcccccataaattcagcgcccttctccaaactatctaacctgtctcgtccacgtgcggaccatagaaattccgactgttctgatccccagatcacccagaatcgccagattcgccagtccagacgtcgcgacgcggcgcttgtggttttgtctgtctgtcagtagtctaaacactggacagggctccagtcggaaaatgtgcagttccaacaaaagataatgtatctgcattgcaggaaaaataaatggataaaagcgaatgaactaagatatattgatattatatatatcagattaagtatgttaaaagatttaatattatagggcttgcttctgtttctcgatagaatagaatcaatagaacttgtaggattaaagtaaaatcgatatatattatagcatatttgtgctcagtgtatgccctcgcagtgcggcgctgtctggctttacaaaacgggtgcacttgcaacttagttgtccccggcatcagtttacacggcactcactccagactttagactcggcagcggtgatgggctcatcaaaatctgtggcgttgtcaactgaatggcggcgcgtggcagcggccaagttagcaattttcgcgttacctgaatcgaaagccatggaaaagcgaacacacggccaaaatgattttgcagcgttgacgatccgtgcggattcattcagtgattcccacaatcgttggggagtgaattgaattggttatccaatatgctaatgatggcattatttcctgaataacacacgtggcacgttcggtgatcgacatgcctctatattccacttaatgccacatgtggcgttcggaattctacgaaagattatgaatttgttgtggaggaattgagcagtgtagacataataaaatatatagcaagaatgtgggttatattcaagtgtttacttcgtgcgcatatatattttaaatggatgaacaatagaaattattggcagccatcaaaagtttccgtttccaatggaaaatcattaataatcgtgaaaataagtaaatatacgctggaattatggaaaagtttttagagaatttgtgggtggtttctatttagttcataaatttccaaaattgatgtgctacttacttattgttgaaaaaagaaattagcaagatcaatactttcttcatttttacccattaaatttcctcggttgtatggaaaatttaatcgcggctagactaagaattatcttatcagagaaaattatatagaactccgctgattgaacttacgttcttaatatgccaaaagctagacacgcatatctaaatattgatctcataaatatgctgacaatcttatcaatattcttcacttggcgacaagcgaaagtttaggtgcggacggcatgtgtaaactatttactccgactaagttttgattgatcaactgacaaacatacatacataagtgcatatgataattttgtcagggctatgaaaacaatggcactacttagctcggtagcgcacagtgaggatttatatggatacatatggatatggaaaacaaaacaactgtgtttgcacagcgataatgataatagcgttaatcgagttaagtagttaaatgagacgcaaagacgtcagtgcgatctcatcacaacctttccccacttttatgctccccgcgctattttggatctcaagtttgcatttagctttcctgacatgccgctaatgcgtcagttgaggtttacttcgaacttttcagttgtatctgtctatatactgtgtctactatatagtagtatacccatgatattgacagctttgttgtgggttgcagccttccatgagggcaagtcaattaagttctgttatggattacctttaatatgtttaaaaatataaacctactactatggcatcgattgatgtgttgaggctgactcttttccttaaatcttgattgctgtttattttcacagcgaactgaaatggaaatgagtgaaatgaaagaatttccgttagtacttgtgatatttttttcgaatttgcaattccaaatgtttacactgggcctttaaataattgcttatagctcactgggttagtcacacatccgaaagcattacttcattaagagtcttccaaacaggtgatttgcaatgatttgcttgaaaattcaactatatctgcttaaaggtgctatttaaataagctttaaaaaaggtgcgcaaggtgtaattaaaattgttttacaaaaatagctcagttgccaggcatttcagttaaatgacctacgttacagtacttggaactgaaatttttactgaaaattcattaatataaatactcaatgccataagttctaggcccctccatgtgtcataataattaagtgttttgtcataaaaaattccatgtcttaagattattaatcgcaattaagactataacacttattatactatgaataattaggaaaaagattattagaatatggaaatatctattgatagatcgatgatggatttctcagaactttattacgaaccttccatacttcaacaaaaggccaccagccaattggcgatcgtatatcatatcgcatatccaaccagtaattgccatgatcaacattttgtgacaaaataagccaataataataagcgcgtgcgcctgctcagtgatgtccattataatccaaaataaacagaataaactccagactccttactatatgtcggcagaaatcagacaaatcacgagacttgcgaccatttggataaataaagaaagatacgaattaataatgcgttgaccgaatgtctgagaaaatgtttggatcaatatcaaattcactaatgagttggtttcctttttttcagttcttcaaatgggttgacttgtgatattgctgcttcctggacccgggaaacaaaaggtaagacttatgtttataacacgtttttacacctgttataagcatcaaattagtcgtaaattaataccaaatatccatataaatatttgcgttttcatataaccaaaagtcacgagaattttgctatacatttagaaacaatcagagaaaacaatacgcattcgataaaaatttttaattgtatcagcgtgccgactgattgatgttaataccattcagaattgttcaaaaatttgcaaagaaaacaaaatgctcgtatagtgtactaatactgatggtttggaatgtttgccccacgtgtccgatgtacacaaatgcgtattgtttacgccagattataatagtactggtttaatttggaatttccgattagaatttccaatttacattatggattaagcaagatcttcaatgtgcttttggcattggctttgaaattgtaatatttatagacgccagagcaatttgcctttttgtaatcataatgttgtttattaattaactaaggacagaccccacaagacaggctaactaactgattgaaagttttccgctgtttcccagcttcaccttcattgcgctcttgtggattattttattatgtagatttttctgcaagatctgtagaggcacctgcttatctttgttcgcacactgcttaccatttgcccagctgctgttttagccatatagcaattcggccactcgacgagttctattcgagccataaaaataatttattagttttacaaatgcttaaatttgtttacctctctctcgctctctggatttgcaaaaaaaaaaaaaaaagaaatttccttcgccaaatgtagcgaaagtgtgagataaacgcttgggattacgagtatggaatcagatcagggaaagtgtgttaatattggaaatggttcaagggcggaactttggaagattccggtacggtttataatatttaatgagtgtgtagtaataaacacaaatcattagatttgtttgtttagtaaatatttacatcgatgaatggatgttattgtatatgggcatgcataaatattccatcgagacgtcatagtctctgctttatgagcatattttcaaatatattaattatggttgttcttttccagggatacaaattgaacctcaaaagacatagccaagctgcaataaaaccatcgccaaaccaccgccgccatttaaagtcaatagttagcacgaatataaccacctagaaaccgttggaatctctgcttgaaagcagcgcaccacccatgaaccaatcggccaaggcgctcaacagcgtggccaccgagatcagcacctcctgctcctccagcaccttcaccaaccatccacagaaccacctgcacactggccacctgattgcccatcgtcttggacactcctacgccgctcgtgccgatcacaattatctgggataagttctgcaattggaatctgactggtgaaacacgtttctcgagaggattttccatttttgcatcgtagcagcttcacgacggccggcacaatgttaaaagtcgttggtgcatcgtggcaaaaaacgcggatagggacctacatcctaatcggtgctggtctcttggtcatcggagccttcttcattggatatatggagaggccggagtacgatggcacctactgtgccaccgctctgtggaccaagcaggtgggcttccagattgaaaactggaagcagcagaatgatctggtcaacattcccacgggtgttggcaggatttgttataaggattcggtttatgagaatgggtgggtgttaaagcacataacaattcgcttatcatgattctaatatgccattgttattccgtagttgggcccaaatcgaagtggagacgcaaagaacttatccggattgggtgcaggcctatgccgccggaatgctggagggctcgctgacctggaggaacatctacaatcagtggtccaagtaagataactctatatctattttttcttgatattaatatatatttttttacgatttcagtaccatttcctcttcttgcgagcgcgatgaaagcacccagaaattctgcggttggctcagggaccttttgaccaccaactaccatcgcctgaagaggcagactgaaaaggctgagaatgatcactactggcatcagctgcatctgttcatcacccagctggagggcctggaaactggctacaagcgaggagcatcccgggcacgatccgacttggaggaggagataccattttccgattttctgctgatgaacgccgctgccgatattcaggatctcaagatctattacgagaactatgagctgcagaatagtacggaacataccgaggaacccggaacggatcagccaaagaacttctttctgccgagtgccaccatgctgacgaagatcgtccaggaggaggagtcgccgcaggtactacagttgctctttggtcacagcacggctggaagttactcctccatgttgagaatccagaagcggtacaagtttcactatcacttctcgtcgaaactgcggagtaacacggtgcccggtgtggatatcactttcactggttatcctggcattctcggatccaccgatgacttctacaccatcaagggtcgtcatctgcatgcaatcgtaggaggagtgggcatcaagaacgagaatctgcagctgtggaagacggtggatccgaagaagatggtgcccttggtggctcgtgtaatggccgccaatcggatatcccagaatcgtcagacttgggccagtgccatgtccagacatccatttacgggagccaagcagtggatcaccgttgatctgaacaagatgaaggtgcaggataatctgtacaatgtccttgaaggcgatgacaagcatgacgatgctccagtagtgctgaacgaaaaggataggacagccatccagcagaggcacgatcagctaagggatatggtttggattgccgagcagctgccgggcatgatgaccaaaaaggatgttactcagggattcctggtgcccggcaacacgtcctggctggccaatggagtgccgtatttcaaaaatgtcctggagctaagcggcgtcaactacagcgaggatcaacagctgacggtggccgatgaggaggagctgaccagtctggcgtcggtggataagtatttgcggactcatggattccgtggtgatctgctgggcagccaggagtcgattgcctatggcaacatagatctgaaattgttctcctacaatgcccgactgggcatcagcgatttccatgcctttgcgggtccagtctttctgagattccaacatactcagcccaggactctggaggatgagggccaggatggtggtgttccacccgccgcatccatgggcgacgaacggctcagcgtgagcatcgaggatgcagatagtctggcggaaatggaactcatcacggaacggcgatctgtgcgaaatgatatgagagccattgccatgcgaaagattggcagcggacccttcaagtggtcagagatgagtcccgtggaggagggcggtggccatgaggggcatcctgatgagtggaactttgacaaggtctcgccgaagtgggcgtggtaggcgctgaggagcaggtttcttcttttaacccgtagaacccaatcgaatttgtacccaaaacccacctccatccattttgaaaactggaaagcaataattgtcctagatttggtaattagtgtcctgtcttgtctcgtataatttgtgtgttcctagttggtacatatcttacgtccatagtcttctagtgtctactgtacttatgtatgtatgcgtgtccaatcgattattgtcttccagctgtacagctttttattttccgtaggtcttttgtaaattagcaacgaaattggaaatatattttttagcaacaaatttttgtactttagtaactattaacaaattgtaaagaaaataaaaacaaaatcatgaaaaacaacagaatgtgtttgaattccattactgcaaaggtcaataatgattttggaataaatttgcattttttattagacttcatgtaaattactaatctaatttttgtaacttttgaaaagtttgtgcttagctaaggcaaaaaccaatcaagaactatttaagccaaaagctttgccgagagcttttgaaatagaattggtaaatgttccatctaattaaattaatatgatactacctaatgccaacaattttaaaataccgcaagcgcttaaatattttatattgatttattgaaaatataaaaaggtaaatgtttaataagtaatgatatttttgatctataatctatgtaaaagtaacactaccaggtatacttaacacaagtttatattaacatgcgttatacattttaattgtttagcactgctctaattggccagcccaagttaactcctccttttgcttactttactttacagttactttcattgggggccttcctattggccctagtcgatttgccaatcagctttggccacacccctttgccaacttttaattggtcagttcgtttccgctcctttttgctatcaaatttaaagttaattaatcaggttactttcacttttaaatgtaaataacaaatactttagaaaaatattaaagaagctgatcaaaactcatactttttgtctcaaaaagcatataaagtgctagttgatttttcgcacgcgccttaactgcgtgtcttaaactttctttcgaccctttgtctcaattacactccaattcttcgcaggatgaaggaccacagtaaagtacgagctggaagttgtcaaaaacaattcgaagaggagccccgcaccaattaccaaactcaaatagatctatttcgaaattcaatttgccctcgtagctcgcaaccagggcagccaacaaacgaggccaattactttaaaatatttcgttgagcaaacttggtcgacaagtttcgaaaaacaaaa

SEQ ID NO: 28577 - DNA, 2977 bp, DROSOPHILA
agagattgacgtaaaggagattccgctgtatcttcaagatacttatttggtgcagatttttccggttaatgtgaaatacaaacaatcttaatacaaattaagtcgcaatcccatcgtatttccagttaattgcagttaattattaagccaaatagattttgttcttcaaatgggttgacttgtgatattgctgcttcctggacccgggaaacaaaagggatacaaattgaacctcaaaagacatagccaagctgcaataaaaccatcgccaaaccaccgccgccatttaaagtcaatagttagcacgaatataaccacctagaaaccgttggaatctctgcttgaaagcagcgcaccacccatgaaccaatcggccaaggcgctcaacagcgtggccaccgagatcagcacctcctgctcctccagcaccttcaccaaccatccacagaaccacctgcacactggccacctgattgcccatcgtcttggacactcctacgccgctcgtgccgatcacaattatctgggataagttctgcaattggaatctgactggtgaaacacgtttctcgagaggattttccatttttgcatcgtagcagcttcacgacggccggcacaatgttaaaagtcgttggtgcatcgtggcaaaaaacgcggatagggacctacatcctaatcggtgctggtctcttggtcatcggagccttcttcattggatatatggagaggccggagtacgatggcacctactgtgccaccgctctgtggaccaagcaggtgggcttccagattgaaaactggaagcagcagaatgatctggtcaacattcccacgggtgttggcaggatttgttataaggattcggtttatgagaatggttgggcccaaatcgaagtggagacgcaaagaacttatccggattgggtgcaggcctatgccgccggaatgctggagggctcgctgacctggaggaacatctacaatcagtggtccaataccatttcctcttcttgcgagcgcgatgaaagcacccagaaattctgcggttggctcagggaccttttgaccaccaactaccatcgcctgaagaggcagactgaaaaggctgagaatgatcactactggcatcagctgcatctgttcatcacccagctggagggcctggaaactggctacaagcgaggagcatcccgggcacgatccgacttggaggaggagataccattttccgattttctgctgatgaacgccgctgccgatattcaggatctcaagatctattacgagaactatgagctgcagaatagtacggaacataccgaggaacccggaacggatcagccaaagaacttctttctgccgagtgccaccatgctgacgaagatcgtccaggaggaggagtcgccgcaggtactacagttgctctttggtcacagcacggctggaagttactcctccatgttgagaatccagaagcggtacaagtttcactatcacttctcgtcgaaactgcggagtaacacggtgcccggtgtggatatcactttcactggttatcctggcattctcggatccaccgatgacttctacaccatcaagggtcgtcatctgcatgcaatcgtaggaggagtgggcatcaagaacgagaatctgcagctgtggaagacggtggatccgaagaagatggtgcccttggtggctcgtgtaatggccgccaatcggatatcccagaatcgtcagacttgggccagtgccatgtccagacatccatttacgggagccaagcagtggatcaccgttgatctgaacaagatgaaggtgcaggataatctgtacaatgtccttgaaggcgatgacaagcatgacgatgctccagtagtgctgaacgaaaaggataggacagccatccagcagaggcacgatcagctaagggatatggtttggattgccgagcagctgccgggcatgatgaccaaaaaggatgttactcagggattcctggtgcccggcaacacgtcctggctggccaatggagtgccgtatttcaaaaatgtcctggagctaagcggcgtcaactacagcgaggatcaacagctgacggtggccgatgaggaggagctgaccagtctggcgtcggtggataagtatttgcggactcatggattccgtggtgatctgctgggcagccaggagtcgattgcctatggcaacatagatctgaaattgttctcctacaatgcccgactgggcatcagcgatttccatgcctttgcgggtccagtctttctgagattccaacatactcagcccaggactctggaggatgagggccaggatggtggtgttccacccgccgcatccatgggcgacgaacggctcagcgtgagcatcgaggatgcagatagtctggcggaaatggaactcatcacggaacggcgatctgtgcgaaatgatatgagagccattgccatgcgaaagattggcagcggacccttcaagtggtcagagatgagtcccgtggaggagggcggtggccatgaggggcatcctgatgagtggaactttgacaaggtctcgccgaagtgggcgtggtaggcgctgaggagcaggtttcttcttttaacccgtagaacccaatcgaatttgtacccaaaacccacctccatccattttgaaaactggaaagcaataattgtcctagatttggtaattagtgtcctgtcttgtctcgtataatttgtgtgttcctagttggtacatatcttacgtccatagtcttctagtgtctactgtacttatgtatgtatgcgtgtccaatcgattattgtcttccagctgtacagctttttattttccgtaggtcttttgtaaattagcaacgaaattggaaatatattttttagcaacaaatttttgtactttagtaactattaacaaattgtaaagaaaataaaaacaaaatcatgaaaaacaa

SEQ ID NO: 28578 - protein, 624 aa, DROSOPHILA; identical to SEQ ID NO: 22344

SEQ ID NO: 28579 - DNA, 4623 bp, DROSOPHILA
agtggagcaccatcgactgcatccagtaacgcggagctgcagcagtgggatccaatcttcgcaagacagatttacagagtttacatcatggcgttcatccagtggaactatgttcaatactactaactcctcaactcacctgcacatgagagccagtgcctgttgtcgctgaacctgcgtgcgctgagtggccaattgctgctgttggtgggccagtgtctgcttcatcaacaccatcttgatgctctgctccatggcgtacttcttggccttgctgaccaggtcgtgctgctccgaggagagcttgggcagggcgccgcccaggaggccgaggagcgccgaacgggtacccggaccgaacttgacatcgcccgtctgcttgaggtcgtacaggggctgcgaaaggtagggaattttcgaatccgtggacttgcctagaattgggaagagggattagtgcatcttatagtgggaggggattcgtttcagttgatcatcagctatgcaatttgattgggattcgattcgattcgacttttttcatttgacttgttcgatttttgattgattttcattctttggtttttttttttttgtcttatccgaaggcaaagtgggtcagacaattgacaattggtcaagagattgcgtttgaaaccgcttaaataaagacaaaaactgcctgctgcctgcaagaaagatgaagacaaaaaagaaaaaataagaaaacaaattgttaatcatatagtggctccacgagcggatcatttgggtttttggagcgcgtgtctatcgatgggcagttgctattatggtcacaatcattttttttagttgtttttttttttcaatattagatactgcatacttaaggttaatgctttcgctttcttgttcgatttgcgttggatgagagagtctatgagtctatcgtttatgcagaggggcttgagtttttgtcatttatttgtcaaggctggaaaatgcaagaataaaaggagagagctcccgtcaaataaaacatattcgcttatcggtaggcaattgattgagatacgtagtgtatgtgatgtgattcaagtgtgtggataatattaaatatacataaataggagttaatgtgtgtcgagtagtggtggtgtgtagtgtgtatgcgtatcaaatcaaaattcatccgccgacacacaaaccgaactgggcacacggcgggacatccgggtaatcccgtccagaaagaagcgcgcgaattggccgaactaacgatcttgcgatctcccaatctcgcgtgtgcccagctccgttctggcgagtagtttataaaaattagaaattataagcaaccttaggtgcggtttcgtattcgtattcgtttcgtaatcgatttccatgagttggggcgtggtaactgacttgaagaagggtcacacacattttacattgctcagagtgataaaaagagaaaaataaaaaaaagaaaacaagacgctgaaacgataataagagcaacaatatgtttaagttggttagcttctccaccgccctacctacatacaaaaagctgtcatcttctacccacggttaatgattcgcatacgagaacaaggctcgtgagttagtgattgctagatgcggatggcgatcgggaagatcgggcgattggcagcggattgagcgggattgagtgtttagtaccccaccaattgctaaaatatacggacgcatgactggacggacgtttgatttgatctgctagctagctaggacgacaaaacacaaaatcattggtacttaatgtaaaatgcaaccaggacaggaccggagccagactcagaatctcaaacaggatcaggatcgggatcgggatcgggatcggtccccgatcggctggcggcacacgacgacgtggtggcgaggtggttagaagcggattaatgtcgatgttctggttgggctgttttgtggctgatattgatagtagtagtagattggtagtggagtagtagtagtagagtagttatctaattggtcatctctctttttcgatctcgaatacccgaacctcgatttcgatcttgataaaacttagtcataggcggaacaaacttaaaaggagttaaaacgcttacgagaactaaaaaagagaaatatagaagaaagagaaagagagagataatagttatacatatatgcattttggattagttctggcgatccgtcgactcgtatattaacgtattggttttgttttcaggaccgggacttggactcactgatgccctagatttatgaacaatacgcatttcattgcgctttctcgcttgcattcgctttcgttatttagcacatgtatgtatatatgcttttgctctatcgactggggatcgcgcccttttcgacttttggcgatagactgactctcaaatcgatttgtttgactctcacctcacctcacacctcacagtctgagttagagttcatcgtgcgtttatgaagtctgcaattacttaagcagaacaaaaagaaaaaccgattatttagtggcgtcagtgctgcccctggatgcaacggagtagtagagtagagtagtagagtagagtagagtagtacaagtacaagtgggagagaaaatataagatgtgcttatgttttatgcttggacaaccaaaaagatacaatacaatttggaaggccggctcctcgaggattccgtattccgtggactgttgcactgtcgattgaaacctacgtgccacatatgtatgtatgtattgtaagtgtcaagctcattcattgccagacacacacaacatgtttttgggggcgatgtgctgatcgccgcggcaatatcattccatcatacatagttatttatagacaaacagctgggaaactcacccgaatcggaacgcgttcttttggtggccggcatgtcgctgatctcgcgctgatcatccgaacgcggcgatctcgatgctctgtcgttgcttccctgtaacagaagtcgagtaacaccgggttagaaggtggttcgaatattgaatttttctagatttagagagaccctagcagagcatttcactacctaagtaaacaaacagtttgcaaatagataaaagataacagataacctatcctaaataccgaatgatcatatgctatatggtcagaccctttccctttccacccccaggtaaaatccgcatgtgggaccaaagggctgtacttccatttccacttccatggagagcggcgaatcggaggtgcgggagcgcgtggtgttaattcggatgtgtatctacccgccggagctggcagctgtgacgtcgtagtcccaaatggaggcaaggtcacgacggggtgctccgcggaaacctccacccgtcgccacccacatgccccttaacccctaatgccgcccaagagcggtcgctgcaacgccactgtgaaagttccgaaaaaaatgcgcaaatttcacgggaaaacgaaagacgcaatcttcggtttggtgcgagttaaaaagtgtctgctgcggagcaagtgagtcgcgtttgtctagtactaaccattttcgcttttttccagttattctagtggcgatttcttgtccacaactcaacgatttgtttaattttatacgcttgcaaaaatttttgtcaagatggatacgaactagtggtggcacttcgcgtcgattgcctcactcttcgattattcgatagtaaagttgagttatctggctactctaatagccgataggttttgagtaactgtggggaaattgtcattttaaaatgtaatctcgataaattacgatcggttataaactttttagctggctgtgcaagcaattccacactgtcaatcgaaaaatccccgagttaagcgcaagcgaaactcagcccgaaatagattagtttggctaacctagtgaagttcatagttcagaagatgcaaagcagtgtatgtatagtgtatgtagtgaaaaatggaccaaattgcattgcagaaaaaaaagtgccacttcttaacatacattttggaaagattacgttctcgagtgactaatgtcaaactgcacgtaagcacaccagtttttcaattacaactgcatttagtttttctttattcaacccttctcttaaggactacgactaaaattaaactatgcattaatatttacaactctcggtctttctgtgagagttttcccctctgttttttggttctttttttttctgaattttctgcagtgcatagactgtgaaaaggtaagccagataaggcaagatattgcccatttgaagggggattttttttcttttgttttagtagcgaatattttttcacaacttggcgaaacaggaacttgcacaatgacgcacttgatagagttaattacaacagatccggatgcaatcatcacaatcgcaatggtcttgcggccgcgtaatccgtttttaaagctaatgtcagtcgcgcgacttgcattcatttcaacatgacgtattcaaagtgaaaccgaatcaaaaattaagaagttaagaatccaaaaatgttgctgcttttagctaaaatcctaattgtggcgtaaaatgatcctacgaataaattaacgagaccgaa

SEQ ID NO: 28580 - DNA, 639 bp, DROSOPHILA
caaatcgttgagttgtggacaagaaatcgccactagaataactggaaaaaagcgaaaatgggaagcaacgacagagcatcgagatcgccgcgttcggatgatcagcgcgagatcagcgacatgccggccaccaaaagaacgcgttccgattcggcgtcttgttttcttttttttatttttctctttttatcactctgagcaatgtaaaatgtgtgtgacccttcttcaagtcagttaccacgccccaactcatggaaatcgattacgaaacgaatacgaatacgaaaccgcacctaaggttgcttataatttctaatttttataaactactcgccagaacggagctgggcacacgcgagattgggagatcgcaagatcgttagttcggccaattcgcgcgcttctttctggacgggattacccggatgtcccgccgtgtgcccagttcggtttgtgtgtcggcggatgaattttgatttgatacgcatacacactacacaccaccactactcgacacacattaactcctatttatgtatatttaatattatccacacacttgaatcacatcacatacactacgtatctcaatcaattgcctaccgataagcgaatatgttttatttgacgggagctctc

SEQ ID NO: 28581 - protein, 46 aa, DROSOPHILA
MGSNDRASRSPRSDDQREISDMPATKRTRSDSASCFLFFIFLFLSL

SEQ ID NO: 28582 - DNA, 7711 bp, DROSOPHILA
cccagacttttcaacgcaggcacgtgccattgttttaatctgttttcggctcttggcttccgatagtcatgtacccctgctgttacataaccaagggtcatctaattgggaagaatgcggtattaatacggggactatgatcctggttacatccaggcagatggttatgtccatgtcgtggcgtgtgtgtatgtatatgcacaagttccgcggatctcaaaggtacatacatgcatgtaaaaaacaaatggcttgcgtgtgtctgtgtgggtgcgtagttattgaagaaaaaagcacaaaaacactaataaagcgtcggcctgtctggcttatctggccaacaaaactaagcggagtgaccaaaataacacggaactgcgagcagcgacagtcagctgtccggatatttttacccggagtctcggagttgctggccgactggccgtggagccccacgctttctgtaccttttattttgctttagtgtcgccccaaaaaagcagcctccaaaatccctcgctgcttttgcttctgtcgttgcgtttgtctttgcttttgcgtttgctttgccactgctgctctgtctttgcgttcgttttgccaacggattttccgaacttcgagcgatttttccgcgattgcgcagcgttttaccgttacacgcggcactcgagcgccagaaaattccaattgttattctctaattttacgatttgcgtatggaaatcacttcattattttggtttctattttctttcttctcgccagtgtgaccagatgccgaatgcgctccaacacccaatgctgtctacctaacactacttcgcactaaaaaataccgaaagtatcctttcatattcgaaagctaatccgaaaattctggaactccgaaatcctgacttttgaaaatctaaagttagtgaataaatgttatgcaaaggcttgcagttaagatatgcaattacttaatgtcattagcccgcgcaagaaaaacagacacttgaattggaaactatagtttattttgtaagttaagcgctgaaataaatcaattgtaaatgtacacattgttagtcggcggcggcgtgcttgcctgggttctaatttgtagttctcttgctccgataatgcgaagaaaaccgacaattgcttccctcgctgtagggatactttttaaagactaaatcactgcgttgcagaatcatcataatcatcataatcgtattgtataatccggatgccgtgccgttggctttcggactggcgtaataaataaacttgcatcgtttgcgttttaggtgctacgtaaaaaatgatagaacaaatgcggggagccgcatgcaattcggatagctcccccttctaaccggacagatctccctgatcgaagatgccctggtcgtagagctcggccaccactctccgaccgccgaagaaccggccgtcgagtgcctccttgccccgcatggcctccgctcctgccgagaactccacgaagatcttcacgatgatctccgcctcgtcgtcgtcctcgttctccgtctgcttctcgttgaagatgatcacgcgactgacggtgccgaatttactgcactcctcctggatctcctcctgcagggtctcgtccacatcctcgggtccgaccatatttcgcaggatgattacacgtgagtccaccggccgcatcagtcgctgcattaccaactgccgcgcgctctggcccttgatggacatgttctcctgctgctgcagcgtctgcacgtcgccctcatccatcagcttcttctgcagctcctcctgctgcttctcgtgcgccttcttgatgttctccgagagatttgctgccgtgacagcggcattgtttgcagcggcagagagggcggcagcagctgcagctcctttgctggcctccgctcccgccagagtggccacagtgggcactaagcccacgccaacgccgccgaccgtcatgggcagggtgggtgtggccagaagggcgggcggcggaagagtgggcactaccgcctgtagaggttgcaggccagcaggaaccccaagcaaactgggagccaccggagttggtgcctggaatattccgggcggcagaagagcgggagcggcttgagccaaagcaggatgcagagcagccgcggatgtggctgccgaaaccactggcattgcacccaccttagtgaccactgctccagctgccatgacaggagtgttctgcgacaaaccaagaaccgcattgctggccaccgcgtccagggcttggatctttgccgttgctgccgctgcagccactgccgcagccgtgggcatcgtggagttcgttgtgggacaggccagggcattcggcggcgtaatagatcgacccactctgttaaaaaagcatatgcattagatattccgcacatacttttctaagcgctacacactcacctcagaagctggcctcccaaatcaaagagattcatgctggcgattgcctcgtccatggcctgtttgttggcgtactcgatgaagccgtagcccttgtgcgtgtgaagggaagtgccctgggccagcttgcagtagaggatcgggccaaaggcctcgaagacgctcttgatgtcctcctcggaaaggtcgggatggatggaggccacgtagatgcggttgaagctcttggcctcctcctgcacctcgtcgatcacctgctgcgcctgtggcatgttactgggtcggcctaccttgatgttcctgccccccatcagggctccgttcatctgttccagcgccagctgtgcgccctccggtatctcatactccacgaacgcgaatcccttgtgcttttgcgtgatgggatcccaggacatgttgattgatttgatggggccgaagggagtgaaggccacacgaattgtgtcctccttgagctcaaacgaaatgctgcccacgtagactctaaagaggaagggaaaggcgctgagttagtggtactcaatgtttaggagagattaaagtgaaaggagtttgtgtggtcagatcttatcagctaagagcgcacagtgagtggagcaccatcgactgcatccagtaacgcggagctgcagcagtgggatccaatcttcgcaagacagatttacagagtttacatcatggcgttcatccagtggaactatgttcaatactactaactcctcaactcacctgcacatgagagccagtgcctgttgtcgctgaacctgcgtgcgctgagtggccaattgctgctgttggtgggccagtgtctgcttcatcaacaccatcttgatgctctgctccatggcgtacttcttggccttgctgaccaggtcgtgctgctccgaggagagcttgggcagggcgccgcccaggaggccgaggagcgccgaacgggtacccggaccgaacttgacatcgcccgtctgcttgaggtcgtacaggggctgcgaaaggtagggaattttcgaatccgtggacttgcctagaattgggaagagggattagtgcatcttatagtgggaggggattcgtttcagttgatcatcagctatgcaatttgattgggattcgattcgattcgacttttttcatttgacttgttcgatttttgattgattttcattctttggtttttttttttttgtcttatccgaaggcaaagtgggtcagacaattgacaattggtcaagagattgcgtttgaaaccgcttaaataaagacaaaaactgcctgctgcctgcaagaaagatgaagacaaaaaagaaaaaataagaaaacaaattgttaatcatatagtggctccacgagcggatcatttgggtttttggagcgcgtgtctatcgatgggcagttgctattatggtcacaatcattttttttagttgtttttttttttcaatattagatactgcatacttaaggttaatgctttcgctttcttgttcgatttgcgttggatgagagagtctatgagtctatcgtttatgcagaggggcttgagtttttgtcatttatttgtcaaggctggaaaatgcaagaataaaaggagagagctcccgtcaaataaaacatattcgcttatcggtaggcaattgattgagatacgtagtgtatgtgatgtgattcaagtgtgtggataatattaaatatacataaataggagttaatgtgtgtcgagtagtggtggtgtgtagtgtgtatgcgtatcaaatcaaaattcatccgccgacacacaaaccgaactgggcacacggcgggacatccgggtaatcccgtccagaaagaagcgcgcgaattggccgaactaacgatcttgcgatctcccaatctcgcgtgtgcccagctccgttctggcgagtagtttataaaaattagaaattataagcaaccttaggtgcggtttcgtattcgtattcgtttcgtaatcgatttccatgagttggggcgtggtaactgacttgaagaagggtcacacacattttacattgctcagagtgataaaaagagaaaaataaaaaaaagaaaacaagacgctgaaacgataataagagcaacaatatgtttaagttggttagcttctccaccgccctacctacatacaaaaagctgtcatcttctacccacggttaatgattcgcatacgagaacaaggctcgtgagttagtgattgctagatgcggatggcgatcgggaagatcgggcgattggcagcggattgagcgggattgagtgtttagtaccccaccaattgctaaaatatacggacgcatgactggacggacgtttgatttgatctgctagctagctaggacgacaaaacacaaaatcattggtacttaatgtaaaatgcaaccaggacaggaccggagccagactcagaatctcaaacaggatcaggatcgggatcgggatcgggatcggtccccgatcggctggcggcacacgacgacgtggtggcgaggtggttagaagcggattaatgtcgatgttctggttgggctgttttgtggctgatattgatagtagtagtagattggtagtggagtagtagtagtagagtagttatctaattggtcatctctctttttcgatctcgaatacccgaacctcgatttcgatcttgataaaacttagtcataggcggaacaaacttaaaaggagttaaaacgcttacgagaactaaaaaagagaaatatagaagaaagagaaagagagagataatagttatacatatatgcattttggattagttctggcgatccgtcgactcgtatattaacgtattggttttgttttcaggaccgggacttggactcactgatgccctagatttatgaacaatacgcatttcattgcgctttctcgcttgcattcgctttcgttatttagcacatgtatgtatatatgcttttgctctatcgactggggatcgcgcccttttcgacttttggcgatagactgactctcaaatcgatttgtttgactctcacctcacctcacacctcacagtctgagttagagttcatcgtgcgtttatgaagtctgcaattacttaagcagaacaaaaagaaaaaccgattatttagtggcgtcagtgctgcccctggatgcaacggagtagtagagtagagtagtagagtagagtagagtagtacaagtacaagtgggagagaaaatataagatgtgcttatgttttatgcttggacaaccaaaaagatacaatacaatttggaaggccggctcctcgaggattccgtattccgtggactgttgcactgtcgattgaaacctacgtgccacatatgtatgtatgtattgtaagtgtcaagctcattcattgccagacacacacaacatgtttttgggggcgatgtgctgatcgccgcggcaatatcattccatcatacatagttatttatagacaaacagctgggaaactcacccgaatcggaacgcgttcttttggtggccggcatgtcgctgatctcgcgctgatcatccgaacgcggcgatctcgatgctctgtcgttgcttccctgtaacagaagtcgagtaacaccgggttagaaggtggttcgaatattgaatttttctagatttagagagaccctagcagagcatttcactacctaagtaaacaaacagtttgcaaatagataaaagataacagataacctatcctaaataccgaatgatcatatgctatatggtcagaccctttccctttccacccccaggtaaaatccgcatgtgggaccaaagggctgtacttccatttccacttccatggagagcggcgaatcggaggtgcgggagcgcgtggtgttaattcggatgtgtatctacccgccggagctggcagctgtgacgtcgtagtcccaaatggaggcaaggtcacgacggggtgctccgcggaaacctccacccgtcgccacccacatgccccttaacccctaatgccgcccaagagcggtcgctgcaacgccactgtgaaagttccgaaaaaaatgcgcaaatttcacgggaaaacgaaagacgcaatcttcggtttggtgcgagttaaaaagtgtctgctgcggagcaagtgagtcgcgtttgtctagtactaaccattttcgcttttttccagttattctagtggcgatttcttgtccacaactcaacgatttgtttaattttatacgcttgcaaaaatttttgtcaagatggatacgaactagtggtggcacttcgcgtcgattgcctcactcttcgattattcgatagtaaagttgagttatctggctactctaatagccgataggttttgagtaactgtggggaaattgtcattttaaaatgtaatctcgataaattacgatcggttataaactttttagctggctgtgcaagcaattccacactgtcaatcgaaaaatccccgagttaagcgcaagcgaaactcagcccgaaatagattagtttggctaacctagtgaagttcatagttcagaagatgcaaagcagtgtatgtatagtgtatgtagtgaaaaatggaccaaattgcattgcagaaaaaaaagtgccacttcttaacatacattttggaaagattacgttctcgagtgactaatgtcaaactgcacgtaagcacaccagtttttcaattacaactgcatttagtttttctttattcaacccttctcttaaggactacgactaaaattaaactatgcattaatatttacaactctcggtctttctgtgagagttttcccctctgttttttggttctttttttttctgaattttctgcagtgcatagactgtgaaaaggtaagccagataaggcaagatattgcccatttgaagggggattttttttcttttgttttagtagcgaatattttttcacaacttggcgaaacaggaacttgcacaatgacgcacttgatagagttaattacaacagatccggatgcaatcatcacaatcgcaatggtcttgcggccgcgtaatccgtttttaaagctaatgtcagtcgcgcgacttgcattcatttcaacatgacgtattcaaagtgaaaccgaatcaaaaattaagaagttaagaatccaaaaatgttgctgcttttagctaaaatcctaattgtggcgtaaaatgatcctacgaataaattaacgagaccgaagatcgctaagtaaaaatgttgcttcggcttaagta

SEQ ID NO: 28583 - DNA, 2476 bp, DROSOPHILA
cttgacaaaaatttttgcaagcgtataaaattaaacaaatcgttgagttgtggacaagaaatcgccactagaataactggaaaaaagcgaaaatgggaagcaacgacagagcatcgagatcgccgcgttcggatgatcagcgcgagatcagcgacatgccggccaccaaaagaacgcgttccgattcggccttgacaaataaatgacaaaaactcaagcccctctgcataaacgatagactcatagactctctcatccaacgcaaatcgaacaagaaagcgaaagcattaaccttaagcaagtccacggattcgaaaattccctacctttcgcagcccctgtacgacctcaagcagacgggcgatgtcaagttcggtccgggtacccgttcggcgctcctcggcctcctgggcggcgccctgcccaagctctcctcggagcagcacgacctggtcagcaaggccaagaagtacgccatggagcagagcatcaagatggtgttgatgaagcagacactggcccaccaacagcagcaattggccactcagcgcacgcaggttcagcgacaacaggcactggctctcatgtgcagagtctacgtgggcagcatttcgtttgagctcaaggaggacacaattcgtgtggccttcactcccttcggccccatcaaatcaatcaacatgtcctgggatcccatcacgcaaaagcacaagggattcgcgttcgtggagtatgagataccggagggcgcacagctggcgctggaacagatgaacggagccctgatggggggcaggaacatcaaggtaggccgacccagtaacatgccacaggcgcagcaggtgatcgacgaggtgcaggaggaggccaagagcttcaaccgcatctacgtggcctccatccatcccgacctttccgaggaggacatcaagagcgtcttcgaggcctttggcccgatcctctactgcaagctggcccagggcacttcccttcacacgcacaagggctacggcttcatcgagtacgccaacaaacaggccatggacgaggcaatcgccagcatgaatctctttgatttgggaggccagcttctgagagtgggtcgatctattacgccgccgaatgccctggcctgtcccacaacgaactccacgatgcccacggctgcggcagtggctgcagcggcagcaacggcaaagatccaagccctggacgcggtggccagcaatgcggttcttggtttgtcgcagaacactcctgtcatggcagctggagcagtggtcactaaggtgggtgcaatgccagtggtttcggcagccacatccgcggctgctctgcatcctgctttggctcaagccgctcccgctcttctgccgcccggaatattccaggcaccaactccggtggctcccagtttgcttggggttcctgctggcctgcaacctctacaggcggtagtgcccactcttccgccgcccgcccttctggccacacccaccctgcccatgacggtcggcggcgttggcgtgggcttagtgcccactgtggccactctggcgggagcggaggccagcaaaggagctgcagctgctgccgccctctctgccgctgcaaacaatgccgctgtcacggcagcaaatctctcggagaacatcaagaaggcgcacgagaagcagcaggaggagctgcagaagaagctgatggatgagggcgacgtgcagacgctgcagcagcaggagaacatgtccatcaagggccagagcgcgcggcagttggtaatgcagcgactgatgcggccggtggactcacgtgtaatcatcctgcgaaatatggtcggacccgaggatgtggacgagaccctgcaggaggagatccaggaggagtgcagtaaattcggcaccgtcagtcgcgtgatcatcttcaacgagaagcagacggagaacgaggacgacgacgaggcggagatcatcgtgaagatcttcgtggagttctcggcaggagcggaggccatgcggggcaaggaggcactcgacggccggttcttcggcggtcggagagtggtggccgagctctacgaccagggcatcttcgatcagggagatctgtccggttagaagggggagctatccgaattgcatgcggctccccgcatttgttctatcattttttacgtagcacctaaaacgcaaacgatgcaagtttatttattacgccagtccgaaagccaacggcacggcatccggattatacaatacgattatgatgattatgatgattctgcaacgcagtgatttagtctttaaaaagtatccctacagcgagggaagcaattgtcggttttcttcgcattatcggagcaagagaactacaaattagaacccaggcaagcacgccgccgccgactaacaatgtgtacatttacaattgatttatttcagcgcttaacttacaaaataaactatagtttccaattcaa

SEQ ID NO: 28584 - protein, 545 aa, DROSOPHILA; identical to SEQ ID NO: 2526

SEQ ID NO: 28585 - DNA, 5343 bp, DROSOPHILA
aggatcatcgagctgtcgctggaggaagtacgcactggctgcgtcaagctgatgaacgtgtggcgccaggagatcgtggacgccaaggagtcgcggctggagaagcgcaagcacaccttaaagctgaacattgccccgggaactacggccggaactcgcttctgcttcaaggaggagggcgatcgctatccggccaccattccgggtgatattattttcattgccgccgacaagccgcatccggactttgagaggagaaaccaacacgacctggtctacaggcagtctattggcctgtgccaggccttcaccggcttcacgttcttcatttgcacgctggaccggcgccagttgaaggtggtcattacggacgtagtgcagccgggatacaccaaagtggttcccctcgagggactccccaagtgccgcaatttggatgcagttacggccatcaaggaggccaacaagaaggtggagcagttcggggatctcattatagaatttgattgtgggttttccttttctgttggaggtttcaatagtttctgatagtttctctgtttcttctgcagatatctttcccaagtacttgactccacatatgaagcatatcactcgcgaattcttccgcgaattccgcaagctcgaaatagaattggaggaggaggaggaacgtaacatggtttgatggcagacaccttattgtttttccgtatttggaacacagatatttgtgcgtacagagaaattaaattcaaaatttgcgtttaaaaggatagatgttgttgggttatttcgtatagccatattacatacgagcacatgcagactatattcaaaaatcttagatttaattaaattagcagatgtaacggtcgaatttgaattgattttgaaaaggtggcaactgttccgattatgtcgattgcttatcgatgcacaacgcagccgctcggcaaccctgtccatcagctgtttgtgaaaagaaaatgcatttggcattccatttcagagataattaaaaatcaattacagcagcagcagcagagcaagtggccaccgaaaagagtgcataggagagggtaaacaactcgctgcatccaaacggcacagtaactgatccgaagctgtcccacttagagcccaaatcgaattacccgttttgcagtttaggacaaagtgtgccaacgccacaacgcccccacccagaagtccatagaaacgccagcggaagtgggatagagacggggaccacgctccactgaccgcaccgcgcaccgctcgctgaccacgcccactgacgcaagatgcacctcagcgcggatatttccagcgcccttcagcagatcgaggcagtgaagaagggcatcgatgagtccgacgaccccaagctgcaaatgcagacggccgagagccttagcaccattctgggcattctgcaggatcccgttttccgcaccatcgtccacgtgcaggactcgttgtccgagctgaacgcccagctggctcagcatccgtccatgttgcccaacgacttcgacatcgatgtggccggcaaccttgtactcagtctgaatggtggcgaggtgatgtacgactttgacgaacagcgctcttcctcgcactcccattcggctccgggcagtccagataagtccggaggcgtcggcgaggagccgcgcccgcagagccagaactccaaaggagccggagtggcggatctctacgccacggactacgctcagatccaggccatagagctggtcaacgacggcacgggtctcggattcggtattattggagctcgcaactcgggagtgattgtaaaaaccatcctgccgggtggcgtggccgataaggacggacgcttgcgctcgggcgaccacatcctccagattggagacgtcaacctgcacgaaatggtatccgaacaggtggctgccgtgctgagacagtctggaacccacgtccgcctagtggttgcccgtcccgttgagcagagcgtgcctacgccccagtacgccctggaaccgggcactgctgtggtgcccacgcgcgtcctcgtcgatcctgccgagctggagcggtacctcatatctaccggctatccggaaatctttggcgagagctccacggcctccactccgcagaccaccacggaagacgatcgtttcgtttatcgcggcgagacatcaatgcttattgatccaaacatcgacctagaggaattgcttgcccttcctgaaacggagaagcttcaggtggagctgaagaaggatgccaacggcctgggcatcacaattgccggctatgtgtgtgagaaagaagagctgtctggcattttcgtaaagagcgtgtcgcccggttcagcagcggacctgagtggtcgcatccgggtcaacgatcgcatcattgaagttgacggccagtcgctacaaggctactccaaccaccaggccgtagagctgcttaagaagtctggtcaggtggtgaacctgcgcttggaacgctacctgaggggccccaaattcgagcagctgcagcaggctatcgctgcgaatgacaagcttccatccagtgcacctggaacgccttcaagggctcccatgcccacgcccgtggccacaacgtcctccgccacaactacaccatcacgcagcatcactcgcgagttggaagaggaagccttaccagcgccagaagcattcatgaccactccgccgtcggtcaccacaatgaccaccaccacattaagctcctttggagcgggtaagcaactagtagcagtaagggactccctagacggctccacgaagatcatacccacggaagttgtacccttggcggataaaacggaggtgagtattagctaacgggtaacacagcagcaaaacgtatagcgcattaacatgttttaggccaagaacagcggggtgatcacccgtcacaagtactacaccgatccggaactgtccgacgacgccgaaaccgaaattattcgcaaatggcagaagattgtgggctccgatgtggaggtgattgtggcccagatcaagaagttcgcggtcggaggcttggggatttccttggagggaaccgtggacgtagaaggagggcgcgaggtacgaccccatcactatattcgttcaatcttacctgatggacccgttggcgtgaatggagtactccgctctggcgatgaattgctggaggtaaacggcgagcggttgctgggtatgaaccacctggaggtggtggctatacttaaggaactgccgttggatgtgcgcatggtttgcggtcgcaacaggaacagctcgcttctcccattctctgatgacaccctgaaaaagctaagcaacaactttgagaacctgctgcctgctaccgatcgtctggtgaaggccaaatcagatggtagtctggccaccgcgggctccgtggccgatggagattcagtggctgccgccgctgcttcgtttagtaagctgaagtcgcgctccctggagccactaaccggattggctatgtggtcgtcccaaccgcaaattatcgagctggtcaagggcgatcgcggtctgggcttctctattctggattatcaagatccgttggatcccaacgatacgctgattgtaatccgttctctggtccctggaggggtggctcaattggacggacgccttatacccggagatcgacttttgtttgtgaactccattaacctggagaacgcctcgctggatcaggcagtgcaggctttgaagggtgcttcgaaaggagtggtgcgcattggtgtggccaaaccactgcccatgacggacaactcactgaaggcttgcagcaatgcgagcaccaccagcgaagagaccttggacgcccagccatcgcctccagccttgcccacagttgctccgcccgccatgccgcctagtgcctccatgggagctgagcccgacctgattcccgactggcggaactagggtgttacgataacgaagaatttcacacattccaggcatttgaatctttaagcctgttttaaatcaaatcaaacgcggttgctaactaatggattagttaatcgatattttctacgaatatgaacaacaggcagtagaatctgaaacgatgtcagaaacgatgccagaagtacaggagcgattgttattaccgaagcaaaatgttatgcatattattaacgccgaattgtgtttgtcccctgaaaacaagcattccacaagtatgcaatatattaaaccccctagtattagcaaatgaattttaacatggtatttccagagtgtatgtacttaaactaaattaaataatgtaccttccgtacggtcaatgagtatcacttggggaagggaatcgatgatttggcggagggctattggacccggtttagctgtcgctcgattctcatgtagttgcgcctggacaggactcgatcgcgggcataactgaccaggtagctaagtaatccgattacaaagcacgagacctcaaatttcaagaagttcatttgctcgatgagcgccacccggtcgcagctcctggttacgatctcgccgctctggcagcgcagcacctccttgtagtgcgtgtgaatgcagacgcccaagctccggctgactatatcgaattcggagcacgggtggcactcctgcaccatcgtgtacttctcattccgccagcaggtcgagttgtcctcgatcacgaattgcggctctcggcgacgaggaccatctgccgcgtaacgagattccacgaacaggacgagtatggtgaccatcgttagggctcctagtccaaggagcatgtggtgacgctgacagttctcgagcattgtgaaggcgggcagctaactcttgtatcggatcaagtgctggaaacaacctggaagaacctatgcatgctcagtaggtggataactccaatacatatggacgggattactcgaaatcctattgctttgcttttccccctatgaaatcagctttactgtgtgaccaggcgagagtttttatttttgttcagccgtctttggaactagttcttgcttggcatttaagattatatattaaaaaaaaattgaatttgcacatgcatagatttcgtaatttagataaagcgttaaattaagggagaaaataatatttttcgaggaaatcttataagccgcgtattccgctccgattcgcggaactgcagatgtgtggccagacttcggggagctcgaaactagttcgctgtttacgaacgacaataaacggagaccaaaacaattacggaggacaagcacaaagcggacttgagaaatttgtgaaaatttttata

SEQ ID NO: 28586 - DNA, 3227 bp, DROSOPHILA
attccatttcagagataattaaaaatcaattacagcagcagcagcagagcaagtggccaccgaaaagagtgcataggagagggtaaacaactcgctgcatccaaacggcacatttaggacaaagtgtgccaacgccacaacgcccccacccagaagtccatagaaacgccagcggaagtgggatagagacggggaccacgctccactgaccgcaccgcgcaccgctcgctgaccacgcccactgacgcaagatgcacctcagcgcggatatttccagcgcccttcagcagatcgaggcagtgaagaagggcatcgatgagtccgacgaccccaagctgcaaatgcagacggccgagagccttagcaccattctgggcattctgcaggatcccgttttccgcaccatcgtccacgtgcaggactcgttgtccgagctgaacgcccagctggctcagcatccgtccatgttgcccaacgacttcgacatcgatgtggccggcaaccttgtactcagtctgaatggtggcgaggtgatgtacgactttgacgaacagcgctcttcctcgcactcccattcggctccgggcagtccagataagtccggaggcgtcggcgaggagccgcgcccgcagagccagaactccaaaggagccggagtggcggatctctacgccacggactacgctcagatccaggccatagagctggtcaacgacggcacgggtctcggattcggtattattggagctcgcaactcgggagtgattgtaaaaaccatcctgccgggtggcgtggccgataaggacggacgcttgcgctcgggcgaccacatcctccagattggagacgtcaacctgcacgaaatggtatccgaacaggtggctgccgtgctgagacagtctggaacccacgtccgcctagtggttgcccgtcccgttgagcagagcgtgcctacgccccagtacgccctggaaccgggcactgctgtggtgcccacgcgcgtcctcgtcgatcctgccgagctggagcggtacctcatatctaccggctatccggaaatctttggcgagagctccacggcctccactccgcagaccaccacggaagacgatcgtttcgtttatcgcggcgagacatcaatgcttattgatccaaacatcgacctagaggaattgcttgcccttcctgaaacggagaagcttcaggtggagctgaagaaggatgccaacggcctgggcatcacaattgccggctatgtgtgtgagaaagaagagctgtctggcattttcgtaaagagcgtgtcgcccggttcagcagcggacctgagtggtcgcatccgggtcaacgatcgcatcattgaagttgacggccagtcgctacaaggctactccaaccaccaggccgtagagctgcttaagaagtctggtcaggtggtgaacctgcgcttggaacgctacctgaggggccccaaattcgagcagctgcagcaggctatcgctgcgaatgacaagcttccatccagtgcacctggaacgccttcaagggctcccatgcccacgcccgtggccacaacgtcctccgccacaactacaccatcacgcagcatcactcgcgagttggaagaggaagccttaccagcgccagaagcattcatgaccactccgccgtcggtcaccacaatgaccaccaccacattaagctcctttggagcgggtaagcaactagtagcagtaagggactccctagacggctccacgaagatcatacccacggaagttgtacccttggcggataaaacggaggccaagaacagcggggtgatcacccgtcacaagtactacaccgatccggaactgtccgacgacgccgaaaccgaaattattcgcaaatggcagaagattgtgggctccgatgtggaggtgattgtggcccagatcaagaagttcgcggtcggaggcttggggatttccttggagggaaccgtggacgtagaaggagggcgcgaggtacgaccccatcactatattcgttcaatcttacctgatggacccgttggcgtgaatggagtactccgctctggcgatgaattgctggaggtaaacggcgagcggttgctgggtatgaaccacctggaggtggtggctatacttaaggaactgccgttggatgtgcgcatggtttgcggtcgcaacaggaacagctcgcttctcccattctctgatgacaccctgaaaaagctaagcaacaactttgagaacctgctgcctgctaccgatcgtctggtgaaggccaaatcagatggtagtctggccaccgcgggctccgtggccgatggagattcagtggctgccgccgctgcttcgtttagtaagctgaagtcgcgctccctggagccactaaccggattggctatgtggtcgtcccaaccgcaaattatcgagctggtcaagggcgatcgcggtctgggcttctctattctggattatcaagatccgttggatcccaacgatacgctgattgtaatccgttctctggtccctggaggggtggctcaattggacggacgccttatacccggagatcgacttttgtttgtgaactccattaacctggagaacgcctcgctggatcaggcagtgcaggctttgaagggtgcttcgaaaggagtggtgcgcattggtgtggccaaaccactgcccatgacggacaactcactgaaggcttgcagcaatgcgagcaccaccagcgaagagaccttggacgcccagccatcgcctccagccttgcccacagttgctccgcccgccatgccgcctagtgcctccatgggagctgagcccgacctgattcccgactggcggaactagggtgttacgataacgaagaatttcacacattccaggcatttgaatctttaagcctgttttaaatcaaatcaaacgcggttgctaactaatggattagttaatcgatattttctacgaatatgaacaacaggcagtagaatctgaaacgatgtcagaaacgatgccagaagtacaggagcgattgttattaccgaagcaaaatgttatgcatattattaacgccgaattgtgtttgtcccctgaaaacaagcattccacaagtatgcaatatattaaaccccctagtattagcaaatgaattttaacatggtatttccagagtgtatgtacttaaactaaattaaataatgtaccttccgt

SEQ ID NO: 28587 - protein, 871 aa, DROSOPHILA; identical to SEQ ID NO: 357

SEQ ID NO: 28588 - DNA, 1835 bp, DROSOPHILA; identical to SEQ ID NO: 27271

SEQ ID NO: 28589 - DNA, 835 bp, DROSOPHILA; identical to SEQ ID NO: 27272

SEQ ID NO: 28590 - protein, 252 aa, DROSOPHILA; identical to SEQ ID NO: 27273

SEQ ID NO: 28591 - DNA, 4934 bp, DROSOPHILA
ttacaattgcgatcagttatcggcagtcgcctatcgagcaggaggaaattgtttccggtttgcaaattttttagaacaatttttgagctttaacttgaaatgttggatacgcgcgccttgagctgtgagcaaagtttcttcacaaactgatggcatgcaaagttgccgattttttgttccttaatatgtgcaataatgccatgcacttgtggccaattaacgtctaaattggcaattactcttacttgaaaagagagcctctggtcgtcaggtggaatacagcgtacggaatccgatcgaaaatttctctctacgccagaagcatgatgacctaaaaataataattaatggataactcattaaaattcagttaagtgggtgggcgtgccgcaggcaagttgagctaccgtctcgaacggaacttttcgatgtacgtgtgaataaacggaaggagagtaagtcgaatgagaactcgtagccactccacctaatctcattaacccattagggagcacccactatcccccctttttagctggcgcatccattttttatgtaatttgtttacggtttgtatgcggggggacacattattgttgttattaagcttaccactcacgcgccagcaacttttcctattttcgaatcggaagcggtcttggaaaacgtttatttcgctattttctggagcaattaatgcgatttggaatattttcagccgaacagctgtcaatgttgttattgactatcgatgacagccagagatgaacagagatgaacaaagtgatggcacaacttaagcgttgtattgattaatttggttgtgcattaccatgcttagttattcagcttagttatttcagttgagttcagttttagaattagctattatttgtacggctataattactagctcgttttttaataaattccctgacgatatatcgtaccggctttttacgactaccatcactaatcagcaatcggtgtcgtagaaatggtgtgaccagacctccgctcataaagtttgtttttttcacctagcagagaaacaaaagaattgacaatttagccgcagatcagacgacgcaaatcccaatccaggatgaggagcgtcgaggagatcaaagcggagtacccgctgcactggcacatctggcacaacgaactggagcagctgcaggcggccatcgaccaggtgaaaaggggtggtggtgctccatgggggtgggtgtggcctccggggacaggtgctaattgaattagcagggcacggggaagtgacactgcgataaaacttactgattccgtcaccttgcagaacgataaggagaaaatcgatccccgcggccggacgccactgatgctggctgtgagattggccaatttgccatgcgttaaatgccttctggcggccaaatgcaatgcgacctatgagtacgaaggctggtcgagtaagttaaccaagaaacgccccgaaattaaccccattaattgcctcccccccttagttgtccaggaagcggtctgcaccggcgatgtggacatactgacggccatcatcgaagtccgggatctccagcgtcatgtccagcgggttacgcatgtgcctaagctgctgcagcacctattggacgcaccagatttctacatcgagatgaagtgggaattcacctcctgggtgcctctgatgtcgcgtctctgtcccagcgacacctacaaggtctacaagcggggagccaacgtccggatagataccaccctgctgggcttcgacaacaacacctggcaacggggcaatcgctcttacatcttcaagggggccagtaagtagaaataaatcaaacgatttttaagataaccgccaaatttgtctacaccaactatttatagaagaaactgccacgatgatcgagatcgatcacgatacaaacgaagtaatggtggaggagatgagcagcgatatcggtgatattgtggccattccaccagccttgggcaccgtgagggcgcgcctcaatgccccggtgatcacgaacaacatcgagatggacaagattagcttcgagcgcaacaagtgcggcatatggggatggcgtagcgagaaatctgagatgatcaacggctacaactgcaaggtgtatggggccagcaacgtggagtttgttacaaagacgcgaatggatcaccttagcgaggagcaaattaaggtaagaaattcaataatggaatacaaatgatacatttggatggcatcatttgcaacattctgtgatgcatgaatgcattctgcagttccttctatgtttacgtatattttctaattaactgaaatatacatgttttgtacactgcttttctgatttagaacaagacagcgaggactccactgcatagcctgctgggaattgctgatgaggattatgtgtcacccgctgatgctgctgcggcactaaaagatcgtgtaggtttaaaaataatcaataaattttgcctcaaataatttacatttttttgttttagacaccatcgccccggttggaggaagcttccaacgctggagttgaaaatggtggccgaaactcaccagcccctggaaatcaaagcaacggaagctccgcgggtgcgtcgggcaccagtactccaaagtcttctgttactccggaggagtattttactcaggagtttgatcttcacggaagggatgttggcggtcccaagaacctgagcacaaaggtgcagcgctttagagccaacttatggttagccgaggagcatcccattcgactgcaggaacaggtgcttcccattctggatctcatgtccaccatggccagtccacatgtgtccaagctgagagactttatcaccatgcagctgcctgctggttttccagtcaaagtggaaatcccgctcttccatgttttaaatgcctgtattacatttggaaacgtatttgctttaaccacgcccgttgatcacgtggccacgctgcaggagcaagatcgtgtcacttgtttggtcgatgatcgctgcttcgatatcccagctcactacacaaacaggggcagcgatgtccgtcggcaaattcctcttgacgaggatgacatgctacagtatgcaattgagcagagtttggtggaaacaagcggagcctgtggcgtggacgctcgggacgacgacaaggtggatatctgggaagtgttgagaggccaaaacgtcgtgggctccgatctcctgccagaagatgacgagcagctgcaacggtacgttaccagaatacttttgcccttgcagaatacaatgggcttcttaaaatgaatgtgtagttattctgcaagggctattaagctttgttcgctcaagctatgcatgagtttgatttgcaaacacaactaacacctgtcaatggtaaacgctagtggccaccgcttatcctcgcacttattgtctccccatcgccagcagtacgggcggtattcgccctcgcccaaacaccaaccccagtcctttccccactcgcaactccaactggagccgcagactcgtgggcgctcagcctcggctggtgcgcagttcaaaaacgatttgggctacatgaagaagatcttcaagtagcgcttaaaagacactctacccccaccctcctcctgtcgtattgctagttttgatccaagctttgtgtgttcttgtgcccttttcttgtttcaattgcagagtcctgcaggaatcgctgcttggcgcccatgcaaatctccaaagcggttcgcccgcctccgacgaagacgacgatggtggcttccggtatgtggatcccgatttggccatggccatgcgactgtcacagcaagagcagagaaagttcgaactggagcggcagcaggagcaggagatgatcgagcaggcgttaaagcttagcctgcaagagcactaatatactatcagcaattccaaattgaagttatattgatttcaagtgtaaccttcgggctaagttgtataaatactacgagtactttaagttaccctcgcatccttctgcgccctgtccttgttttgtattgtgatacaagcgggacgcaagcgggaagcagtcgcctggtctcaactcgtccactcgcaaccgaaggatccaccctatatataccatgtatccaaagtagtccttgtagttgtagcttttgcattgaatccggtatctattatctagatactatcttaaatttaagtgcgtgtggcgaccgtgagatatgtcttatatgcgatcgaaccgggttagccacatgcttgcgtgtccttaatctgtaaccactaatcaccattatgcgtaatttataccaataatacccactcacacatcatgcgcatgtaagccgacacctttttgtgtaaatgaagaaaatatatgaaataatcatcaggaaaacaacaggcgtttttttcatttacttagcgatgtagtaatttcgtttattaagcactatatacaattcaaaatcggtacacaacttatgctaattaagcaaacacaataaagtctcaaaatttgatttggtatctctactcaagactatttcctaagaaagtttagttctgaaagcagaatctagacattttaggccgtgcgaaaaaatagttattattcggtgaaatgcaggctgtgctatctcgattggcttatcagtggctaacttgtgtccatttagagtatatacatatgggcttgttttggttttcacagattatacgatttgttcgatttacaatgagtgagtaactaatagtttgtttaaaatttttgttatattccgtattgcacacctttggttagagttcttaaataatatttttaagatattcaaattggttagctttttgatatagattcctaaaaaacaaatatgtgaaaaccgcaacaggcccgataagtttta

SEQ ID NO: 28592 - DNA, 2158 bp, DROSOPHILA
gtgtgaccagacctccgctcataaaatcagacgacgcaaatcccaatccaggatgaggagcgtcgaggagatcaaagcggagtacccgctgcactggcacatctggcacaacgaactggagcagctgcaggcggccatcgaccagaacgataaggagaaaatcgatccccgcggccggacgccactgatgctggctgtgagattggccaatttgccatgcgttaaatgccttctggcggccaaatgcaatgcgacctatgagtacgaaggctggtcgattgtccaggaagcggtctgcaccggcgatgtggacatactgacggccatcatcgaagtccgggatctccagcgtcatgtccagcgggttacgcatgtgcctaagctgctgcagcacctattggacgcaccagatttctacatcgagatgaagtgggaattcacctcctgggtgcctctgatgtcgcgtctctgtcccagcgacacctacaaggtctacaagcggggagccaacgtccggatagataccaccctgctgggcttcgacaacaacacctggcaacggggcaatcgctcttacatcttcaagggggccaaagaaactgccacgatgatcgagatcgatcacgatacaaacgaagtaatggtggaggagatgagcagcgatatcggtgatattgtggccattccaccagccttgggcaccgtgagggcgcgcctcaatgccccggtgatcacgaacaacatcgagatggacaagattagcttcgagcgcaacaagtgcggcatatggggatggcgtagcgagaaatctgagatgatcaacggctacaactgcaaggtgtatggggccagcaacgtggagtttgttacaaagacgcgaatggatcaccttagcgaggagcaaattaagaacaagacagcgaggactccactgcatagcctgctgggaattgctgatgaggattatgtgtcacccgctgatgctgctgcggcactaaaagatcgtacaccatcgccccggttggaggaagcttccaacgctggagttgaaaatggtggccgaaactcaccagcccctggaaatcaaagcaacggaagctccgcgggtgcgtcgggcaccagtactccaaagtcttctgttactccggaggagtattttactcaggagtttgatcttcacggaagggatgttggcggtcccaagaacctgagcacaaaggtgcagcgctttagagccaacttatggttagccgaggagcatcccattcgactgcaggaacaggtgcttcccattctggatctcatgtccaccatggccagtccacatgtgtccaagctgagagactttatcaccatgcagctgcctgctggttttccagtcaaagtggaaatcccgctcttccatgttttaaatgcctgtattacatttggaaacgtatttgctttaaccacgcccgttgatcacgtggccacgctgcaggagcaagatcgtgtcacttgtttggtcgatgatcgctgcttcgatatcccagctcactacacaaacaggggcagcgatgtccgtcggcaaattcctcttgacgaggatgacatgctacagtatgcaattgagcagagtttggtggaaacaagcggagcctgtggcgtggacgctcgggacgacgacaaggtggatatctgggaagtgttgagaggccaaaacgtcgtgggctccgatctcctgccagaagatgacgagcagctgcaacgtggccaccgcttatcctcgcacttattgtctccccatcgccagcagtacgggcggtattcgccctcgcccaaacaccaaccccagtcctttccccactcgcaactccaactggagccgcagactcgtgggcgctcagcctcggctggtgcgcagttcaaaaacgatttgggctacatgaagaagatcttcaaagtcctgcaggaatcgctgcttggcgcccatgcaaatctccaaagcggttcgcccgcctccgacgaagacgacgatggtggcttccggtatgtggatcccgatttggccatggccatgcgactgtcacagcaagagcagagaaagttcgaactggagcggcagcaggagcaggagatgatcgagcaggcgttaaagcttagcctgcaagagcactaa

SEQ ID NO: 28593 - protein, 701 aa, DROSOPHILA
MRSVEEIKAEYPLHWHIWHNELEQLQAAIDQNDKEKIDPRGRTPLMLAVRLANLPCVKCLLAAKCNATYEYEGWSIVQEAVCTGDVDILTAIIEVRDLQRHVQRVTHVPKLLQHLLDAPDFYIEMKWEFTSWVPLMSRLCPSDTYKVYKRGANVRIDTTLLGFDNNTWQRGNRSYIFKGAKETATMIEIDHDTNEVMVEEMSSDIGDIVAIPPALGTVRARLNAPVITNNIEMDKISFERNKCGIWGWRSEKSEMINGYNCKVYGASNVEFVTKTRMDHLSEEQIKNKTARTPLHSLLGIADEDYVSPADAAAALKDRTPSPRLEEASNAGVENGGRNSPAPGNQSNGSSAGASGTSTPKSSVTPEEYFTQEFDLHGRDVGGPKNLSTKVQRFRANLWLAEEHPIRLQEQVLPILDLMSTMASPHVSKLRDFITMQLPAGFPVKVEIPLFHVLNACITFGNVFALTTPVDHVATLQEQDRVTCLVDDRCFDIPAHYTNRGSDVRRQIPLDEDDMLQYAIEQSLVETSGACGVDARDDDKVDIWEVLRGQNVVGSDLLPEDDEQLQRGHRLSSHLLSPHRQQYGRYSPSPKHQPQSFPHSQLQLEPQTRGRSASAGAQFKNDLGYMKKIFKVLQESLLGAHANLQSGSPASDEDDDGGFRYVDPDLAMAMRLSQQEQRKFELERQQEQEMIEQALKLSLQEH

SEQ ID NO: 28594 - DNA, 16688 bp, DROSOPHILA
gtgtcttcttgatcaccatcctatattatatatagttattttattaaaattaaagcttttgatcgcctcattttctttgaaagattctgtccaattattttcattttaattgaaataaagagcagatgatactgttagtcctatgccgattacagccgattacatgcgttaaaggtgcaataataattctatctgttcatcaggtgtatctgttcatataggtgtatgtacatacgtacatactgtatatgtatattatgactatcaagtttcagtttttttttttctatttttagatcattatatgcagcagttcactttaaatgccaactactgcatttgttatacgccaatttgtctgtgcatcagaaccgatttgatgccaccgctgtgaaacgaacaaaatgaacagctaaatgaatgcattcttcgttaacgggtgggtccacccacaaagtcgaaattcttggcactcggcgcgacgaccacgcccactgtgcccagcgactgcgcagcggctgaatgggaagtggtggtggcggagaggatacccacaccatgatgaagcgcatgcatgatttccattttccattcccatgtgcagcatgtgcgaaaaacgttgcacgtcctctcgatggcgtcgaaaatcgttgcacggccgccacgcgaactctgccagctgccctttctgcaagttgccagaccttcggggtttgggcttgagtttgctgctggttgttgttgctgtagttgctgttgtcgcaggagggatgaagcccgaatttattgcaccgtctgacccccgcaatccacaccccctctctttggctttggcagcagcagcgcagtggcagcgccgcagcagcgcaggaaatgcgttcggctttcttcgccgccaaaaaacaaaaattgcttggctctttctttttcttttgcgcccatggaaattaagaaatttctgggttctccgaattctgcagcgcgccgtttatttatacacgcaattcttttaatattgtcattttcgtcaacgctatcgtcgccacaaaagaaatcgcaggtcaatacactccttgcaataacaaatgtatgtacatatgtacatatgtatgtacataaaacaaaatgagaatgcattttgcgggtggctggattaaatgctgtctgggatcggatgccagaacattttagcacatataaatggtaaatattaattataaatatagattacatataaattaaatattacgagtgaactatttgaactatattttaacaattaataatccagcagtttcaatttcttaagcatgaatattaagctctaatgtttactttgcaatcgatttagggggcagctatttatctgcattttcgatctgaatctaatcaaatcgacgacccttgcacggtgactggcaaatcagcggctatctgaaacggccatactctttgttaacaaatctgatgttctgaccattccaaacgtcgacattttttacgtgtgcggcgatatcataataaaaattttattgagtaagttgagcggtgccagcagaggcagaggcagcaacaaccattgcaaaaaaaatacaaaaactgcgaaggcggcgaaccacctttattaacttattctgtgcgtgtgtgtgtatagcagctgcggcaaatgccggttcacacacacacacgcatatcgactttcgttctgcgctggctgcgcagccgacgccgctgccaccgcgagctttgttctcgtcgaacttttcggttctcgtatttctcgacgagcaggcaacgcgcacggacgtgacgttctccgaatttcaggggaacttggacctcgagtagttttagaaagttaatgcccagcagctgcgaatcgcaaagaacccaatcaaatcgttaaatactacctaccaatcgatctcgtttgccttatgaagtagaagaaaagtggtggtcgttaagtgttatagtttccaacgcaagtgcaatttttaaatcaattttttacgttgtgtgtacgttacaactaaagactgacagctctaatatatcgggaagccgaaaataagtttatttccggcgagctgacacaagcagaggtaggaagtgcgaagaattagtgaattagtaaagctgaatgtacatgtatgtatagcccgaatacgacataacagcctaggtcaatattgtttaaagtggcgtgtgaatgtgcgcagagataacaacaacgattgttagttgctcagcagataataaacacacagaaacacacatacacgcacatcggaccacacactcgtgactagaacatattcacggaaatcgggaaagaaaaacaatagcaaaagcaatagcaacatcagtgcaagagagcagcacaattctaaacttgaaaataataattttataatatcaaagcgcgaaggttgtcgacgagtggctcgcccgaagagagccgagtgaaaccgagcgcgcacccgaatgccgaaaatcaagtatacgtcgctacgatcgcttgctcaccgcctttcagtgctactcagctaccatcaacaataacaaaaataatagcactgctaaacggaaaacagaaacgttcctcttctaacggtctcactgagttttgtaaattggtcattggctagtgcgaaaaggagagacagagagagaaccagagaactgtcgcagcgattgcgattacggttacgcggcgcagtgaaaaagtgaaaaagtttaggcggaaaacacttgcctctggtcgatttgcgcgtttggacgcgcgactccctcagaacttgaaaaataaaggaaaaatcggcaattaagcaaaaaagtgatcacacatcaagaagccaacttggattacgatttgcggtcgagaaggacttataaactgaattctccggactttatagaacaattttatggtgagttctttgcataagaacatttaaaatatatttaaaattttgtaatatttattcacatgtaaaaaaagacatcatgatttttttcattttttctggaattctattgttcaacattttaacgacttctcctaaaaatgtcccgcaatttacgtcaaacctaatatggcacgacaatgataagccccgaaaaagtatcacaacagatctataaatacgcaatcaatacaaaaaatcactcatacgccccatgatgcactcgtttaatttcctattgccatttcacccattaccgcaatgcagtatctattggcacatcgaaaaaagtccctaaaaacatacctccacagctactttaccagctgtttcatggtgactcaaagctcaattagcttaagaatcgaccttttgagtcatcatgacaataggctaatataaatcgttctaggtattcgccacttttggtaatggctctatcgatcctcaagaggggtttcctaagcattgggtgactcatgtgctggtgagtcacttatttggggtcttaacacttgacaggatcatgccatcaaattgtgatagcaaaaccatatgaacaggtgatctgtttaccagaagcgccatagaaagggaaagccttgacaattcgattacataccgaatctaatgatgatttgggctttaaccggagcattaggcaaataaccatgacactttaagtactttgacgataatctgtatccgaaattcagatccatagctttgttcagaaattacataaatttgattttatcacactttttatcaaatcatttgccaattttgtgtccgaaggtcagtgccaacgtcgggcgaaagtagaaataaacgagcaccaagaatcgaaaatgggcaccaacgagcaggttgctaaaaaaaaattcattgctgtcttaatctgggagaattgatattgaggtatttatgttcacaggaaattgtcgtcgcatagggcacaaaaacaaaaataccgattataaagcaagagaaaaacacaataagttaatgctggtatcgctatcgcgggcattactaagctgattttgatacgtctttctttctttcttttcgggccgcactcactcaagttgtcgtagctgcgttcattcacgttccacctgttggcactcattgggattgggattgggctgggcaacccgaactcttatctaatcactttggcgatattcaaatgtactgctgtatgtgggagcagctgctttatgaatggtgccgtgctcagattgtatgctgctggtgctggtgctggggatgccaagatatatgaccgatatgcgaacgaactgcccgattatagagcttattaaatatgaacgatttggccataaaaaagttggaaggcggaaatgctaactagtgatagtgatagtgttggtcgatggagcgggcgtagtacaatcgaatggtaaccattttcaatcttttgaagtactgtctgcatctatcaatattttaaaagcatttttgtattcattattaaagtatcacattttcaaacttcaattctaggcatatcaagtttgctctttctaatcgtatcgttttgtatctttgcacctgattgtattttgcaattattcttagcacttttaacttggcaccttggcaataaaccaaataagcgatatttataactggaatttatttttagagcagtgcgaagcaacaatgtcggtcggttgtttctggtcataaatgtgaaaactgtgatcaaatatcagcgaaagcgaaaagcacaaacgaagcgaaggccttatcaggcattctccgatttcatgcaggctatatagcatttcgctatatactctccatattttctgccacattttggggcgatgaccaagtcacatggcgaaaccctcgatttttcgactgattgggggacctaccctttgcctaccccattgagttttatgttggaacgcggcagcaacaattagggagacttttgttgctctgtatttgtatctgtatctgtatcgttggcagatacacacaacgcactggctcgagttgagatattctaacgcaaatggcgaataaagcgaaaaaagccggttcgcagacatgcgtaaaacctgcgcctctgtatgcgttcacgcgtatctgtgtgtgctgccaaaaatttctgtatctcttaggcacccccatggctccccgtgccccctaccctgcctatcctatcaaattcgccatattttcgtgaatttcgttactggtgccgttttggaagttctttagaagcgttgttgctgctatcgcttgtttgtttatcaagttcgagtgatgtatatacatacatacatacatatatgtatgcatatatttaggatgtccgaccgctcgcccaaccccctctcgcccatccaattgttgctcttttgatacttttataaataaaaaatgttgaccttggttaacaaattttatagcagtttcttgtgtcttgtttctaattgccggttctgccaatatacgccatacacacaaaaagttttctatggtcagtgttttgtgaatttcgttattcaaatgtactactcaagtttttgggaacttatttgatattaagaagggtacacgtgtcaaaaaaccccttgataaggctcttttaagttggaagcacagctgtgaatgattcctagattattgttatctattaagaaagcaaataatattttatgatgaccattctccgaatttaactattcattagaaagatttcatcagttggcgaaattctttaaattttataagtagtgtttgcatctgattaaattgtgcctaaaatttaatgaagaaatctaaaacattcttcaaaattcagaagttcagattaataattttgcgaaattccgaaacaatggctcgtgattaaagtaaatttattgccatctcactctgacttttgcaaatgtattttaagttgagcaatgattattcaatgttcttcataaaaacgttaaattattgtggccacattatgcttgtatgcgtgtggcacacagatacgcaaatttgtatataagcgcggtgcacaatacattaacaatgcgccctcgttgcagctgcagctgtgtgcatttgaaggcgaattgcacgagtgtgtgtgcgcaaaatacagcagcaaaaatgtttgccaagttcaaggacaagactgcagcgtcgcgtcgtcagcttttgacgctgctcgttggctgtacacgccaacgttgagcgctttcgtaccgagtgctcactgtaccgagcttcatttgaaggccagttgcgcttctgcgaaattcaagttcaaggtatcgaaagtggtcagtattatgtgaatatttcataacaatgtagtttatcaagagaagctagcttagttcaataaagtgcattcgaaaacagggctacatttctaacaagtacttggcatcacttttgtggttcatggcaatcaacctgtcaaacttgtttttgccaaaaaaaaaataacacacacatactcaaactccttctgcaatgttcaatgcaagatacgcaccactcgtttggaatcttccgctgagtaactggcgtagactataaattgatgtttgatgttcgcgtatcgagatcacttaaactcgaccagttctggcaacacacccccggaatgatgggcccttcgatttcgttagtcagagtgttatccgtaatgccggaagcttacggggttaactcgtttgccctcccctaatgcagctccaaaaatatcgaaagcttcggcactcccccaaaaagcaaaaagttcaaccgaatgtgtgtgcctggttatttttaaggtggtgccgtaaaaaccgtgtttcaatttggttccagaacaaaaggaacgagtatgtaaagtgaattcaatccccttttcggacaaagaacacaaaattcggcacgtaaaggcggcacttgtgcatgccgcccctttgttgcttcttttttgggatctgtactcgtattatttatcgtacttatttcggggttttcacaaaacattatggcttgactgtggttgcccagcgccgatcgcatctgtgtctgtatctgtatctgcatctgtatctgtatctggatccgaatccccgccccccaaaaggcagtgttttttggggcttcttgcggcaccaagacactcgtacgtattttttggatctcttttctctacacttttcgaaaaaatatcgctgtgagcttttttcgtagttcgttaacccttggctggattgaggttgcttcgtcgccagcgacgttgtttgccgctgatggcagcgttttatcgagcagagttaaagctgaagcggaactgcgttgggcaattctgtagctgcagttaaaccagtttttaaggggtttccttcttctgacccttgtctaataaaatatgcataattatttccaattttaaaccataccttcaaaatttaactaaatccttcaaaaaagtatgcaatgcaaagttacctagaccttgcacacacacacacagttatagaaaaagttcgcctgcaacgccaactgcagcgtcgacgcaggcagcgcgttcgcagaactcgaattcgactgcactctcacactcgcgacattgtcattgtgtgcgccgtgccgactcgcctcacactctcgctgttgtcttgaacttgaactacacgtggagggcgtgcatgggttttcgactcgctcgtcgggcagcagcaacacgggctgccgtaaggaggtcgtgcgcgagttttcgacagcctcacaatcaatgcgcgtgttggctcgctcttcttcttcttcctctcaccccactctcttgctgtcgctctctgcaatgagtaagcaatgttgtttgcggtgactgttgcagtggcagcaacaacaaaaacaacaacgcccagtgggtgggcggggtgttggttggatgggccaaacgaaagggaaggtttcctggctgcgccatttcttaattctgtatttctgaattgtatgtacatcagtacatatgaatgcttgtacgtgcatattgagatatgtatacagatgttgaaaaagtgaaaacacgtcattggactatggggaatttgatcttatttgttagcaaaaatgtgttattaaaaacgttgaaaatttgaaaatttgtttcttaacggattttaaaatgtttacgagatatttatttgcgacaacaaattcgaattccctatagtgcattgtgcttctgaatttatgtacacacatatgaatgtattcgtattgtagaatataattctggtattcaatttcgccaactagcgcaagctgacttgggaatattacgccacattttccagcttagcgattatgaagctccccccgacaccattctttgtacatcaacccttgcgactatagtatgcgttctcgctcatcgtaactgtaatactcgctgcctgcctgagtgcgtgtctttgctttttgacctaggccaacccaaccacttcgcccacgcaatttgtgcgtggcagcggcgacgcacactgcggcagaggcgtcgacagagcggcggcagagcagcagctgcgcagcctaagctcagacttcgtgtctagaccttcgctatataaatacaacaccaaagtagaatgctaaaatttctaaatctggcatatttcgttcagtcgttcgtacagctctcgttctctcatgtttcatatgcaaagattctatagtaaactgactttgttttcaaaaatatataacaagtacacgttttcaaaaaagaatatctatatattttaaaacatttagtatgttcataatttgagccttaatagtcgaaggttaataattgtgctttagactggaattttcaatccttccggccatattccccaccatggaatttccagtcactccaatttcattcgcttaatttcaatatcttatcgctgttgatagttctcgtttgataagtctgcctagagccctaactttagcgtacaatttcattgagggacatcctatgaattgaaaaacggcgaacgtgtcgtgttatattgccttatcttatcggggctcatcgaaccttagctagaatatgtatgtgaaatgttaacgcgatcctccggttggaatagatactctcgacgggagcagaagtaattttataaaaaaatccgattcgaggggggaagcgaagtgaaaagcttacaatttgcttatatttaagtgttcaatgaccccatcaaaagtccacaaagaagacaccaaaaagcaacaccgaatccaaaccaactcaatttatgtatctgtatctctgcgtatgtatctccacgtgtaaaatagctatgcatgtgtaaatagggtgtatttttggaagtgaaccgaagtgaatttaattataattttaatataaatacttcttttagtttagtttagtttcgtttgagcgtttcacgttcaatctggtatctgtttgtatctagctttcatactgaccgccaagcaactttactgatctatccaaacacggcgatcacttccattaaagaccagttttaagtcgctttatttcagagctatcccaacaaaataacggcactttaacttttccgaaccgcagctgaatcccctcccctcgtttttcccattctagctgccccccgttttgggaagcaactcataagagataattgtgtctttccccctcaaaaaatattgtgtcgttcataccttcagaaactttttggtcgggcaacccaaaagagcacgagcgcacgaatcgggggatcgggggatcggtgatcattctctgccctccaacaacaccgcactcactcaaaaatagtttttgtgtcgaatgttaatgaacttttgcgctagtttaacgcacagccagccgaataaacattcagacacaataacaacgaaagccgataaagttttttgaacctgccttcaccgaaacttttgtatttcaacatttgcttctcgtgctcattctgttttttgggagggtttcttataaatgttcgcttgttgaaggtggaaactggtcgttggctttctatagatggactgctcaaaatatatccctgagattttgtagcctctaaacgtatagttgccgcaattgttagttaattggtatgctaagtgtggcaagcaagttggactttggtactttaaagaataataactataagactgcgataagaactatcagaacttattgcctaattcgttgcatttatgactcaaatgctagaatcttatcaatgaaaacccaactaattacatcacttaaatgaaatcacttcagagttcaaagtttattcaatgcttgtatatgtacatattttcaattagtctgaaataataaacgtcgcagataacttagataccaatgaaatttccctgagctcggggaaattttggtgctccataaaagagaatgtcatcggaaaagtccgaaaccactcaaactcaaaaaaaaaagaaacactcgaaaatttcccttgtcatcgcactcaaacattttccaattgagggaaatttcagatccaatgggaccattcttgttggtggtggttgatttttccgtgacagggtttgaggcagatttttcgggaactcacccaccagtctccgttacaccatcgaaccgaaaacctcgggagcggcgatgtgaacataatctgaatcccattctactccgttaagtgttgtttgtacgggtgttgtgcgtgtgcgtgtgcttgtgtgtgtgtgtgtgtgtgtggtccacacctcgaaaatgaccgacttttcaatgaacgatattttgagatcattcagaaaaatgcgtatgaacaagggctcgggccagggcggtcagcaccaccaataccgcaatcatcagcaccaacagcagcctccgcaaaatatgcaacactaccaacacacctatcccgtgcaacagtcgaaggacttgaagaaaatcatcaaaatcatcaagaagaacctgatcaaggagaaaatcacgcgtcaaatgaaaatccttgtctaaaaatgtcatgagacgagctaaatgaatgaataaatcttaagactgctgatatacaaatcgagggactgatactgaaaaactgacacgagttcagcgctaaagtctgattttgtaaactcaaatcaatgaataaatttacaagtatacacattgaataagaaaagatctcttcaaacttataaactatattataaattagacttgcttacaattgaatgatttgacttgaacaatcaaaaagtattattaggaggaaaacctgtatggagcagtagcaagatgactgaaagcaagaatgatacaaaatcttgggcacccaaacaaatttggattaaggatgttctcaagaaatcgggcacggaactgctcgatatatccaagagtcccgcaaaggctgttgccgtcaaaaaatcgccggcgaaaggtaattgagatgcttttcctaaaaattcagaccgaaaaagttccctcacgacgccattttgttttggtatacgcaatttttgttttgggggaagttgtggggttcgttcatactatcataacaaaaaaaaaaaaaaatacaacagcgcgactgatacagaaagtgcgagcgagcaggatggcaacgggaaatgccggttggaaaccgtacgattcgtaatgctatctcccaaatatcccaagtgggacattttcgaggcagggttctcaatgaaatttttcccatttcctctggctctcactctcctgcgccttcgcttttcctccccccataagctctcgctaggttttccttattttggaaaaccccggccggcaataacagaaagtgcgtagcacaaattcacggggtgggttttcccctttacgcccttttttcctttggctcttacgagacttttcctaaccacccgtattgcactttctatctgcttccgtgtttttcctgagacgcagattgtgaattgatggggggcaaaggagttagaccttatactatggttaagctggctttgtagaaccacaaaaaccaaacaataggttgctaatataactaataagcagtatctaatttataatttcttgtattattacttaagtctatttagaaccaactattttggtcaggtatcaaactagttaactatggtcaaaaatctaatgcggctccttctttttcgccctcttccagattcagccacaaccaaaatggtttactattccgccaaccagctgcttataaaaacggaacaatctagtcaggcgcagttctgcctccaggttccgcctccactaacagcgacgaccacgagcgtgggcctaggagttccgccatccggcggccaacaggagcacttcgagctgctgcagacgccgcagcagcgacaaatgcaactgcagctacaggaccagcaccagcaggagcagcagcagtttgtcagctaccaactggccatccagcagcatcagaagcagcaacaacagcagcaacatgaaagtattacgaacgcagcacccacagcagctccatcagcccagcggatcaagacagagcccgtcggcggattcccagcgtcggcagccgtggtgtcgcaggtgcgcaagcccagcgccagcaaaccgcaattcaagtgcgaccagtgtggcatgacctttggcagcaagtccgcccacacctcacacaccaagtcgcactcgaagaaccaagatctgtcgcttaatggcgcctctggagccggcgttgctgcgcccgtctcaaccgcggccatcgagctcaatgatgccggtctgccggtgggcattcccaagagccccaccatcaagccgctggccaacgtggccgccggagcagatccctatcagtgcaatgtttgccagaaaacattcgccgtacccgccaggctggtaagtgtcacgaaaacagagatttgaaatatttggaccaccatatcagtgatattaataagtaatatatctccttcgcttttagatccgccactaccgcacccacactggtgaacggccattcgagtgcgagttctgccacaagctgttcagcgtgaaggagaacctccaggtgcaccggcgcatccacacgaaggagcgtccgtacaagtgtgacgtctgtggacgggcattcgaacactccgggaagctgcaccgccacatgcgcattcacaccggcgagcggccacacaagtgctccgtgtgcgagaagacattcatccagtccggccagctggtgatccatatgcgcacgcacaccggcgagaagccgtacaagtgcccggagccgggatgcggcaaaggtttcacctgctccaagcagctcaaggtgcactcgcgaacgcacacgggcgagaagccctaccactgtgacatctgcttccgggactttggctacaatcatgtgctgaaactgcatcgcgtccagcactacggctccaagtgctacaagtgcaccatctgcgacgagacgttcaagaacaagaaggagatggaggcccacatcaagggccatgccaacgaagtacccgacgacgaagcggaggcggcggctgcgtcggcagcagcatcaacgtccgcaggctcctccgccggatcgccgtccttgcaaggagtcagcagcaactccgagagcagcaaccactcgccgcccagctcgccaccggccacaaagaaacctcgccaggctcgccagccgcgcgtttccaaaaccgttgcagccaccctttccatccctacctcctcgccgctctcgcccagctcactcagctccacatactcgccatcggccagcagcatggcctcgccaccacccacatcggcccactacctgcccgtccagatggaggcggatgccttgagccgggacagcggcgtgtccagcgcccagcccgcccacagcacctatgcagacgaggagcccacagatttgagcatgcaacaggtccagggtcagctgccagaaagcactgtggactactaccaggcaccgccaagtctactcgaactgcagccacaacccgctggtctaaccatcaatcctgccctgcttgaagcggccagcattgcgcgtcgccatgacgacaacgatgaccaggtgcaggatgaggatgtgcacgcagccgcctggcaaatgatgcagttgtgccgcggccacggctccttacccccaacggagcagccggcgccaagccaccagccacaggtgcccactctgcacgtcagcgatctagcggctaactacgatgacacccatgaagccaccgtgctgatcgagcacttcaagcgtggtgatctcgctcgccacgggctgcacaagggctatgcaccagtgcccaaatatgagtgagtattttggtcccccaagccggatgcttgtgtttttgtctaagagtataactaaatcgaattgcttactattcccatcagatccgctctacccaatccggacgttgtgcgacgcgtggaggcggccatcggcctgcgttccagcacggagtcgccggaacgtagctcctcgccggagagcgactccctgatgatggccgaccggaacgtgatgacgctgccgttgcgcaagcgcaagcactacatgaacaagggcgacgacggtcaggtggattcggagaaggctagcggagatggcacctccgccgccggtggtgccgcttccgttggcgccggggatggacccgggtccaaggtgatgcgaatgagctcggtcattcagttcgccaaggcctcctaggggtccaaggccgatccccaatcagcattaagactgtccaaacaaattctaactgaaattagcctaagttttttctctgaggttcggggttaggcctggaaaaagaaagcatagaaacgtatggatatggcagtgagatagttttccagcagcgaaaatgaaaatgccaaaagtattaaaaaagggaaaaatttgttttaaaattaatattacctcctattacgttttattggcttgatccgagttttgttgaatgtttgatttgaaaatagtttcacccatattgcaaaatttcattttagtttggcatatacaatgtaggtatagtttgttttcctgtgttgtccacttagtcaaattgcagcaattggcattatgcgtattaagcattagcatataactaagttaattatatataaaagatcacttaacgacgcccaaacccaaacccaaacccaaatccaaaccgtacacaataataagttacgcgcataactacatatatacacatattaatgagaacgaaaaaccatggccatattggcgcttaatatttataaaatacatataatacttatttattatgaactctgctcgccaaacttcttccttcccctccacgattagtgtcaacggcatctttgacatcatgtacccatcattttatatgcattttatacactaaataagggaaaactgaggaaaaaggatcggtaactttaattttacacacggagaatattgaactgataaacaagaagaaagcaagcataactacgtttatatacattttcaaaccagaagataacaaatataattaagagcgtcagcatagtttttgtaaacgcagagttaatacatagatttaaattctaaaatcaaatattgcatgaaaaaacgcaaatgaaatctgaaaatcaataaacaagcgtgaaataaaccaattcggtgtatgtgtattttaatggggcgttttaatttaaaaaacttacccatttcgcttgagaaatcgcagatgaagtaactcgatccaattcggtgatgaaaatgtagatgcaccaatgttggaggttaataaccctcgttggaatattttaccatgtttgccacctcattgaatgcgaataaaacatcgaaatttcattactgaatgcatttttatatatcattcacttgtgactatacgaatggtgtgctaaacccaccacagttcgattagctaacattttgattataaaaatggttttacaattcatttgactgcttcaactagacgcagtcagttttcctgtctgcctttgtataaatgaaatattaattaaattttaaaaatcatgtacaacgggcaaagctgccaaacgagcaaggcttcgtttgcggtggctagagagataaacaaattatgatacaactaagcaaacattgcaattagtataagagataaggcagccggcacaaactatgcacttaaactaattaacatgatggaggaggggtgggacgacgctgggagtgctgggggggggaggagttgtggcttattgcagaaaactaaaccctgtttacaaactaataatgcaaatcgaataactctcttctggccattgagcatcagatgccaatgtaggagcacagcacgaacacggcgaaaatcatgacaatcagaaagacgatggcaatccaggcggggattgtacctaaaaagaagttggcagtgagataatttccaattttacaccaattttattgcttacgtctttgggacagactgtggatgcagactttgttgtccaccgaaatggacagaacggctgcctccgtgtcgctggaaatgggcggtccctcctcgttggtaataggcaggaactggaggccagttacgaacatggagtgtgcatggggaatgtggagcacgcgctgcaaaacgtaagcaaagaat

SEQ ID NO: 28595 - DNA, 5265 bp, DROSOPHILA
gcaattcttttaatattgtcattttcgtcaacgctatcgtcgccacaaaagaaatcgcaggtcaatacactccttgcaataacaaatgtatgtacatatgtacatatgtatgtacataaaacaaaatgagaatgcattttgcgggtggctggattaaatgctgtctgggatcggatgccagaacattttagcacatataaatggtaaatattaattataaatatagattacatataaattaaatattacgagtgaactatttgaactatattttaacaattaataatccagcagtttcaatttcttaagcatgaatattaagctctaatgtttactttgcaatcgatttagggggcagctatttatctgcattttcgatctgaatctaatcaaatcgacgacccttgcacggtgactggcaaatcagcggctatctgaaacggccatactctttgttaacaaatctgatgttctgaccattccaaacgtcgacattttttacgtgtgcggcgatatcataataaaaattttattgagtaagttgagcggtgccagcagaggcagaggcagcaacaaccattgcaaaaaaaatacaaaaactgcgaaggcggcgaaccacctttattaacttattctgtgcgtgtgtgtgtatagcagctgcggcaaatgccggttcacacacacacacgcatatcgactttcgttctgcgctggctgcgcagccgacgccgctgccaccgcgagctttgttctcgtcgaacttttcggttctcgtatttctcgacgagcaggcaacgcgcacggacgtgacgttctccgaatttcaggggaacttggacctcgagtagttttagaaagttaatgcccagcagctgcgaatcgcaaagaacccaatcaaatcgttaaatactacctaccaatcgatctcgtttgccttatgaagtagaagaaaagtggtggtcgttaagtgttatagtttccaacgcaagtgcaatttttaaatcaattttttacgttgtgtgtacgttacaactaaagactgacagctctaatatatcgggaagccgaaaataagtttatttccggcgagctgacacaagcagaggtaggaagtgcgaagaattagtgaattagtaaagctgaatgtacatgtatgtatagcccgaatacgacataacagcctaggtcaatattgtttaaagtggcgtgtgaatgtgcgcagagataacaacaacgattgttagttgctcagcagataataaacacacagaaacacacatacacgcacatcggaccacacactcgtgactagaacatattcacggaaatcgggaaagaaaaacaatagcaaaagcaatagcaacatcagtgcaagagagcagcacaattctaaacttgaaaataataattttataatatcaaagcgcgaaggttgtcgacgagtggctcgcccgaagagagccgagtgaaaccgagcgcgcacccgaatgccgaaaatcaagtatacgtcgctacgatcgcttgctcaccgcctttcagtgctactcagctaccatcaacaataacaaaaataatagcactgctaaacggaaaacagaaacgttcctcttctaacggtctcactgagttttgtaaattggtcattggctagtgcgaaaaggagagacagagagagaaccagagaactgtcgcagcgattgcgattacggttacgcggcgcagtgaaaaagtgaaaaagtttaggcggaaaacacttgcctctggtcgatttgcgcgtttggacgcgcgactccctcagaacttgaaaaataaaggaaaaatcggcaattaagcaaaaaagtgatcacacatcaagaagccaacttggattacgatttgcggtcgagaaggacttataaactgaattctccggactttatagaacaattttatgattcagccacaaccaaaatggtttactattccgccaaccagctgcttataaaaacggaacaatctagtcaggcgcagttctgcctccaggttccgcctccactaacagcgacgaccacgagcgtgggcctaggagttccgccatccggcggccaacaggagcacttcgagctgctgcagacgccgcagcagcgacaaatgcaactgcagctacaggaccagcaccagcaggagcagcagcagtttgtcagctaccaactggccatccagcagcatcagaagcagcaacaacagcagcaacatgaaagtattacgaacgcagcacccacagcagctccatcagcccagcggatcaagacagagcccgtcggcggattcccagcgtcggcagccgtggtgtcgcaggtgcgcaagcccagcgccagcaaaccgcaattcaagtgcgaccagtgtggcatgacctttggcagcaagtccgcccacacctcacacaccaagtcgcactcgaagaaccaagatctgtcgcttaatggcgcctctggagccggcgttgctgcgcccgtctcaaccgcggccatcgagctcaatgatgccggtctgccggtgggcattcccaagagccccaccatcaagccgctggccaacgtggccgccggagcagatccctatcagtgcaatgtttgccagaaaacattcgccgtacccgccaggctgatccgccactaccgcacccacactggtgaacggccattcgagtgcgagttctgccacaagctgttcagcgtgaaggagaacctccaggtgcaccggcgcatccacacgaaggagcgtccgtacaagtgtgacgtctgtggacgggcattcgaacactccgggaagctgcaccgccacatgcgcattcacaccggcgagcggccacacaagtgctccgtgtgcgagaagacattcatccagtccggccagctggtgatccatatgcgcacgcacaccggcgagaagccgtacaagtgcccggagccgggatgcggcaaaggtttcacctgctccaagcagctcaaggtgcactcgcgaacgcacacgggcgagaagccctaccactgtgacatctgcttccgggactttggctacaatcatgtgctgaaactgcatcgcgtccagcactacggctccaagtgctacaagtgcaccatctgcgacgagacgttcaagaacaagaaggagatggaggcccacatcaagggccatgccaacgaagtacccgacgacgaagcggaggcggcggctgcgtcggcagcagcatcaacgtccgcaggctcctccgccggatcgccgtccttgcaaggagtcagcagcaactccgagagcagcaaccactcgccgcccagctcgccaccggccacaaagaaacctcgccaggctcgccagccgcgcgtttccaaaaccgttgcagccaccctttccatccctacctcctcgccgctctcgcccagctcactcagctccacatactcgccatcggccagcagcatggcctcgccaccacccacatcggcccactacctgcccgtccagatggaggcggatgccttgagccgggacagcggcgtgtccagcgcccagcccgcccacagcacctatgcagacgaggagcccacagatttgagcatgcaacaggtccagggtcagctgccagaaagcactgtggactactaccaggcaccgccaagtctactcgaactgcagccacaacccgctggtctaaccatcaatcctgccctgcttgaagcggccagcattgcgcgtcgccatgacgacaacgatgaccaggtgcaggatgaggatgtgcacgcagccgcctggcaaatgatgcagttgtgccgcggccacggctccttacccccaacggagcagccggcgccaagccaccagccacaggtgcccactctgcacgtcagcgatctagcggctaactacgatgacacccatgaagccaccgtgctgatcgagcacttcaagcgtggtgatctcgctcgccacgggctgcacaagggctatgcaccagtgcccaaatatgaatccgctctacccaatccggacgttgtgcgacgcgtggaggcggccatcggcctgcgttccagcacggagtcgccggaacgtagctcctcgccggagagcgactccctgatgatggccgaccggaacgtgatgacgctgccgttgcgcaagcgcaagcactacatgaacaagggcgacgacggtcaggtggattcggagaaggctagcggagatggcacctccgccgccggtggtgccgcttccgttggcgccggggatggacccgggtccaaggtgatgcgaatgagctcggtcattcagttcgccaaggcctcctaggggtccaaggccgatccccaatcagcattaagactgtccaaacaaattctaactgaaattagcctaagttttttctctgaggttcggggttaggcctggaaaaagaaagcatagaaacgtatggatatggcagtgagatagttttccagcagcgaaaatgaaaatgccaaaagtattaaaaaagggaaaaatttgttttaaaattaatattacctcctattacgttttattggcttgatccgagttttgttgaatgtttgatttgaaaatagtttcacccatattgcaaaatttcattttagtttggcatatacaatgtaggtatagtttgttttcctgtgttgtccacttagtcaaattgcagcaattggcattatgcgtattaagcattagcatataactaagttaattatatataaaagatcacttaacgacgcccaaacccaaacccaaacccaaatccaaaccgtacacaataataagttacgcgcataactacatatatacacatattaatgagaacgaaaaaccatggccatattggcgcttaatatttataaaatacatataatacttatttattatgaactctgctcgccaaacttcttccttcccctccacgattagtgtcaacggcatctttgacatcatgtacccatcattttatatgcattttatacactaaataagggaaaactgaggaaaaaggatcggtaactttaattttacacacggagaatattgaactgataaacaagaagaaagcaagcataactacgtttatatacattttcaaaccagaagataacaaatataattaagagcgtcagcatagtttttgtaaacgcagagttaatacatagatttaaattctaaaatcaaatattgcatgaaaaaacgcaaatgaaatctgaaaatcaataaacaagcgtgaaataa

SEQ ID NO: 28596 - protein, 791 aa, DROSOPHILA
MVYYSANQLLIKTEQSSQAQFCLQVPPPLTATTTSVGLGVPPSGGQQEHFELLQTPQQRQMQLQLQDQHQQEQQQFVSYQLAIQQHQKQQQQQQHESITNAAPTAAPSAQRIKTEPVGGFPASAAVVSQVRKPSASKPQFKCDQCGMTFGSKSAHTSHTKSHSKNQDLSLNGASGAGVAAPVSTAAIELNDAGLPVGIPKSPTIKPLANVAAGADPYQCNVCQKTFAVPARLIRHYRTHTGERPFECEFCHKLFSVKENLQVHRRIHTKERPYKCDVCGRAFEHSGKLHRHMRIHTGERPHKCSVCEKTFIQSGQLVIHMRTHTGEKPYKCPEPGCGKGFTCSKQLKVHSRTHTGEKPYHCDICFRDFGYNHVLKLHRVQHYGSKCYKCTICDETFKNKKEMEAHIKGHANEVPDDEAEAAAASAAASTSAGSSAGSPSLQGVSSNSESSNHSPPSSPPATKKPRQARQPRVSKTVAATLSIPTSSPLSPSSLSSTYSPSASSMASPPPTSAHYLPVQMEADALSRDSGVSSAQPAHSTYADEEPTDLSMQQVQGQLPESTVDYYQAPPSLLELQPQPAGLTINPALLEAASIARRHDDNDDQVQDEDVHAAAWQMMQLCRGHGSLPPTEQPAPSHQPQVPTLHVSDLAANYDDTHEATVLIEHFKRGDLARHGLHKGYAPVPKYESALPNPDVVRRVEAAIGLRSSTESPERSSSPESDSLMMADRNVMTLPLRKRKHYMNKGDDGQVDSEKASGDGTSAAGGAASVGAGDGPGSKVMRMSSVIQFAKAS

SEQ ID NO: 28597 - DNA, 4847 bp, DROSOPHILA
agttttcgacagatcctctgcttcctctgctggctgtacacatcgaagagatcctccagctgttgggccagtcggtgctcctccaagagttgaggatgcaagctgaaccgaagttgtttgaggcacaatttcaggcaacgtctggagggcaggcccttcaactcacttggaggcatgggagggaagaacacgctctgaaatctcctatggcacacactgcgatatagatgtttccccatcaagaaactcgcaggcttctgtccacttagctgaccaatcagatcagagcccaattttccggacttgcttttggactgctcctggtagcggttcagcatacggatctgggagtccttcaactcactcaaatcgctcaaatgcaactgaaagtgcagggtattactcggtcggtaaagtaagctctcatcatagtagtggcgctgcttgaatagctgaccccaggccagaggaggatcgtgcagatcgatatgtataaatgtctgggagggcgaatccgttggttcctcagccagttccccacccgaatcttcgtcactctcctggcaatcttcaacagcgaaatcgttctcctgctgcatctcaccctcaaatccatgaaagaactgcaggctaagtgcctccatgtcgtgttctggaccagagattctgccttccgttgcccttatcaacttttgcacctcctgctcccttttccgataccctctggtggtatgggtcttgcgtttcttctttgcagtcttcctggatagagcggcttccatgttacataggttattacaaacggaaaatgccaggcaaacaatattccgcctgctttgacctttcaactggttgccatgggcaactgacttgaccactgttacacacctgctcaccaccagctatctatcgtctatcgccttgaatgaaacatcaaaaaaacataccccaaacgtattttgttttcgttttctttttgctgtttacatacaaatacatggcaaatctactattaggcatactggaaggaggaggggtgtgcgcaagaaaggtcatttaattagatgttatgttcgcaattgctgattgagttgaagtttacttttgggcttataattcgtatgttcgtatgttgtatgtataggcaaaggttccgcttagagttgtttgcaagcagacgcgtgctactgtattggataatggattagggccctggcatcaaccagggcgtagacgcgtcccggacacgaaatgtgaggcgacaggatcgcttcgaagtaggcaggggacgacagcgttggagtggcgttgagggggtcgtctactccagcagagtgacttcttccttgactaaaaattcaacaatttcttcatccacttcgtcagtttccaggttgtctgtgtccacatctgttgcgtaaggataatatacatatagaaatcggcaaattttaaacaatttgtttcttgagaatacttacgccctcgcagcatgatgcgacgactcttctgctccgcccactcggcaatacgcttgttgcggtactccataaaggtctcgcgcagctgcgagcgcttctcgagcagctccttggaggcacgggtaaggcgcaggcgatccttttgttcgaaggcagcgtagtacttcttcaagttcttcttgatctccttctgcttctcctcgctaagcagggtgggaggacgcgggcgccacaagaactgcacaaagttcttaagaatggtacgcttgatgatgcggccctggaacgtgtacatgttgaagccggtatcctctttcaccttccatgacgagacaccagtcacaacgtagcgtccagtgggatcccactcgacctcggaagcgcggaaatgatcgggcgatgccgtgatgatgtaatcgttggtggagtccacaaactcgaaggtacccatggtgaggttggccattacgataaactgaccgcgtggcgaccagaacagatgtgtgcatgacttcttttctagacgcttcaccaagctgggcttaacgcccttgttcacctcgtagaagctcacattcgacgagttggtctcgccgtgaatgatggagaacttgttgccgacgggctcccaggcaaaggccaaaataagctcacgaatctccacagagtcgacgggaatctccttctcgcgcatgtggaagatctcaaagttgtagaacatgcccagaaacttgacgtccaggtccttcttatccttcttcaactttgagtaacgatctaccttaacgcacagatagtcgccggacttttgccaatgtaacttgcaatcggccacatggaaaaggttcttgttacggatctcacgcttcttggggatctccatcagggtaacgcgggcgggtatttggttctgctcctccacccagtaggcaatcacgttgtctgtgggggaccaagagaagccacgaatgccgggaatcttaatggacttcaggtccagaagatagaaagagggtgtctcgtagatgtggatcgaattctcgcccatgcgggccacaaacttgtcgtcgtgcgaccagcggaacatagaaagaaccgacatgccatcggcaacaaacgaacgtttctcggctccagtgcgaatgtcccagatgatgatcttttggcccgtgggtgtcggtccgtaagtcactaggtaattctcgcagggcgaaaactcaacgaattgggtaccaggatggggaaacttctgaatcttctggaagctactgccaccccagatggccacaccgggtttgtggaaggtgactacataagtacccaggggcgaccacttgacgaaggtgtcggtgaagcgttcgcgagtctccagctcaaagggttcgggcaatacgttttgccagaaaccaacctgcacgcagttgggagcggtctccgctgccacgcagtactggtcataagtgtccgggtcattgatgaagttgtatagatcgctctgcactttgaaggtctgcacggttggcggctcccacttctcggggatgttttcgtacctgccaagattaaattttattaatctcattgcttgatgcggatgcaaggagaacttacttttggaaatcggtgaagagattgacggcaaaggtgtggtttttgtctaggcgatgattgttgagcttcttgacggcttcctccgcctgtctggcctgcttgtactccatgaaggcgtagcccttggtcttgccctcctcgtcgacgggatagaccacattgacgatttctccgtagttcgaaaacagcttgttgatgaccaacttcagcttctccaggcgcaccggctccacctttgggatattgtccactaccaccacactctcgacgccatcggcctccgaggggcgctgggccaacatgtcgcccagcagatctgaaagtgcatcacgaatatatttaattagatatgcaaatgcaaactttcgcacaccgcacacggattgaggttagatcgccgcgtgtgatgcgctggcagtcggtgattttcaccttcatcactaatgttgtccacgaacccgggcggatcgtcaaagttcggctcctcctggtaatcactgtcgttcgcatccgtaccggagtgctcctcgcttttcttcttggccatattcagcgatctatttgcaattttccgtcattaaacacacaagcacaaagtgaaaaaggaagagcgagatgccgcatttgccagtcaaggcgaaacactgttttgtgtgaatggttagtgttgccaactactcactgcgttgataacgcggcggggtaacttttattaatatttataaatacatatgtacatgcatatattttaatttactgtttcttagatttatttgtatttatactgcatatgtttgcttgacagcaatgacaataatatctggatccttctcttatggatccttaacaacagaatcttaggtgcttatctggtgataatgtgttaaaacggctaaatattatcattttgtatttcatgtacatacaattatttaatattagtcaatatgtattaagcaaagtataacctataacaactagtttaatcgttctttaataatacatacattttttccgcttgcaactctagcgatggaagttttgaagcatgttcaaccgattttttagaattaggcatcaatcgatttgttgccgataagccaaaaccgattgcatcgagtaatcatcggctggggttccatctctcacatgaaaatttgtaagattttagagcagatcggtgtccgtgattttctcaatttaagcccaatttgtagtattaaagctgttgaaaaatgcagcggggacgagcgcgaaccgtgtgaaatgcatgcgaaagtcgtcggtgcagcaaatcagtgcgaaaaacatcccaaatgtgcgtaggccccacactcactctcgcacacacacccgcgcgcacatacacagctttttcggtcaccactcgttcgctgtgggtgcgagcagtaccacactagcagtgtcgcacaccagcactgccagtgcagcgggagcgacagagaggcaaacagcgggcggcggacaacaacagtgcgaggcgaaggaaaatgttttcatttacttaagtcggcggttccccaaagaaaattggaaacttgctggcttaaaacggattgggaaaacattaattataccatggacgggcggttgaacactgcgatgggttgaaaagtgcgtaaatggcttgtccagacgagcaaatcgcaacagctgatgcagcagcatctcgagaaaagcgaacaggcaactgtaaagtgttctctgttattgtcgcactgcagccccgccccc

SEQ ID NO: 28598 - DNA, 2477 bp, DROSOPHILA
aaattaaaatatatgcatgtacatatgtatttataaatattaataaaagttaccccgccgcgttatcaacgcaatcgctgaatatggccaagaagaaaagcgaggagcactccggtacggatgcgaacgacagtgattaccaggaggagccgaactttgacgatccgcccgggttcgtggacaacattagtgatgaagatctgctgggcgacatgttggcccagcgcccctcggaggccgatggcgtcgagagtgtggtggtagtggacaatatcccaaaggtggagccggtgcgcctggagaagctgaagttggtcatcaacaagctgttttcgaactacggagaaatcgtcaatgtggtctatcccgtcgacgaggagggcaagaccaagggctacgccttcatggagtacaagcaggccagacaggcggaggaagccgtcaagaagctcaacaatcatcgcctagacaaaaaccacacctttgccgtcaatctcttcaccgatttccaaaagtacgaaaacatccccgagaagtgggagccgccaaccgtgcagaccttcaaagtgcagagcgatctatacaacttcatcaatgacccggacacttatgaccagtactgcgtggcagcggagaccgctcccaactgcgtgcaggttggtttctggcaaaacgtattgcccgaaccctttgagctggagactcgcgaacgcttcaccgacaccttcgtcaagtggtcgcccctgggtacttatgtagtcaccttccacaaacccggtgtggccatctggggtggcagtagcttccagaagattcagaagtttccccatcctggtacccaattcgttgagttttcgccctgcgagaattacctagtgacttacggaccgacacccacgggccaaaagatcatcatctgggacattcgcactggagccgagaaacgttcgtttgttgccgatggcatgtcggttctttctatgttccgctggtcgcacgacgacaagtttgtggcccgcatgggcgagaattcgatccacatctacgagacaccctctttctatcttctggacctgaagtccattaagattcccggcattcgtggcttctcttggtcccccacagacaacgtgattgcctactgggtggaggagcagaaccaaatacccgcccgcgttaccctgatggagatccccaagaagcgtgagatccgtaacaagaaccttttccatgtggccgattgcaagttacattggcaaaagtccggcgactatctgtgcgttaaggtagatcgttactcaaagttgaagaaggataagaaggacctggacgtcaagtttctgggcatgttctacaactttgagatcttccacatgcgcgagaaggagattcccgtcgactctgtggagattcgtgagcttattttggcctttgcctgggagcccgtcggcaacaagttctccatcattcacggcgagaccaactcgtcgaatgtgagcttctacgaggtgaacaagggcgttaagcccagcttggtgaagcgtctagaaaagaagtcatgcacacatctgttctggtcgccacgcggtcagtttatcgtaatggccaacctcaccatgggtaccttcgagtttgtggactccaccaacgattacatcatcacggcatcgcccgatcatttccgcgcttccgaggtcgagtgggatcccactggacgctacgttgtgactggtgtctcgtcatggaaggtgaaagaggataccggcttcaacatgtacacgttccagggccgcatcatcaagcgtaccattcttaagaactttgtgcagttcttgtggcgcccgcgtcctcccaccctgcttagcgaggagaagcagaaggagatcaagaagaacttgaagaagtactacgctgccttcgaacaaaaggatcgcctgcgccttacccgtgcctccaaggagctgctcgagaagcgctcgcagctgcgcgagacctttatggagtaccgcaacaagcgtattgccgagtgggcggagcagaagagtcgtcgcatcatgctgcgagggcatgtggacacagacaacctggaaactgacgaagtggatgaagaaattgttgaatttttagtcaaggaagaagtcactctgctggagtagacgaccccctcaacgccactccaacgctgtcgtcccctgcctacttcgaagcgatcctgtcgcctcacatttcgtgtccgggacgcgtctacgccctggttgatgccagggccctaatccattatccaatacagtagcacgcgtctgcttgcaaacaactctaagcggaacctttgcctatacatacaacatacgaacatacgaattataagcccaaaagtaaacttcaactcaatcagcaattgcgaacataacatctaattaaatgacctttcttgcgcacacccctcctccttccagtatgcctaatagtagatttgc

SEQ ID NO: 28599 - protein, 690 aa, DROSOPHILA; identical to SEQ ID NO: 9966

SEQ ID NO: 28600 - DNA, 8369 bp, DROSOPHILA
caaccaccgacgatggctttcggtttattcttgaaaatctacaaaaacaataccggtctttgtatcatatatgaatatttatatatatatatataaataatgttgtttaggtatttatgtatgtatatttaagctaggtcaacgcaaaactctcaaaatagttgttttccacactattgcactgttcaaattgttttgtatggttaaaaacattcgttctcacgttcctacatatttgacggtttattttaagcatttatcctgcatttaaattggcacaaagcgcttaatctttgataatgagaaacagctaagataggtttatgtttgcaactggacagaacggaatctgtgtgaattttaggttagttacacattattccatttaaatgaatctaattttgtataatgtatatttacaattaaaaaccttgatttaaattctttggctctcgaaatcagtgcaaaatgtcgcatcttttcggtcaaagcaaatgcaaaatgattaaaataattgtataggatacaagcttataaattaaacaacagtgctggacattgtaaacaaagcttaaaacatttttgtactttacatcaatcaagtgaaaattcaaacaaggcttaatatttcgctggctgtaagcggcatatctaaaattcttttggtttccttcgtgagtccattgaatggcggtaaaaaaggtcggcaatgtttcttataaatttgttgtataaaagtcgaagtaaaatttagatcgtttaaaattgagttcccttggtttgcattgtatatgatatggaatcattatctaaccactatacaaaagaaaagactcacgaaggaatcagccagagatcgcaaatgaaataacagtggatggcattaagttggctattcttcggggacccagactatctggtgtccccgattacattatctgtttttggctaagcatgcgagtatttaaatatgtttataatatacgatccattgcacagcctagaacagcatgtaggaatgatcacgttccagtcgcgacttggcgcgggattgtatattgccaatcggatccgagggcggtggtatgccattgatctgatgggtaggttccttgtagaagaactcggtccttccattcttatggccataataaacggagtcgttggatctataaatataaatattaataaaaccaaagaaagaaggtttatgattgttgaacatacctcaagatcaaatctgtaagatgatgaccactggaatgtatcgagtgcatgctctcgaggatattaagctctaggggattccaagggccattccgctgcagaacatcccacttggagtccacgcacatgaagctatagttgctcccgtcgcgattgtcgccctccacatttacatttaaggtttgattcagttgagattccatgtgcgggaacttggccacacaaatgtcgaactaattggaagatatattaacaatgtttatagacgaaaaaaatataaattcacttaccatcttctgcacaacctgctgttgttgacaagtaccctcctccatgagcaataataaggtcatattctgctgtccgcatatatagagttcagttctttgcaagccatctggttgaattggacccggaggttgagcaggggctgtggtcaaggcagccaatgcatccactgcatcctcgcacttcagtgaacttcgccgtgggaaaaccttactggttgtcagcggagtttgtatctcgatgggcgttgtttcgcttagagccagaacagatagtttggccatcaggggtgttagtggtactccaccagctccactgcgtccggacgcacgctctccgaaagtagattctcctgctgatttcaatggcagcgtcatggatcgcttgtccagcggagttttggctgcggaaacgttgagattcctatcggcagacgatgcttccgctgcttgctgtctcatgtgctcgtcgagcttttggatctcggcgttgaactcctggaactcggctaccagagcggctagctcggcatcctcgtgcgcctgctcactagcaacaccccacaatttacgatactgatccagaaattgctgaaacaaactgcgcgagatctgctggccgttagtgttgaataccggataggtgggatcgctgatggtccgcgaagtaatcttatcatcgtcctctatgaaatctggcgaatccgaagagacatcaccattaccgcttccatttcgattcacatcggttttgaggccatgcgtaaaattattcagtttcttggagatggcgcgaagtgcatcctgcaggtctgcagatgatttgcgtcgtgtgagctgtttgtttggattgctaatgaagttttgaaagaatttctccacatccacttttagagaatttcgacgcgaatgtgtcttgccattggaattgtgaatatcctcctctttgccctcatcttcgggatttgcgcaaatggacataacattggccaccggcagtaccttgttctcggtcattggagtattgcaaacgctggttcgtccaatgaactgcggataggaatcggtttcgtcgaaatttattgatgcaatgccagactccggtagctctttgctctgcatgctttttatacgcaacggcaggtgggtgggtcgcatagatttgggcctggctggtggtagctgttcaactgctccctgctgctccggggcgtgctcctcctcgggtatatgggtaaaaatgagcgacttgtcccgctttatcttacgcttggcatactgaaacggcataccattttgggtgagctgagctgtgttcatctgcaggttctgggcgcgctgtgcctcgccagctaactggcggtactgcatatgctccaaataaaccaccagcatctgaacgccgttgggtatgtggaactcaggatggttggtcacttgctcggccgcagtgcggatgtgcagaggatcggtgagtacaagatgcttggtcaccatatcgctcagttgcgaggcaaccaccctaaaagacaaggtatttgaatttacaatttgttcagactttagccggattaactgacttgttgtggtacagaatcgctccgccaagtattccctttgtctgctggcaactttgcaacgtttgtatagcctccaggaatatatgactggccgtctggaagagaatcttggttatctaggtaattcggtttgttactttaaccactcacctttggcattcgcagcctcggcacattttgaaatgtatttccgttgcgctgcagcatcggcagatatgtttcaaagatgtggtacagtttctcgctgagattccggcggttcagggcgggcggtgcagcatactgggcatacaatgtctggacgtcacggtggaaaaacttgagcagggaactcagcagatcagcacgatgttccaacagttgatctccaatatttcgatcagtgccaattgcctggaaaacagaatactccatcggattaataaaagaaaagtgaaattatgtgattcgatttaccagaataaaacgaccgaattccttcagcacaaattttccattctgcagcgccaggatgcggggattaaagaagcaatccttgaggaaatacgacgtgcccataagctgaccacacagagccaccttctgggagtcggacacccagcttggatggaagtagagcaccgccgatatgggatcatccgcctcgtctgtgagacactctgtgtcgtagacaaacacaatcatcgtctccctgtaaatttaataaagttcaagggttattgttattgagactttgagacggggaaatatattttagcttagtttctaatgttaaggaaaagctttggagaaattacgttcaactattttcccttgtaaaatgtgagctgaatcttaaaacttgttcaagaattgatacaacaagtgctgtagcaaaaccggtatgcaaaaaaaactttacacaaatacaaattggatttatgcaatctcaatttgtttgacgttgtttaatgcaattcattgtagatatttgtgcactggaaacacagtttgagtatgaaatgagcaacctttcggtgaggattgaggtctgctgcttctgctgcaccttctgccatcgcttgtgcttggttttgcgccaatcccgaaacattgctcctgaaatctagtggatttcggtgcttccaagtctagcgctgcatcgtggctccttatcacatttaacgaccgacgattctgataagtcaacaagccaatagcgccgtacaatgccaactgtctgatttcgatgtggcccagctgcctgatacgaccaactgtgatacgagagcgtgatcagaattccgctcacgcccaagtgaaccagcaggtgagaagtgaggtgaaagcttccgagtgtttccatcattgcggttgagcgggtgggtatacgagcaactatgctctcgtataatgtattcatccatgtggtgaccacttcaatgacgaaggtatcgattccagttttagagtgtaacaaattcgattaccaatgctatattttataaaaagctctcggaggcaaatgattttcaaatatcattaataagattttatatatgtttaacaacagagaccttgtctgttttattgcgcgtaatacaatgtttatttaaactatcataacaactctatccagcagctgttttcaacacattgggtggcaactgttgaatctggttcacagtatccgattggctagatatgctatacttggccacatatccatcgggaccagctttgtaggtgaccagcaggtatttcgaaccaggaaaacgctggctataagtacccttaacttgaagcacatctggcgcaatctgttcaacaatctcatcccgcgttgaaccgtcgagatcaatcctacaatatggaagccatttggttgagcttacagcattatcttaacttcattttttgtttacctcagggaataattattctcagatggcactagcacaactccattatcgtttatgggcggcacgaatttggtaactgaagttgtgggcgccgaattcaccagacttagaaacagaatcaaaaacacctgtagcaaatattatacaacgattggcaggcaaacttatgagaaaaactcactgagcttaacaataggttagccatgatgatcttttggcttttggttagcgactgatgtttttagatagctgacagcaaacagctaacaaataaacagctaaacttaaaccaagttcaaaactggaatcattaataaacacattcaaaaatcgttctccgcttatagtatagctataagatgtgatttttgaatactgtcaacagggatttacataacataacaataaaacttgccacagtgaatcattgaccgagtcacctaataagttgctttaatagggcttagccaattaacaataataagtataacaatttgttatagttaagaaagtctagctagtttattgatttctataaactagtgagtgattataaacttacttattgttacttataaatacagaattggtttaatataaattacggcaagttgtggttttaatgttttctaaatattcagtcaaaatcctatcccgctgcagttttcagagcaccgggactgaggaataatggtgtgtcaggaggcggtgttggaggacccttgccgaagctgtatttggcaacatatccattcggaccagcctcataggtgacaataagattggcatcctgatcctcgaagggctggttaatcacacctttaacctgcagatgtccggcttcattctggctcacggattcctggcgaatagtgccacccggatgttcgattctacagattcagaactaactaagtaaagggaagctctcttctggactttgattagctacctgagaaagtattcttgattgaggggctcaagttgaaagccatttgtgcggatttgcggaacgatagttggtgaaatttgcggtgccgcgttgaccgcagtgaagatgaaaattgccaacagctaaatattattatgatttgaaaatggtatgtttaaactttgatttgcatatgcgaaaagactactcaccgcgaaaaaatcgcgagacatgatgacctgtctgtggttgaacaaaaactatctgaatatctgaacgcttggtcagttttgagcccaaaacgaaggctggttgatttaagtagcaagcaaacgagttttgatttttacgatgaagatacaaaaaaatcacacatctgcttcgcgagaaacacttcagtacacctactaattcaaataattgcaaaattcccatcttataaggcaattgaaaaagggacacaataaaatcgactcatctagcaaaagcattcggtagccttcgctgtgacaattaacttggttcaaatcaatctccacacgtcatgcccaatgcaaaatcattctgtcatgataaacttgtgactacattaaacacctggcctatgaaattttcttggggagttcccaagtcaaattttaattctttctacgtgagattcttacagttctaaaaagtctaccccggtatatgactaataggattttgacctttaagacacggtccaattgggacttgtaaaaaatgatttctaagaatttgctaaaaataatttgaaatggaaaaatacttaactgaaaataagaaataataagaaaatatagaattgtttacccaaaaataaaaaaattttaattgtaaaattgtcaattaatttatttttaacaatatatgtatgattacacagtttttatagttgaataataaaaacttttcaataattaaaaatttgacatagagacaaacttttgcattatatatgcactttctgtatttattaaatgtttatactaaaaggttttttccattataataatatctataaaaaatttttatagaaaaacacttaagaccaatcaaatttcattttaccggtttgccaatcttttgaactttgacattttatcaatttcaccgatcggaatcgatacttatctcggtcttcttcttccccctttccatcacacttcctgtgtatgtgaatgcaaatttaatgggcgagggggtggtgggtggctgcgagggcggaggctgcagctcaaaacaaacacaaaaatacccccacatacacagcgcgccgcccacacacacacacgtactcgcagacgcaggcacatagacgatgtaaagtttttcactgtttataaaaccttatcaatttcacttactttgcagccattgtgtattgcacttgtaacctctcgttgtcggaagattattgcactttatttctgcttcattttattcattagtttttatttttctttgcagaggaacttacggcgctgccataccttagtgttactaaaaatcaccgtattgcatagctgctggtagtcttcaatactagcattccgttcggtatatttgtgtggtatattttaggaggcccactgcggtcacttttaaaatggccgtcgatcagtgaagttgtatacacttttttcgtgttccgtgtttttcgcttaatttgatcgtttatttaaatgtttttatgaattttggtgagttgaaaagctgatcgaatgcagcctgctggcaaaggattcgatcgaaaaggattttgtgcaaacttcgagtgcccgaaatagtgttttctatccccaaagacaacccccgcatagcgtctctcacctccaggcaacaacaacacacccaaaagagacgcactggaagcataaaaagcaacaaacaggttttcattgtgtacagacgtgtgttgctctaccctctcgctctcgcccccttaatttatgcgcatgcagcaacagcagcagaaacaacaaaaccaacaacatgtataaagcaacataagaaacaagtaatacaagaaaataaatcattgagtgtgagtgtgtgtgcgtgcatgttggctgtaaacagcagccaaagtggtaaagttgagtcgaatcgagtcgagtcgaaaagagaagcggataataagtggcaaaagaagctgaagcaaaagagttagccagcttagaagtgacgcgtagctacaggtgaatatatcggacttgtttttcaagcgcgagacaggcggtggccgctggtcgctgctcgctagtctgtggaacagtaaaacgggtttatggttctgatgtccaaaaagaaatagaattgaatcgattagcagcctaatcaatttaccactgagctgcaacggtaaacggcaaatggaagttgcatttacatacaaacgtatgcacaagttccagcccat

SEQ ID NO: 28601 - DNA, 2549 bp, DROSOPHILA
tgcaataatcttccgacaacgagaggttacaagtgcaatacacaatggctgcaaaggagacgatgattgtgtttgtctacgacacagagtgtctcacagacgaggcggatgatcccatatcggcggtgctctacttccatccaagctgggtgtccgactcccagaaggtggctctgtgtggtcagcttatgggcacgtcgtatttcctcaaggattgcttctttaatccccgcatcctggcgctgcagaatggaaaatttgtgctgaaggaattcggtcgttttattctggcaattggcactgatcgaaatattggagatcaactgttggaacatcgtgctgatctgctgagttccctgctcaagtttttccaccgtgacgtccagacattgtatgcccagtatgctgcaccgcccgccctgaaccgccggaatctcagcgagaaactgtaccacatctttgaaacatatctgccgatgctgcagcgcaacggaaatacatttcaaaatgtgccgaggctgcgaatgccaaagacggccagtcatatattcctggaggctatacaaacgttgcaaagttgccagcagacaaagggaatacttggcggagcgattctgtaccacaacaaggtggttgcctcgcaactgagcgatatggtgaccaagcatcttgtactcaccgatcctctgcacatccgcactgcggccgagcaagtgaccaaccatcctgagttccacatacccaacggcgttcagatgctggtggtttatttggagcatatgcagtaccgccagttagctggcgaggcacagcgcgcccagaacctgcagatgaacacagctcagctcacccaaaatggtatgccgtttcagtatgccaagcgtaagataaagcgggacaagtcgctcatttttacccatatacccgaggaggagcacgccccggagcagcagggagcagttgaacagctaccaccagccaggcccaaatctatgcgacccacccacctgccgttgcgtataaaaagcatgcagagcaaagagctaccggagtctggcattgcatcaataaatttcgacgaaaccgattcctatccgcagttcattggacgaaccagcgtttgcaatactccaatgaccgagaacaaggtactgccggtggccaatgttatgtccatttgcgcaaatcccgaagatgagggcaaagaggaggatattcacaattccaatggcaagacacattcgcgtcgaaattctctaaaagtggatgtggagaaattctttcaaaacttcattagcaatccaaacaaacagctcacacgacgcaaatcatctgcagacctgcaggatgcacttcgcgccatctccaagaaactgaataattttacgcatggcctcaaaaccgatgtgaatcgaaatggaagcggtaatggtgatgtctcttcggattcgccagatttcatagaggacgatgataagattacttcgcggaccatcagcgatcccacctatccggtattcaacactaacggccagcagatctcgcgcagtttgtttcagcaatttctggatcagtatcgtaaattgtggggtgttgctagtgagcaggcgcacgaggatgccgagctagccgctctggtagccgagttccaggagttcaacgccgagatccaaaagctcgacgagcacatgagacagcaagcagcggaagcatcgtctgccgataggaatctcaacgtttccgcagccaaaactccgctggacaagcgatccatgacgctgccattgaaatcagcaggagaatctactttcggagagcgtgcgtccggacgcagtggagctggtggagtaccactaacacccctgatggccaaactatctgttctggctctaagcgaaacaacgcccatcgagatacaaactccgctgacaaccagtaaggttttcccacggcgaagttcactgaagtgcgaggatgcagtggatgcattggctgccttgaccacagcccctgctcaacctccgggtccaattcaaccagatggcttgcaaagaactgaactctatatatgcggacagcagaatatgaccttattattgctcatggaggagggtacttgtcaacaacagcaggttgtgcagaagatgttcgacatttgtgtggccaagttcccgcacatggaatctcaactgaatcaaaccttaaatgtaaatgtggagggcgacaatcgcgacgggagcaactatagcttcatgtgcgtggactccaagtgggatgttctgcagcggaatggcccttggaatcccctagagcttaatatcctcgagagcatgcactcgatacattccagtggtcatcatcttacagatttgatcttgagatccaacgactccgtttattatggccataagaatggaaggaccgagttcttctacaaggaacctacccatcagatcaatggcataccaccgccctcggatccgattggcaatatacaatcccgcgccaagtcgcgactggaacgtgatcattcctacatgctgttctag

SEQ ID NO: 28602 - protein, 834 aa, DROSOPHILA
MAAKETMIVFVYDTECLTDEADDPISAVLYFHPSWVSDSQKVALCGQLMGTSYFLKDCFFNPRILALQNGKFVLKEFGRFILAIGTDRNIGDQLLEHRADLLSSLLKFFHRDVQTLYAQYAAPPALNRRNLSEKLYHIFETYLPMLQRNGNTFQNVPRLRMPKTASHIFLEAIQTLQSCQQTKGILGGAILYHNKVVASQLSDMVTKHLVLTDPLHIRTAAEQVTNHPEFHIPNGVQMLVVYLEHMQYRQLAGEAQRAQNLQMNTAQLTQNGMPFQYAKRKIKRDKSLIFTHIPEEEHAPEQQGAVEQLPPARPKSMRPTHLPLRIKSMQSKELPESGIASINFDETDSYPQFIGRTSVCNTPMTENKVLPVANVMSICANPEDEGKEEDIHNSNGKTHSRRNSLKVDVEKFFQNFISNPNKQLTRRKSSADLQDALRAISKKLNNFTHGLKTDVNRNGSGNGDVSSDSPDFIEDDDKITSRTISDPTYPVFNTNGQQISRSLFQQFLDQYRKLWGVASEQAHEDAELAALVAEFQEFNAEIQKLDEHMRQQAAEASSADRNLNVSAAKTPLDKRSMTLPLKSAGESTFGERASGRSGAGGVPLTPLMAKLSVLALSETTPIEIQTPLTTSKVFPRRSSLKCEDAVDALAALTTAPAQPPGPIQPDGLQRTELYICGQQNMTLLLLMEEGTCQQQQVVQKMFDICVAKFPHMESQLNQTLNVNVEGDNRDGSNYSFMCVDSKWDVLQRNGPWNPLELNILESMHSIHSSGHHLTDLILRSNDSVYYGHKNGRTEFFYKEPTHQINGIPPPSDPIGNIQSRAKSRLERDHSYMLF

SEQ ID NO: 28603 - DNA, 3167 bp, DROSOPHILA
cttccatgctccactcccccaaggccggtattaaagtcacctgctctttatctccatcagcactccctttttcatccgttggcgctaagtcgcccgattaataacaatcattgcgagcttatcagatgcacttactgaacgggatccacggtcatccaatccgtatagatgagcagcagttgtccaccgaatacatagccaatcgctggtccaacggtggccattgtgtagtagatgcctgcaacaatgaacttctcaattaaactttaactctacgaacaattggatgtgccatttgtcaagaattcaaaagttattccaattatcattatcagttagtcacatctttattttgcatgaaaaaggtcttgattctgctactcctgtttgtacagtacgtttcaaagttataaagatatttcaagatcaaagatagttgcttcgataatcttgcccagtatgcaatatgtttattagctggatgtgccaaaaactattgagaagcgagtagccaatcggcggattgtgcctttatttatttatctttgaaacgcaccgtgccatcacatcctggagctactccatcagccccaaaaggggggcctgcctccccgggatgaagcgaatttcaattgtctcaatgccagacagcgatatccaggaaggcaaagcggcaatgctggacgggtttgataatttcactgtcgtcttcggatggcacgataaacctaactaagaggcaataaatttcagctgccgctggctctggcccccattcccagatccgcgtctcaactgagtcagcaacaatctggctctttaaaattgggtcaaacgaggggggaaaggagcggagaaccctcgccaggattgggatcgaactgagaactctgggcggggggcgcaagagcaaatagcaaatagtatttactccctttgtagccgacgacgtcgtttggcaataaggcgaataaaaataaatatgcatgtgtgagcgaaactagcagatactttgatatcgcagccaggacaccaccagcccaatcctgcccagaagtgtgggtatttgtgcatacttcatttgttgtgcgactgcggcagacaaaagtttcggcgcgtcttatcaacggctgcgtcgtttgcaacttacccaagtaaacagatgacatcttctttgagacgttctcatcgatatatgtgacgcccagcgtaaagaggggcgatgctccggcaccgtggagcaattgggcggccaggaagagccacaccgtccaggtcagattctcgctctgcccctcccccattgcgttcagttcgcaagcggtctgcaaggatatacgagttaatcgcagcgggtcgccatggcaagtgtctgcttaccatcgactggctggagttggagttgaacggcaatcccgttgtctcgcacacattggcctcggcaatagtggcccggtagttacccaccaggaaattgggcagcaggaagaccagcgatcccatgcccatcacaatcagtccgatggcgatgaagcgcggcttggaggcaccacgtcgtccgccgtagtaggtaactggtactaggcaggcgaaggaggccagatcgtagccactggccaccagtcccatttgccgggagcgaagtccaaagcgacgctcgatggtggagatggacacattgatcaggccgttcacgatgagacctggagggaaaataaacttttcaaacattagtaatgaagatggaatgctaggaaaaactatatatttagattggcgactggattttttagatagataatcctctagtaaaactcgaagtggatgccttcttccattgcaaaatgtgtagcaagctttttagggcaagaaatgtcagatttattggataaatctattaaatataaactaaactaattcgaagatggattgaagtttaagatggataggatttcatctctaagacacctttcgctcaacattttggcatccttctttaaggatcatcccccagaggcagagttatgacatggtgttgtatgttgtaacttcatggcagactatcaacagattgtcgcaaaaaaaatagaccgtaagggtgagggcgggtgtagtcctgctgacagtgcagaggggaggggaattgagtgccacgggggcgggtcataaattaaatatctgcacgacaaattgattttgagggcttaggcgaattttctatcataaataaatatctgttagttgcgggcccgcccacccccgccacctgctagtccattgttgcttagaatatttcttttttctacaacaaattcaatttatttttcaataatcgccagaaagaagaggtctgctggtcatctttggctggaaaggtgttagaaagcggaggaaactttgtaaagggagcattggatatattgttagtggatggggacacttacaagtcatttaccccactaagtgcaataatttaatagatcccaatggaaaccttgagacggggaaggttttactcgggagtgcgagtgcgaatgtgacctttgtcacttgaagtataaagtgaagtgtagacggctgtattggatacgtgacaatctaggattttgcatgtgcatcgatgcattttccttgggatgcgtgcgatgcacaaagatacaaattgtttgcctaattagcagtaaagatatttacatgaaattatgaaaaatttaaagagtataactaactgattagtacaataacatatatgtatctgaagattactgcctatgcatttatcaaagttgatctctagaatcgtaatatacacatgttcacatcttccgcataactgccatttctaattcatgcatatgaattatacgcctaaattactcatttccataggaaaacgctgaactcgtagccataaaaacaacaataaaccatttgaactggatgcacgacgaacgcgaccatccaaaattgttgcggatgatttatgttaatgccgtgtcaactgattaatattttcggtcacgtgccgcctcatccgcatccgtaagccgagccacgggcggccggctggttgttccaactctgtgtcacccacatccaaacggaagccttcgcacgtcgtgggtcagtcggaggcgggagcaggagcccattccattccatcccat

SEQ ID NO: 28604 - DNA, 633 bp, DROSOPHILA
atgacccgcccccgtggcactcaattcccctcccctctgcactgtctcatcgtgaacggcctgatcaatgtgtccatctccaccatcgagcgtcgctttggacttcgctcccggcaaatgggactggtggccagtggctacgatctggcctccttcgcctgcctagtaccagttacctactacggcggacgacgtggtgcctccaagccgcgcttcatcgccatcggactgattgtgatgggcatgggatcgctggtcttcctgctgcccaatttcctggtgggtaactaccgggccactattgccgaggccaatgtgtgcgagacaacgggattgccgttcaactccaactccagccagtcgatgaccgcttgcgaactgaacgcaatgggggaggggcagagcgagaatctgacctggacggtgtggctcttcctggccgcccaattgctccacggtgccggagcatcgcccctctttacgctgggcgtcacatatatcgatgagaacgtctcaaagaagatgtcatctgtttacttggtcgcacaacaaatgaagtatgcacaaatacccacacttctgggcaggattgggctggtggtgtcctggctgcgatatcaaagtatctgctag

SEQ ID NO: 28605 - protein, 210 aa, DROSOPHILA
MTRPRGTQFPSPLHCLIVNGLINVSISTIERRFGLRSRQMGLVASGYDLASFACLVPVTYYGGRRGASKPRFIAIGLIVMGMGSLVFLLPNFLVGNYRATIAEANVCETTGLPFNSNSSQSMTACELNAMGEGQSENLTWTVWLFLAAQLLHGAGASPLFTLGVTYIDENVSKKMSSVYLVAQQMKYAQIPTLLGRIGLVVSWLRYQSIC

SEQ ID NO: 28606 - DNA, 3803 bp, DROSOPHILA; identical to SEQ ID NO: 14455

SEQ ID NO: 28607 - DNA, 1803 bp, DROSOPHILA
ttctgcccaaaaataatatataataataaaaccgcttcacaaagtaaatgtcaccaaaagagaaggcagttcaagaagcaaccgaggagctgatttgcctttttccctccgcagcagtgtccaggccagaagatccgtccacatcgttttagctgtgaggtatgccctcgacctgatatgaatcacatgcccgccgaatgataatcgactccacccaagacctagaaatctgaaatgacagagaaagtgactaaactggcgctggccagtcgccttatcgtcctcctggtacaattggtcgccaacggagccctgccagagcacaaaccagatgtattccggatgccggtttcgtcagatcagaatgcctcctggatagacaaggtgattaagcgctgcttgggaggattacggcactgggatggagaatactttctgcatatagccgagaatctgtacagctacgaaaacacgttggccttctatccactatatccggttgtcgtgcgtcacgtgggacaggccgtggaggccatcgggatctccttatcacaggaatctatcctgctggtggtggctgtcgccctgaacttctggctcttctgcgagtcagctaatttgctgtttcagctcacccaagtattgttcaacgatttaaacaagagctggaatgcggccctcatctactgctttaatccggcaaccattttcttcaccgccgcctactcagagacctttttcgcctactccagccttcatctgatgctggagtgctcgaagccgacgggtagcttccgatatctgcgtttgggaaccgccttagccgcctgtttactgtgccgctcaaatggattaatcaccttgggatacccgctctacttcttcggacgccaactgctactcaagaacaaggagcccaacacctgcatgcagctgacacaaatgacgctgaccattctgggagccattgggatactgcacacctactatttctacatatacaggctatactgtctgccgaacacaaggccaaaccatccgcagcacattgtggactacgcagtggaacggaagtacctattgtctggccagggctctgaaggatcaccttggtgccagtacacgttgccgttcccctacacttacgtgcagtcgcactactgggatgtgggcttcctgcgatactacaagtggaaacagctgcccaacttcttgctggccctgcccatgctgagtttcatgcactggcactgctacgactacatgcagcatttggccaaagcggtctgggccaaattgacgccctctggcttcaaggagctgataagggaccacaccacattccctttcgtgctgcacgctgcgattctcacccttgtctgcaccgtctacgtgcacatccaagtgtccacacgcctcctggcctcggccacacctgttttctactggtttgccgctgaccacatgcccaagacactggcccaactaaaactgcgttcgaaggcaggagctctctttgtatggtgcaccacttatagtttggtgggcacggtgctattcagtaataattacccgtggacgtgagcaaaatgattgaagtaaaaggagcaatataactcgctggttgccaaagagactgttcatccgcatggatttcttttttagtgtgtaaataatcgtccaagttctcaaaattcaattgttgaggcgctcaaaagtattggtttcccatttctatttccatatatcatatacaaaaaagtaaaaaataaaattgttgaccattttagaaaataattgtaa

SEQ ID NO: 28608 - protein, 449 aa, DROSOPHILA; identical to SEQ ID NO: 14457

SEQ ID NO: 28609 - DNA, 6225 bp, DROSOPHILA
aggccggggtaattggctgttatttataaaaatgtgtaaacaattgatgcgaacgaggcggcgcaaacagaattgagtgggggagttgccacatcgctggtgtagatgcgtgcacgctggccttgtccaacactgttcagccagctgtttactctttacgcgggaagcaaagacgccgaaatctagacggaaaatcaaaagtgcccaccaagtaaaagcagataagcagcagcaaaatggtcgagcgcatcgaggatcttaacctgccgaatgccgtgattggccggctcatcaaggaagcactgccggagtcagctagtgtcagcaaggaagcgcgagcagcgatcgcccgagcggcatctgtgtttgccatcttcgtgacatcctcgtcgacggcgttggcccacaagcagaaccacaagaccatcacggccaaggatattctacagaccctcaccgagctagacttcgaaagcttcgtgccctctctgacgcaggatctcgaggtctatcgtaaagtggtcaaggagaaaaaggagagcaaggccagcaagaaggattccaacactgccgaaaatgccaacgccagtgccaccgcaacagcagaggaagcccccgagtgattacgaataggagaaactatacggatcaattatcctcttcagtcattaagaacaaagctagtattgagcattaacaaaaaacattaaacataggcattatctaagaacttcacttgtgttttgtcactttcctcaaagactaaattatgttgttagtcaacgtttacatgggattaatttgggattgtaagtgacggttggaattacacccttaaataatgccgcatttcaatccagtccgatctagttttttacgccttcattcaaagtatataaaggtgtcagaataatatttaagtatttcagtaattatttgtttatatatgtgatcagaaaatcactgttttaaaaatcatccagatagataaccgcgtgttctttccagcactggaaacagctgtttaaaaaagcgcgtcttatcgcaacaaaaagtttagttagttattattttgcatgttttatacaattaatattttagtagaaaatgggagttacgggcttgtggaagctcattgagccgtgcggcaagccagtccccgtagagactttggagggcaaaatcctagcagtgggtaagcatcgtttttcgccacctaatgaaatacttgctgattggagtacttttcgtcctgcagatatatcgatttggttgcatcaggttgtgaagggctttcaggacaacaagggatcggccctgagtaatgcccatttactgggtctattccatcgtctctgtaaattgctatactatcgtgtgcgaccggttttcattttcgatggatgcgtgccgcagcttaaaagggacactattgtgagttataataggggaatatatcaaattcactctctaaattaaatcctctttatgtcaccccttcaggcacgtcgccagcagcagaggaataagctcagcaacgaagctgatcgcattcaggctttgctccttcaatccctggccaaagaaaaagtagtgcagcaagcgctgggcaagaatgcagagctactgttgaaatccccggttaagcgaccgcctccagctaagaagaacgacgaggatgacttgtttaagcttcccgaactgccggctgcatcggtgcaagataatcaagatgaaagcgagcaggacaccagtgccagtgcctcagacagctcctttgacgagtcaaccgctcgacattcttacaactctagcttacaggccatcgatgtaaagagtcagcattttcggaatctgccagccgatgtgcgacacgagatccttacagacatcaaggagacgcgcaagcaatcgtcgtggggccgtctgcacgagttgcccgcccgcagcgatgacttctgctccttccagatgaagagactcctcaagcgccgagccgttcaggaaagcttagagcaggcggaacaggagatgggcggacatacgcttacctatgcagagttgtgtgactttttcaatgaggagggcattctcaccccaacggccattgaacagtgcacccgacaaattagctcggatgaacatacacgattcctgctggtcagggatcttaaaaagaaagcaatggagagcaccaaacaagaggttaaaatggagatgattgaggaggtacccgctgaggaggaggatgagaagccaagcacttccaccaagaaagaggctgtgaaaagtgtggacctaggcacagagttcgatgaagatttggccaaagcactgtctatgtcaatggaggagaccaaggtgtacgatgaaaaggactacgagtacgactcggaccaagagttgcgcctcaatcgagctcaaaccaagcaattgcgccatgcggccaagggacctgcacgggcctatatgattgaatacggcggaatgaacgacgaggaagttggcaacatcatggaggccactcagttcaatgacactcaaagccttgaaaagttgctagagatcacgacagtcccgaccgacatggctgacaactcgattgaggaggccaaacttatttcacaagctattgaagagagcaaacaactatcccaagcaattgaggaaagcaagaagaatcttaacgaggacaaggtggagattgtagatactgataccgactcagacttggaggaagtaatggaagttcaggagctggataaaggcaagaagaatcttgagatttgtgttgatattactggccaagcggattcgaatgatctgtttgcggatatttttgaggatggagaggcaaataaaatagagaaaactataagcgtcgaggaagacgatgactttatagaagtgaaagacagtgaggaattaaaattggatactgaagatgaaaataaaccaataacgaataagagtattaaagaaagtaatgaagtcaagccgttcattgatgaaattatcgaagtgaaagatagccaagaagcggttcctgcagaacctaatctcaaacccgatctggaatcaattttaaatgatctgaaaaaacaaacggctgcggttaaagatattcagctaaacgtaaatgaagaagaaaaaccaaaaccaaaggtggaaatcagttctatattggatgagctaaaagtaaagatggccgacgttaaaaacatcactctagataacgtgaaattaagcaatagtgtccctatcatactatcctccgatgacgaaagtaccttgaaatcctcgaaaatagttccgaagcaagagctaattgagttgtgcgacagcgacgataataaaaacaatcgcctatcaccgaacaaaacgccaagcaaaaacaagtccattaaggacttttttgagaccagttacgtggtcaagcgaactcccgacaaatctcaagcgtcaaacgaaacttcgccgggaacaccaaagaccccgaagcccttcttcagaaagagaaccccgaagtccggacggaaacgagctagtgatgccaatgaggacagtgatgaggaagtttcgcccactaaaaggtccagtaaggcctcgaagtctctcttcgagccaaaggagccggaagaagaaaagactgtagatccggaggtgtgtattgttctgattaatatgccagagtctcttaatattattcattattatattattctctttattcatgtaatgttttacccctacaggagattatcaaagatgctgcagaggctcttaaatctcaaaagacctcagaagaactgcaggagttggctacaaacttagctcaggagcgaaaggaacttgaaatcgagcggaatcggcaagaccgaatgggcatgtccatcagccagcgcatgagcatcgattgccaggagctgctgcgtcttttcggcattccgtacattgtggctcccatggaggcagaggcgcagtgcgcctttctcaatgccacagatcttacccacggcaccatcacggatgatagtgatatctggctttttggtggtcgaactgtctacaagaacttctttgcacaaaacaagcacgtgatggaattccgggcggaacagatcgagcaaacgtttaactgcaacaggggtaaactgatccagttggcctgtttggtgggcagtgactacactacaggaattcatggcattggtgctgtaacggccctggagattttggcctccttttccggacaggatgcgaatgggccaggtatctgcaatcaatcggtgcttcaaacgctaatcaagttccgcgactggtggcaagcacacaagtgcagcaatcttccacctggcagctcggctcgccttgctctgcgcaaaaaacttaagaacatcgaactgcacgagggttttcccagcggtgcagtggtggaggcatatttagcgcccacgatcgacgacaatcgggatgcatttagttggggcacaccggatgtggaatcaatcagagaattcacgcgaaaatctttcggctggactacttcaaaaacggacgacattctgatgcccgtgatgaaaaaaattaacgagaagaagatacagggttccatacgcaactactttacggcaaagagtgctctgcgagttcaacaaccgcacgtcagcaaacgtgtccaattggcaattgacaagatgtccggaaagatcgatgagacgccggagaaaccgaagaaggtgacacgcacaagacgtgcaaaggcagctccgccaacagatgatgatttggccatcgcggatgtcgcgacaaaagctgcccgtcccaaacgcggcaaacgaaaagctgcacctgaatcggtagttttggatggggaacttccttccacatcgcagtcgataccgaagcctgaaaaatgtcctcgaatacctagcagcgttgaagttatacctcaaagggaaaaggatctggagcagatgcgcctcaataaagcaaaggcggcagagattcttaaaaattcagcgaaagccaataggaaataagcttaacaaatctattaaatataactttatagaaatcatctagtgaggtttgcattttgtatttagtgtttcacagcaacctttaaaaactacgtctgttttttttttatattttttcgttgttttttttttattgtaaaactaagtactataagcacaacctaaacatgatttttaaacgatataatgtacgacctgctgcctaccgtatatataacaaatacctttcaatgaggggtttcagaaggcgcaggacaaaagcgtttagattgcaaaaaatcttaaatcatcttttgagtgaggagggcaatttgattaacagaatccaaaagatgtccaagcataaaacccgggccattttggctgaatccattaaattgatacagcaaaaaaatcgtgaacttcaaacaaattatcggcaagatgaaaagaatgaaaaaagactgaagaaactattacgaaaattaaactatcataaaaaacaaagcttatttctcaaaaaaatgttaagttatctgaaaatgcaaattaatgatcacgattgcagtcaaacaactaaacttaatatgggagaaatgttaaggtctcaactaagagtaatgaaaaatcgaaccataggcaacataaaagaagcccaagaatgtatttatgttgcaaggagtttatgggcaagccatttacgatatatgagaagaagtaggtcttggagacgcaaaccaaaatattcatttaataaatccatatggatgttcttaaactcactaaaatttcaaacgaatgtcaaaacaacaaaggataaggacaacaacaaaaacgttttgcattcaaaaggaccctacacggtgactagaaaattgaattttttcgcttcgggagaagatataaatgtaaagtcaagtagaaaacatattcatagacgacgcattgtgcggccaaaacaattaaacccaataaactttgatttattgaaggatccaaatgaagtttctcaaaaaagaagcattcataacttaccagcatcaaggctaaaggttaaagtttatccccgaaaaaagattgaaacatacaatgcagcggatgaagaaatatcaccttacacagatttaacacaagcgaaaatcgcatttggcgataaaacattcaataaagaagaaaaccaggaggaaacctggagcaggccaca

SEQ ID NO: 28610 - DNA, 4064 bp, DROSOPHILA
ctttccagcactggaaacagctgtttaaaaaagcgcgtcttatcgcaacaaaaagtttagttagttattattttgcatgttttatacaattaatattttagtagaaaatgggagttacgggcttgtggaagctcattgagccgtgcggcaagccagtccccgtagagactttggagggcaaaatcctagcagtgggtaagcatcgtttttcgccacctaatgaaatacttgctgattggagtacttttcgtcctgcagatatatcgatttggttgcatcaggttgtgaagggctttcaggacaacaagggatcggccctgagtaatgcccatttactgggtctattccatcgtctctgtaaattgctatactatcgtgtgcgaccggttttcattttcgatggatgcgtgccgcagcttaaaagggacactattgcacgtcgccagcagcagaggaataagctcagcaacgaagctgatcgcattcaggctttgctccttcaatccctggccaaagaaaaagtagtgcagcaagcgctgggcaagaatgcagagctactgttgaaatccccggttaagcgaccgcctccagctaagaagaacgacgaggatgacttgtttaagcttcccgaactgccggctgcatcggtgcaagataatcaagatgaaagcgagcaggacaccagtgccagtgcctcagacagctcctttgacgagtcaaccgctcgacattcttacaactctagcttacaggccatcgatgtaaagagtcagcattttcggaatctgccagccgatgtgcgacacgagatccttacagacatcaaggagacgcgcaagcaatcgtcgtggggccgtctgcacgagttgcccgcccgcagcgatgacttctgctccttccagatgaagagactcctcaagcgccgagccgttcaggaaagcttagagcaggcggaacaggagatgggcggacatacgcttacctatgcagagttgtgtgactttttcaatgaggagggcattctcaccccaacggccattgaacagtgcacccgacaaattagctcggatgaacatacacgattcctgctggtcagggatcttaaaaagaaagcaatggagagcaccaaacaagaggttaaaatggagatgattgaggaggtacccgctgaggaggaggatgagaagccaagcacttccaccaagaaagaggctgtgaaaagtgtggacctaggcacagagttcgatgaagatttggccaaagcactgtctatgtcaatggaggagaccaaggtgtacgatgaaaaggactacgagtacgactcggaccaagagttgcgcctcaatcgagctcaaaccaagcaattgcgccatgcggccaagggacctgcacgggcctatatgattgaatacggcggaatgaacgacgaggaagttggcaacatcatggaggccactcagttcaatgacactcaaagccttgaaaagttgctagagatcacgacagtcccgaccgacatggctgacaactcgattgaggaggccaaacttatttcacaagctattgaagagagcaaacaactatcccaagcaattgaggaaagcaagaagaatcttaacgaggacaaggtggagattgtagatactgataccgactcagacttggaggaagtaatggaagttcaggagctggataaaggcaagaagaatcttgagatttgtgttgatattactggccaagcggattcgaatgatctgtttgcggatatttttgaggatggagaggcaaataaaatagagaaaactataagcgtcgaggaagacgatgactttatagaagtgaaagacagtgaggaattaaaattggatactgaagatgaaaataaaccaataacgaataagagtattaaagaaagtaatgaagtcaagccgttcattgatgaaattatcgaagtgaaagatagccaagaagcggttcctgcagaacctaatctcaaacccgatctggaatcaattttaaatgatctgaaaaaacaaacggctgcggttaaagatattcagctaaacgtaaatgaagaagaaaaaccaaaaccaaaggtggaaatcagttctatattggatgagctaaaagtaaagatggccgacgttaaaaacatcactctagataacgtgaaattaagcaatagtgtccctatcatactatcctccgatgacgaaagtaccttgaaatcctcgaaaatagttccgaagcaagagctaattgagttgtgcgacagcgacgataataaaaacaatcgcctatcaccgaacaaaacgccaagcaaaaacaagtccattaaggacttttttgagaccagttacgtggtcaagcgaactcccgacaaatctcaagcgtcaaacgaaacttcgccgggaacaccaaagaccccgaagcccttcttcagaaagagaaccccgaagtccggacggaaacgagctagtgatgccaatgaggacagtgatgaggaagtttcgcccactaaaaggtccagtaaggcctcgaagtctctcttcgagccaaaggagccggaagaagaaaagactgtagatccggaggagattatcaaagatgctgcagaggctcttaaatctcaaaagacctcagaagaactgcaggagttggctacaaacttagctcaggagcgaaaggaacttgaaatcgagcggaatcggcaagaccgaatgggcatgtccatcagccagcgcatgagcatcgattgccaggagctgctgcgtcttttcggcattccgtacattgtggctcccatggaggcagaggcgcagtgcgcctttctcaatgccacagatcttacccacggcaccatcacggatgatagtgatatctggctttttggtggtcgaactgtctacaagaacttctttgcacaaaacaagcacgtgatggaattccgggcggaacagatcgagcaaacgtttaactgcaacaggggtaaactgatccagttggcctgtttggtgggcagtgactacactacaggaattcatggcattggtgctgtaacggccctggagattttggcctccttttccggacaggatgcgaatgggccaggtatctgcaatcaatcggtgcttcaaacgctaatcaagttccgcgactggtggcaagcacacaagtgcagcaatcttccacctggcagctcggctcgccttgctctgcgcaaaaaacttaagaacatcgaactgcacgagggttttcccagcggtgcagtggtggaggcatatttagcgcccacgatcgacgacaatcgggatgcatttagttggggcacaccggatgtggaatcaatcagagaattcacgcgaaaatctttcggctggactacttcaaaaacggacgacattctgatgcccgtgatgaaaaaaattaacgagaagaagatacagggttccatacgcaactactttacggcaaagagtgctctgcgagttcaacaaccgcacgtcagcaaacgtgtccaattggcaattgacaagatgtccggaaagatcgatgagacgccggagaaaccgaagaaggtgacacgcacaagacgtgcaaaggcagctccgccaacagatgatgatttggccatcgcggatgtcgcgacaaaagctgcccgtcccaaacgcggcaaacgaaaagctgcacctgaatcggtagttttggatggggaacttccttccacatcgcagtcgataccgaagcctgaaaaatgtcctcgaatacctagcagcgttgaagttatacctcaaagggaaaaggatctggagcagatgcgcctcaataaagcaaaggcggcagagattcttaaaaattcagcgaaagccaataggaaataagcttaacaaatctattaaatataactttatagaaatcatctagtgaggtttgcattttgtatttagtgtttcacagcaacctttaaaaactacgtctgttttttttttatattttttcgttgttttttttttattgtaaaactaagtactataagcacaacctaaacatgatttttaaacgat

SEQ ID NO: 28611 - protein, 1257 aa, DROSOPHILA
MGVTGLWKLIEPCGKPVPVETLEGKILAVGKHRFSPPNEILADWSTFRPADISIWLHQVVKGFQDNKGSALSNAHLLGLFHRLCKLLYYRVRPVFIFDGCVPQLKRDTIARRQQQRNKLSNEADRIQALLLQSLAKEKVVQQALGKNAELLLKSPVKRPPPAKKNDEDDLFKLPELPAASVQDNQDESEQDTSASASDSSFDESTARHSYNSSLQAIDVKSQHFRNLPADVRHEILTDIKETRKQSSWGRLHELPARSDDFCSFQMKRLLKRRAVQESLEQAEQEMGGHTLTYAELCDFFNEEGILTPTAIEQCTRQISSDEHTRFLLVRDLKKKAMESTKQEVKMEMIEEVPAEEEDEKPSTSTKKEAVKSVDLGTEFDEDLAKALSMSMEETKVYDEKDYEYDSDQELRLNRAQTKQLRHAAKGPARAYMIEYGGMNDEEVGNIMEATQFNDTQSLEKLLEITTVPTDMADNSIEEAKLISQAIEESKQLSQAIEESKKNLNEDKVEIVDTDTDSDLEEVMEVQELDKGKKNLEICVDITGQADSNDLFADIFEDGEANKIEKTISVEEDDDFIEVKDSEELKLDTEDENKPITNKSIKESNEVKPFIDEIIEVKDSQEAVPAEPNLKPDLESILNDLKKQTAAVKDIQLNVNEEEKPKPKVEISSILDELKVKMADVKNITLDNVKLSNSVPIILSSDDESTLKSSKIVPKQELIELCDSDDNKNNRLSPNKTPSKNKSIKDFFETSYVVKRTPDKSQASNETSPGTPKTPKPFFRKRTPKSGRKRASDANEDSDEEVSPTKRSSKASKSLFEPKEPEEEKTVDPEEIIKDAAEALKSQKTSEELQELATNLAQERKELEIERNRQDRMGMSISQRMSIDCQELLRLFGIPYIVAPMEAEAQCAFLNATDLTHGTITDDSDIWLFGGRTVYKNFFAQNKHVMEFRAEQIEQTFNCNRGKLIQLACLVGSDYTTGIHGIGAVTALEILASFSGQDANGPGICNQSVLQTLIKFRDWWQAHKCSNLPPGSSARLALRKKLKNIELHEGFPSGAVVEAYLAPTIDDNRDAFSWGTPDVESIREFTRKSFGWTTSKTDDILMPVMKKINEKKIQGSIRNYFTAKSALRVQQPHVSKRVQLAIDKMSGKIDETPEKPKKVTRTRRAKAAPPTDDDLAIADVATKAARPKRGKRKAAPESVVLDGELPSTSQSIPKPEKCPRIPSSVEVIPQREKDLEQMRLNKAKAAEILKNSAKANRK

SEQ ID NO: 28612 - DNA, 6059 bp, DROSOPHILA
ctggcccgcgttcctatcagcagcactcgccgcataattgaataatctgaatctgccgagcgaagagcgcgaaacaataaaaatatcagatacgctgcccgaccgccgccagttacagaacaaattcgctgcgaacacaacgtgggcgcatctcgcaggtgccaaaaacgaggtagaaagacaaagacaagcaaatgtgcggggggtttttgaaagccacctatatagagatcggtttatagccacataaatatgtacatatatccgtcgggtattttgcttaattttcgatgaaacaatttgtgacacagaataaacttgtataaaaaaaactaatgcttatcgcattcttggataacacttttcaaaataaaatacggcatgtgtaaatagtgttgaaatgagaaaattgttggctgtactgacataattgcctacatttaactatatttatttatggtgaagtgattaaggatgcttgtgaaaattgaattaattctggttaagtgtcaaaaactactgtttgcacaaaaaataagaatgctcgatattccaaaccacttggtactcaaatcaaaactaatttatcccatatgcattaggaaacgacaaaactaaggatattaccgtgatattgcaaaaaaggaaaatcgagaacaagtagctgctgcgcagcacgagagtctatctagcatcttgagatctgccaattcgctaattagccgggccaaaacggggcggatgggtgggagggcgtggcacaacagctgatggcgccgagcacgagccacaacgaagtgcagcaaaagttttctcgagcggaaaaaaagctgcatgcagtgcagttttcgcagagcaacagcaactggcaaaccaaacggacgagactcgctaccagttctcaggtcatcagttccaggcccggaatcgaattcggattcggaatcggatcagatagcatccagagcactaggtgagctcaataaccgatttgccttggccgagtgcggatgcgggtagcggcaaaacgacggcgagtgtcgcggaaaagtgactcaaactctgatgtaatcattttcacatgccattacggccgccgctaaaatcgttccgttcgcattgccattggcatactcattccaattctcgctggtcggaaatcgggcgacttcggcttttctgtgtttcgcattcagtctgttgctgaggcgcaaaggtaaacatggtcacgattctactcgaatcgggttggattggattggatcgaatcaaaacgaaaaacgaatcggttttgagtcactcaaatagtgcgtccagcacgcagctgtgcggattacgttctgttttgtgtccagtattccggatcccaagtttcatatctgtatcattatctggccgccgcagtattgatttaacacacattcggattccgattgaacgatagttggccaaaagctttacgcaaaagctcgcatcagctgtaaaaaagcgcggcagagagccattggatatataagcgagagagagcaaatgagagagagtgcaaaataattcggaacttaatttgctgtttaatgccagattttatggtgtttgtgatatcatcaaattcctagagaccaaagagagatatttgtaaaacaagttttaagttgaagattcgcaactagctgtgtcacgacaatatcaaatagtgctctcaattatggaatccttactacagagctaattattcaacttcgtaacattctattaaagttattttcatacaagtggttttatttttgaaaaaatgtatgtttaataatagtaattgtgcaatatttagggcaatcgtagaacaatatttaaaaacaattttaatctaagaatactgaaaatattctataaataaatatacaattcatgaagacaataattggtatctcaagtgaaaattttccatccttttataaacaaaagaatttgtatcctaccaagtcaggaatttgaatctgtgcattctgtggacatcatccgtgttcgtttttattgcatacttatgagctggggcgcactaaaaataagttaaattgattgcgaatgctttgtacctttgcagcccaatataatactcgatcgtttcaatatagtttcgtgagagatcaccgagatgacctcgcgaatgttcaagttcggcgtaacagccgctagcgcctgtgttggttccgtcctggcctcgtacaccctggatcgctggaacaccccccatgtggtacgcagtccttgaaggtcctctgtatgcacgttaatcactctattccaatcccgtatccaccgactaggttaacaatgccaccgtgccgccgaaaaggaagcgcacgctgcccccgcgagcggatcagatcaaatccctgatgagcggcgaggagttcgacgtgctgatcatcggcggaggagccacgggagctggatgtgctctcgactcggttacaaggggtaagtggcagaggattctttccgcctggaaatgccttttaacaaacgttttgtcctttcttccaataaaaggtcttaagaccgccctggtggagctggatgactttgccagcggaacttcctcgagatccacgaaacttatccatggcggagtgcgatatctgcagaaggccattttgggcgtaagttatcaaactctagaccttcggctagaacatcccccattgtagagtgctaactatcgactgccatcttagctagatctagagcagtaccgcatggtgaaggaggcgctggctgagcgcgccaccatgctcgaatcggcgccccacttgacccaccctctgcccatcatgctgccagtttacacgtaaattgaaacattacatctgctccatatctgggattttgctaaccagataattctgcatccccagatggtggcaggttccttactactgggtgggcatcaaggcctacgatctggtggccggcgatcgcaatgtgaaaagctcgtactacctctccaagaaggatgccctcgaactgttccccatgctcaagaaggacaagctgtgcggcgctatcgtctactatgatggccagcaggatgatgccaggatgtgtctggcggtggcgctgactgccgctcgtcacggtgccactgtgtgcaatcacgtggaggtgaaggagctgctgaagaaggacgacggcactggcaaacaggtgctgtgcggagccaaggtcaaggaccatatctccggcaaggagttcaccgtgaaggccaagtgcattgttaatgccgccggtcccttcacggactccatccgcaagatggacaaccccacggtgaagagcatctgctgccccagttccggagttcatatcgtactgcctggctactatagccccgatcagatgggtctgctggatccctccacttccgacggccgcgtcatcttcttcctgccctggcagaggcagacgattgccggcaccaccgacctgccctgcgaaatcacccacaatccaacgcccaccgaggacgagatccagtttatcctcaacgagatcaagaactatctgaatgcggatgtggaggtgcgccgtggcgatgtgctctccgcatggagcggcatccgccctctggtctccgatcccaacaaggacgacacccagtccctggcccgcaaccacatcgtccacgtcagcccctccaatctcatcaccatcgctggcggcaagtggaccacctacagggccatggccgagcacaccatcgacgcggctatcaagggtgagtccactagttcacttgacttgactaattttatgatggctgtctagtgggccggaaatagataaatttctgtcttactcatttttaattctgataccataagataggaactaagataagttatcagttgacttccttataatcggttgtaaacgtatcatgaccttatccacgtatttgcagcctgcaacttaaagccagagcgcgccgaggcagtcacctcctatctgaagatcgaaggcggccagggctggaccccgaccatgtacatccgtttggtgcaggacttcggacttgagtgcgaggtggcccaacatctggccaagtcgtacggtgaccgcgccttcgccgtgtccaaaatggcttcgttgaccggcaagcgttggcccatcattggtaaccgcatccaccccgagttcccatacatcgatgccgagatccggtacggagtgcgagagtacgcctgtaccgctgtcgatatgatcgcccgtcgcctgcgactggccttcctcaatgtgcaggcagcacaggaggcgctgccagtgatcgttgacatcatgggcgaggagctgggctggtccaaggacgagaaggagcgccagattaagcacgccactgagttcctggccaacgagatgggacactcggtcaaccgcacctccaaggagcgcatacccatcaagctgtccaaggaggagatccagacatacatcaagcgcttccagctgatcgacaaagacaagaagggctacgtttccatcaacgatatccgtcgcgctctcaagagcttcggcgatggcgacgtctctggcgagcagctgcacgaaatcctgcgcgagatcgataccaacatgaacggccaggtggaactggacgaataccttcaggtgagctagggatataagagaatatctcaaaccttgggaaactggaagcattcccaggaccaaaaaatctatttaatggcacatagtaaattttataaaagtgaaagacacataagatgggtttaacaaatcggcaaataagttacacgtacaaattttaaattaatttaaaattccagatgatgtcggccatcaaaacgggcgacgtggcctactcccgatttgcgcgcatggccgagctggaggagcagaagcacgaggcggccaatctgaagcagatcagcgtggaccgatccggaggcggcttgtaagagcaccagcgacttaacaacgacgaccacatcacccggccatcggaggcatggactagacttaagatcgaacgtttaagatcaaacttattttcattttgctgttaataaaactctttcaactcacagatgaccgccaacacttcaggtacgattaagtttcgcctgtttctgctgtgttttttgtttgaggggattcaactccatcttagccatccgcttctcctgtttagtggaatttggaatttctcttgttcatgaagtattgtatttggattaggttgaggatcgaagcttgaggccacttcgtttttaataggtttattttgcttaacatgaatctttaataacaattgttacaatttgtatgtggtgttcttactaaaagagctatgcacattgttttcggtgcagtcattcacatttccattgtctttgcgaaaggtgtactcgcacttcctgaagtggttgtacaaatccgttcgctgggaatcggttaactgggcaaacatgtctagtttggggtcccagaaaaaggggagcttacccttcttcggcgtcaaagctagtgagtccgccaatttgcccaacatctgtaatgatagaacgttagcagtggacatcacaaaatcatcattcacctcgataaatatatcttttggtgaattactccagtaactgggatcctgttgaataacctgccacaggaataacgtcttgatgtggtagctcttcaggttggccttattttttacatttcggttctgcttcatcaggcggatggcgggcttgaggaactgcttgccgtatagtagtctgcgctctgcctcataaaaggacgatgtgaaggatgtgttatcagttttggctggcttcatgggcttcggtatggcatcccagtagagcgtttcaccaaaatgtatcctttgctccggagccaagaccacttgtgctgctgaaagcctaatggccggaacaaagtccacggagtacttgcaagatcccttcacaaagatcgtgtgagcggggccgcactttttgtattgaaggtgcgaaatcctgcctgccacctcgatctgattg

SEQ ID NO: 28613 - DNA, 2525 bp, DROSOPHILA
ccgagtgcggatgcgggtagcggcaaaacgacggcgagtgtcgcggaaaagtgactcaaactctgatgtaatcattttcacatgccattacggccgccgctaaaatcgttccgttcgcattgccattggcatactcattccaattctcgctggtcggaaatcgggcgacttcggcttttctgtgtttcgcattcagtctgttgctgaggcgcaaagcccaatataatactcgatcgtttcaatatagtttcgtgagagatcaccgagatgacctcgcgaatgttcaagttcggcgtaacagccgctagcgcctgtgttggttccgtcctggcctcgtacaccctggatcgctggaacaccccccatgtggttaacaatgccaccgtgccgccgaaaaggaagcgcacgctgcccccgcgagcggatcagatcaaatccctgatgagcggcgaggagttcgacgtgctgatcatcggcggaggagccacgggagctggatgtgctctcgactcggttacaaggggtcttaagaccgccctggtggagctggatgactttgccagcggaacttcctcgagatccacgaaacttatccatggcggagtgcgatatctgcagaaggccattttgggcctagatctagagcagtaccgcatggtgaaggaggcgctggctgagcgcgccaccatgctcgaatcggcgccccacttgacccaccctctgcccatcatgctgccagtttacacatggtggcaggttccttactactgggtgggcatcaaggcctacgatctggtggccggcgatcgcaatgtgaaaagctcgtactacctctccaagaaggatgccctcgaactgttccccatgctcaagaaggacaagctgtgcggcgctatcgtctactatgatggccagcaggatgatgccaggatgtgtctggcggtggcgctgactgccgctcgtcacggtgccactgtgtgcaatcacgtggaggtgaaggagctgctgaagaaggacgacggcactggcaaacaggtgctgtgcggagccaaggtcaaggaccatatctccggcaaggagttcaccgtgaaggccaagtgcattgttaatgccgccggtcccttcacggactccatccgcaagatggacaaccccacggtgaagagcatctgctgccccagttccggagttcatatcgtactgcctggctactatagccccgatcagatgggtctgctggatccctccacttccgacggccgcgtcatcttcttcctgccctggcagaggcagacgattgccggcaccaccgacctgccctgcgaaatcacccacaatccaacgcccaccgaggacgagatccagtttatcctcaacgagatcaagaactatctgaatgcggatgtggaggtgcgccgtggcgatgtgctctccgcatggagcggcatccgccctctggtctccgatcccaacaaggacgacacccagtccctggcccgcaaccacatcgtccacgtcagcccctccaatctcatcaccatcgctggcggcaagtggaccacctacagggccatggccgagcacaccatcgacgcggctatcaaggcctgcaacttaaagccagagcgcgccgaggcagtcacctcctatctgaagatcgaaggcggccagggctggaccccgaccatgtacatccgtttggtgcaggacttcggacttgagtgcgaggtggcccaacatctggccaagtcgtacggtgaccgcgccttcgccgtgtccaaaatggcttcgttgaccggcaagcgttggcccatcattggtaaccgcatccaccccgagttcccatacatcgatgccgagatccggtacggagtgcgagagtacgcctgtaccgctgtcgatatgatcgcccgtcgcctgcgactggccttcctcaatgtgcaggcagcacaggaggcgctgccagtgatcgttgacatcatgggcgaggagctgggctggtccaaggacgagaaggagcgccagattaagcacgccactgagttcctggccaacgagatgggacactcggtcaaccgcacctccaaggagcgcatacccatcaagctgtccaaggaggagatccagacatacatcaagcgcttccagctgatcgacaaagacaagaagggctacgtttccatcaacgatatccgtcgcgctctcaagagcttcggcgatggcgacgtctctggcgagcagctgcacgaaatcctgcgcgagatcgataccaacatgaacggccaggtggaactggacgaataccttcagatgatgtcggccatcaaaacgggcgacgtggcctactcccgatttgcgcgcatggccgagctggaggagcagaagcacgaggcggccaatctgaagcagatcagcgtggaccgatccggaggcggcttgtaagagcaccagcgacttaacaacgacgaccacatcacccggccatcggaggcatggactagacttaagatcgaacgtttaagatc

SEQ ID NO: 28614 - protein, 724 aa, DROSOPHILA; identical to SEQ ID NO: 15492

SEQ ID NO: 28615 - DNA, 3041 bp, DROSOPHILA
caaccacgatcggtattccgtcggaccagcaacagcaacagcttcagtcgcagcggtactgcgcgcaggaacttttcctgcccgacgcgggattcattatgggacgatttctgatcggtgcctgggaaatcggacttgtctccgtggacgacaatgtcgccgagtacgttgccatggccgtgcaagttctgctcaaggatctactatcggcaatcatcaagaaacgaaagcactacaagaccagcggcgagggaaacttttactacgatgtaggtgctccgttgcgtgatcctcgctgcgcaacaccgtcacccggcagaaggtcgacgacacgccgctggaactggacaaggaactgaatacggccaactttatgcggcgacagaacgacgatgtgaccttcctctccgcctgcgaagaagtgtaagctcctgaataataatgagattttcatgtgaaacacaaacttaggttttgtttctttcagccaacccaccgaacgcacagtaatcaccctcaaggactgccaactggccttacgggatcgcaacctgataggctcgcatgccgtctactccataaacatggaacgactcaatatgatgatgcattagcttataagttctaattattttattatatcagcttctgtaaaaatatatacattatacgctagtgtaccattaagtgtttggttcagcaaagattccgtggaggcggtttgaatggcaaggcacctggtagaaattgatccgccttgaatgcttcgatttcctgctcgttgagatcctccatgcgactgtaaactgaggactggatttcgttggtcggttgagcttgctgctgctgctgctgctgcatcatttgctgttgctgttgcatttgaaattgttgttgctgctgcatttgttgctattgcatctgctgctgctgatgcatttgttgctgttgcatctgttgctgctgctgcatctgttgctgctgctgcatctgttgttgattagggaatgcagatgctgctgcttgagcaaataatccggaggcagctgcctgctgctgctgttgtagttgctgagaagcctgagtaaacattccgcccatattttggcttgcggcttggccaaagattcccgtcgactgtggttgctgctgctgctgttggaaaccaccgaaaggattaggattcactggctgagcttgcacctgaacctgcgcctgggcgaaaatgttgcccccttggaaagcttgtgcagcaggctgcagctgttgctgctgtggctgtccaaagacactttgtgcacctgttgccgcagctcctacaccaaaaatgctattccttgcattggcattgctaatcgttccgccgaaaatgctattggtgttgctggcttggcttgtggcattcccaaatatatttcccgcactcagcgtgggctttccaaaaatggatgcagatgtattggcggcagccggagctgctgcagcgaagggattactggactgctgaggggcagccgacacagtgccgccctccggcgtctcgtggatcttgatcatcatttccaggacctgcggcgacatctgaagcatggtcttcatcttgttgttagcctctaggacctcacggttaaactgttggctgaactgttcgaattggttttgtcgtttggcctcgtaacacatgaaccgcacctcctcgaaggattggtcctgaataaagttggggaaattcgctttgtccttaaagggtccgtaggcggacaaaggccacatcttgccattgaggctggattccatgtcggctttgagatattgcctaaaataattaagttattagttcatctgcatagttttaatatcaatgtactcacttaacatcgaaatgctcgttgttgcactttgcgccatagcggcaggagccttgttgaaagaaccggcagacaaccatatttaaatttgattttaatttttgcctatttcctatatttattatttcaaaactgcttcaacttttgtacttttgtttataattgtcttactttgcgtattgagtattctttgagtattttatggctcactgagaaaaatataccgtgcctatgcgcgcaatttcgtgaattcgtaacttaagttcgctgaatgattaagataattttgtaagcaaacatatttaagatgaaaactggtttttgaaaatatagttccttgtaaattatacattaagtgcgaatatatctgaaaaatattggtttcttgcacagatgctattcatttttcatatgttcaaagaaattcagaaacttgcttctgcataatcgaatcagataattttaaagtgaattccggagtcctttggtatatctcgtgccgccgaatacggtcccactgattgtgaaatccgtgataacgaattttaacaccagaatttctaggattccatcagaatgcaaaaagtgctgggacgcatccaggcgcaggtcctccgctcccgggcgacgaatgcattagccaatgtggttagacacgaggccacctcctccaggacagcggctaaaccagccgccacatccaaaggtaagcggatcctccaagatgcacagttaccgcttaccaaaatcgtattcgttcgtagaattccgggagagacaggtgcgattcaacataaagaacgaacagaccgagggtagaccactttacctggatgcccaggccaccactccaatggacccacgtgtattggacgctatgctcccctatctgaccaatttctacggaaatccccactcccgtacccacgcctacggttgggaaacagagtccgctgtagaaaaggcccgcgagcaggtggccaccctgattggcgccgatcccaaggagatcatcttcacatccggcgccaccgagtcgaataatatcgcagtaaagggtgttgcccgtttctacggcactaagaagcgacacgtgatcaccacccagacggagcacaagtgcgtgctggactcttgtcgtgctttagagaacgagggctttaaagtcacgta

SEQ ID NO: 28616 - DNA, 972 bp, DROSOPHILA
aagtaagacaattataaacaaaagtacaaaagttgaagcagttttgaaataataaatataggaaataggcaaaaattaaaatcaaatttaaatatggttgtctgccggttctttcaacaaggctcctgccgctatggcgcaaagtgcaacaacgagcatttcgatgttaagcaatatctcaaagccgacatggaatccagcctcaatggcaagatgtggcctttgtccgcctacggaccctttaaggacaaagcgaatttccccaactttattcaggaccaatccttcgaggaggtgcggttcatgtgttacgaggccaaacgacaaaaccaattcgaacagttcagccaacagtttaaccgtgaggtcctagaggctaacaacaagatgaagaccatgcttcagatgtcgccgcaggtcctggaaatgatgatcaagatccacgagacgccggagggcggcactgtgtcggctgcccctcagcagtccagtaatcccttcgctgcagcagctccggctgccgccaatacatctgcatccatttttggaaagcccacgctgagtgcgggaaatatatttgggaatgccacaagccaagccagcaacaccaatagcattttcggcggaacgattagcaatgccaatgcaaggaatagcatttttggtgtaggagctgcggcaacaggtgcacaaagtgtctttggacagccacagcagcaacagctgcagcctgctgcacaagctttccaagggggcaacattttcgcccaggcgcaggttcaggtgcaagctcagccagtgaatcctaatcctttcgcagcagcagcaaccacagtcgacgggaatctttggccaagccgcaagccaaaatatgggcggaatgtttactcaggcttctcagcaactacaacagcagcagcaggcagctgcctccggattatttgctcaagcagcagcatctgcattccctaa

SEQ ID NO: 28617 - protein, 260 aa, DROSOPHILA
MESSLNGKMWPLSAYGPFKDKANFPNFIQDQSFEEVRFMCYEAKRQNQFEQFSQQFNREVLEANNKMKTMLQMSPQVLEMMIKIHETPEGGTVSAAPQQSSNPFAAAAPAAANTSASIFGKPTLSAGNIFGNATSQASNTNSIFGGTISNANARNSIFGVGAAATGAQSVFGQPQQQQLQPAAQAFQGGNIFAQAQVQVQAQPVNPNPFAAAATTVDGNLWPSRKPKYGRNVYSGFSATTTAAAGSCLRIICSSSSICIP

SEQ ID NO: 28618 - DNA, 3693 bp, DROSOPHILA
ttgaaactttagctaatctggttgttctccttttacaggcctcgctgctggagtggcgtcttgtgttctgggtggcctttggcgtgctctgcttcactgccgtgatctactgcatttgggcatccggagaggtgcagccgttcaataacgcacccatccagccgcgctccgtcgactttgaggcacaggagcgcaaggtgggtggtgaaaagacaagtggtctggagcagagctcgtaaggtggatcgccaaaaaaaagtgccatacatatatgtatacattgtaatctagttaaagtgctgtctacgcggattctggaatccgtaatctgggatccgagtggttcccaaaagcagtgtcatgctgtatacgcagtggctgttgttcaaattgctagttttatagtattcccgatctggccgatccctggcatcagcgccaactaattaatttaagcgaatttacttacactcccgaacgtccgcagtgctaccatgtttatcccttttgttagctaggataatccttagcctaatcctaatcctaaactatacccctatgccgcgcacgcaacgtactctcttaattattatttagtatttaaacaaactgcgatttcgcattaaggatttcgtgtaccagagctcgtattgccgtattgtaaatcaaatgatgaaataatttgtacattttaaattgttgatcaatgtgtaaagtaaagcgtgtttttagctgttctgttaagacattactgtttttatgatgttagtcaaataaagtgtataaagctaattaaaactataaatctaaaatccagtttgtaaaaatgtattcatgatatactcatataataggtattaaatagtctaaaggggcatcttctagtaggcgttctgcgatttgtccaacttctataaaacaaagttaccaaaatgctgcccgctgttgagcaaaagttgagcgatatatttatatgtatgtatatgtatgcataattcagcgattttacgtggcatccactacaaccagatggttacccgttccattccacagatctggaggtgcgacagcgctgggttctctgctgcttcacatttttggcgatcattaatgcctacacaatgcgtttgtgcttggactgtacgcttaaccgaatcatattggaatgtggtggtcatagggtggacaacgttcctcaagtactaaatccaaaggcactgcccaactggcgtattgaactggccatggcactgaatcacacggaatatcaactgagaagccgcctaaaagcgggaaaggagcaaccagatctcaaccagataagcgccaaaggaacgcgggatagagaacctgccggtgagaaacgtcctggtcaagaggactctcaagaacgtttgagctgctccgagcagtggcctcgccaaacccaatcccttgtagtaatggccttctatgccggctatgtgctcagtcatgttccgggcggacggctggcggagaggtatggtggaaagtgggtgctcagtgcggccatactcacgtcagcggtgctgaccctgctaactcccactgcagtgcgacagggcggtctgtatgcccttgtcgctgtccgtctattggtcggaatttgtgagggcccttgctttccggccgtgtgtgcactcctggcccagtgggttccggaacaagagcgcggaatgctggccagctgcgtactcagtggcggtgagatcggcatcacgatggtccagttggtcagcgggttgcttattgcggagcaggattggcccgtgttcttctatctggttggtggaggagccgtggcctggttcttgggatttgtaagtctatacgaagtctaaagtcatgataatcatagtttaaaccaatttgttcccaagaccttagtttgctatagcactccggatcattgtccgtttattcagagcgaagaaagggaatacataaggtgcaatactagcaactcctttttgttgaccactggcagagaaagagaggagatggacggggaagatggatatgaaggtgaggatagggagcaccgcagagaagtggaagcaacgtgcaacactgcaccttggcggagcatgcttaacagcacgccactctgggccctggtttccacctccatgcagcaggaattccaacagaaattgccccaggagctgcaaattgcgctagaggaagtaagagcccgtggcaccagtttctcagaactaaccaccatcatcgaaacgatagcaccgtccgttggaaactggatagcttcactgacaacagggcggctgagcgacgtgctaatcgagcagcagattctcacgcgcactcagacacgccgcctcatgtcctggttggtcttcctatgcggatccatgtacatgctacagatcaagatgagcggagcacgaatctggagcgttcttggcatgggagcctactatgcgagcattaagctgctaccgctggatatgagtcccaactatgctggcactttgatgggcatttcgggcggcatgggcgcgcttccagcacttctgatgccctatctggaacaactggagaccgactacaagctggtgagcagtgtgagggccgccatgtgggtaatcggcgccagctacatatccggcgatgtccaggcgtttaaccaaccggaacgggagccacaatgaggagacttgcttgttttaagtttaatcttacgcttaaacataagctactggatttgtcttagtggattccttaggcaacagattctagtttacatatgtaccataatacatgacaatttctatgctaaagctaggagcataaacgtaaacaagctttatatatatatatataaataacaggtatggtcgatattaacttaattagagtaggactgctggctaaatgctccgcgctggctcttattttctcgggatatcaatcccaacacacaccggtttcatactctatgcaacgccctgggccatcaatccggattgggccattgccgacactgagttcatgtcgatacccagctttttggtgacgttgatttgggccactgccgcgttgcgcagcgagtaaacgtgcaccaactccgcctgactcttggcataaagcagtgccttttcaaaaagctcgacggcccgtgtgagttgcgcccgctgaacttcgactgttccgagtgtctcgtaggccagctcgcatttgggatctacttcgatcgccttgttgagcagctggacagccaaattaatgtctccgcgccactgaagcaccatgatggcctggtgaacgataagtgcaggatttgttggcgccaataccatggcctttttgtagtattcctccgcctgggtaaactgttgctggtcggccaacacctgagccgttagactatagcactcaacgcagctcgggaaacgctcgatggcattttggaaggtgtgcattacgctctccaagcgccgctggtcgccggccaggagggatagtcggtactcggcatagcacttctggacgaaggcgatggcgtggttgggtgcaatgctcaccgccttttcgaactcggccaaggcgggctctatctgctccagcagcagaagtatctgggcgcgctggtggtacacatctgggttctctgggttcaggcgttccgcctcagcaaaatcggctataccc

SEQ ID NO: 28619 - DNA, 1588 bp, DROSOPHILA
cgattttacgtggcatccactacaaccagatggttacccgttccattccacagatctggaggtgcgacagcgctgggttctctgctgcttcacatttttggcgatcattaatgcctacacaatgcgtttgtgcttggactgtacgcttaaccgaatcatattggaatgtggtggtcatagggtggacaacgttcctcaagtactaaatccaaaggcactgcccaactggcgtattgaactggccatggcactgaatcacacggaatatcaactgagaagccgcctaaaagcgggaaaggagcaaccagatctcaaccagataagcgccaaaggaacgcgggatagagaacctgccggtgagaaacgtcctggtcaagaggactctcaagaacgtttgagctgctccgagcagtggcctcgccaaacccaatcccttgtagtaatggccttctatgccggctatgtgctcagtcatgttccgggcggacggctggcggagaggtatggtggaaagtgggtgctcagtgcggccatactcacgtcagcggtgctgaccctgctaactcccactgcagtgcgacagggcggtctgtatgcccttgtcgctgtccgtctattggtcggaatttgtgagggcccttgctttccggccgtgtgtgcactcctggcccagtgggttccggaacaagagcgcggaatgctggccagctgcgtactcagtggcggtgagatcggcatcacgatggtccagttggtcagcgggttgcttattgcggagcaggattggcccgtgttcttctatctggttggtggaggagccgtggcctggttcttgggatttagcgaagaaagggaatacataaggtgcaatactagcaactcctttttgttgaccactggcagagaaagagaggagatggacggggaagatggatatgaaggtgaggatagggagcaccgcagagaagtggaagcaacgtgcaacactgcaccttggcggagcatgcttaacagcacgccactctgggccctggtttccacctccatgcagcaggaattccaacagaaattgccccaggagctgcaaattgcgctagaggaagtaagagcccgtggcaccagtttctcagaactaaccaccatcatcgaaacgatagcaccgtccgttggaaactggatagcttcactgacaacagggcggctgagcgacgtgctaatcgagcagcagattctcacgcgcactcagacacgccgcctcatgtcctggttggtcttcctatgcggatccatgtacatgctacagatcaagatgagcggagcacgaatctggagcgttcttggcatgggagcctactatgcgagcattaagctgctaccgctggatatgagtcccaactatgctggcactttgatgggcatttcgggcggcatgggcgcgcttccagcacttctgatgccctatctggaacaactggagaccgactacaagctggtgagcagtgtgagggccgccatgtgggtaatcggcgccagctacatatccggcgatgtccaggcgtttaaccaaccggaacgggagccacaatga

SEQ ID NO: 28620 - protein, 488 aa, DROSOPHILA
MRLCLDCTLNRIILECGGHRVDNVPQVLNPKALPNWRIELAMALNHTEYQLRSRLKAGKEQPDLNQISAKGTRDREPAGEKRPGQEDSQERLSCSEQWPRQTQSLVVMAFYAGYVLSHVPGGRLAERYGGKWVLSAAILTSAVLTLLTPTAVRQGGLYALVAVRLLVGICEGPCFPAVCALLAQWVPEQERGMLASCVLSGGEIGITMVQLVSGLLIAEQDWPVFFYLVGGGAVAWFLGFSEEREYIRCNTSNSFLLTTGREREEMDGEDGYEGEDREHRREVEATCNTAPWRSMLNSTPLWALVSTSMQQEFQQKLPQELQIALEEVRARGTSFSELTTIIETIAPSVGNWIASLTTGRLSDVLIEQQILTRTQTRRLMSWLVFLCGSMYMLQIKMSGARIWSVLGMGAYYASIKLLPLDMSPNYAGTLMGISGGMGALPALLMPYLEQLETDYKLVSSVRAAMWVIGASYISGDVQAFNQPEREPQ

SEQ ID NO: 28621 - DNA, 3317 bp, DROSOPHILA
tgaagggaaggcatatcatgcaagaacccaaaagttaagaacgggcagaactaattctaaaatagcttacatagcatacattttgtaaatatttatcccaaagtaaataaaaaatcgtaattaataatcggaactgtgaatagaggaaattatacaaaatatatacccatgatgaacaattctaatacgaatcaagatataccaaaacagatacaatttgaaagaacttttggacataattaactaaatgcttgtatacgatactttcttggattaatatcgaaaaaataaataaataaataatgaaaggaaagtcttggaaatacactctgccagtcgagagaaccgaaatcaaaatgttatatacctacatagatatacaaaaagccagatttgcagcatatctacgcgtaatattacaacaaatttataccaaacttttggcaaacatatcgtgcacttagtcctaatatccaccctaagcgaacatatttgtataatgcccatcatatccacaattcaaaattcattttgagcgaaccacttacctatatcaacaaccaaatcatcaaattagacatacatacatttcgctattcaagtcagtgtttgataaactaccgatttgttgactagaatctaagcctagcatactatatatatatatatataggcttaagtttattgtttattgctcgatttgtaggagttttactgtaatttgtattcgtattgtatgataatgtacgcttgcactcctagatctacaaaatattgaagagaaaaacgaaatggctggctacgcaattggggagcggccaatacaagcatatctctataagaaacgcataaacagcagaacttagccgcaaaatcgatttgtaaattacaatacaataatttataataacaatctagcaacgctctctgttttgtaaatcttaacaagttatttaaataaaatttatttaaaataaacgtaatacaccatgaaatcgccttttccttaatttattgtagtgctttatttgagttttaagtaaaatataattgggaaatatacaatcaaagtaagtattttcaatcgataaaagagcataatttaaatgaatacataacatatgtataattattaacctagattacgacacgctgatttgcccatttaccatatggtttccttcgttcctcgttttattattcctctgggtaaatgtatataatggaccgcctactcatccttggcaagcgttgagtcctcactttccttgaacagtatatcctggatcttggaccgcacgtacatcttccgactgagcgaaaggtggcgcattgcgggcaccaagctaagtgcaaaatagtagtcgtcgtccttggtgagctcctcgtgattctgttgtatgatgtagctgagctgttcgctgacagcggtcagccgttcgatggacgtctccaggttgttcttcagctgcttggccgagctgctgctggaggacgtggaggccaccacagtagcctgtacgcccgaaccaacaccgatgggcctgctacttccaccggctggtgaagtcgaatgggttagcacggtcacttgcttctcaggctgatccaggccctcatcatccatcacgtgtataggactatagcacagtggatcctcgctgtatatgatgtccttaatgtcctcgctaatctcatcgttctgctcgtactcctcccacttttgcggcagggcgcccgcctcgcccagataattggcgacgttcgactcgatcttcggcttggccacacgcagcggctccctcagcgtcttggccttggtaatccgcacggttttgtctgcaatgcaaaggatggaagcgatggttaatacgatacatattggtacagctaccggataataacaaaaatatcataacccagagatgggcgccggcgatagtttcccgccgacccaagggtcgatagcccgccatacgaacttcgctggaattacctttcttgatgattgggatcatccgggcctggggacgttgctgcaccggactgaccagcacctcgtccctgtgcttgtgccgcagatgcgtccacaaattggtcgtattgttgcccttcaaattgctggccatgccaccacgcgatatattgttgccgcaataacggcatatcgcaaagttttcgcactcctcgttaatatcgtagtgctgccacacattgctaacacgacccttgggcatttttaatacttttctctaggtaattagtacgtcaaaagtgatttttctccacaaatttatttattgcgatattggcgttgctgtagtcagtgttgtcaagtgccgttgcagtgttgtaaaacgcatgaacataagagtggaaacaaaggcaacggcaaacagaggtgaaaaacgaaaataagagaatgtttacatactttacaacagcgcaaaatcataaaaatacttttaacataacaatattttttagctgattttttaatagcattttagataatatacaataggtttataaactatttacaagcacaaccactggttggggaaaattctgtacctatcctgcactatttttatctatagttttttttttcaagacgatttactgccttgctataactagagtttctactttttccgcgccaaagtggaggagcctgtaccgatgacccgtggatttatcgcgatggcatcgggcactgatccgtgctcggtttctacggcacggagcacgcgtggcagtggatttcgattgtgaagggcgtgcgtgagatttcggatcccgaacttaccgttactgctgctggagtggagacatcggtgccgtagcagggatccggttccagttttgccgctgtaggataacagatcgccacaggttttgcagcaggcgtacggctctatgtggtcgtcgcactggacgagattgaaaaacctccagacgcagcttttggtgttcctgggctcaacgagtttgcaacgcttgtccccggattttagtaggctacgaagctctgatttcttttcaacatgcatcgtggtgtatcggttgttcgatttgcggtggtaattcggtttgccaagaagaaaacaaacccaaattacaaaatgtacacaaatacaaactcacgaaaattcagtcacgcacaaaactgtgttggtaaacaagcgctagcacggtgcgaaaagtgtaaggtggtgtaaacagccactgattttcttaaaaagaacttgattgtaagtttaattttttttgaattttatttgtttcttatgttttttgaatattttcttttagtt

SEQ ID NO: 28622 - DNA, 1160 bp, DROSOPHILA
caacgccaatatcgcaataaataaatttgtggagaaaaatcacttttgacgtactaattacctagagaaaagtattaaaaatgcccaagggtcgtgttagcaatgtgtggcagcactacgatattaacgaggagtgcgaaaactttgcgatatgccgttattgcggcaacaatatatcgcgtggtggcatggccagcaatttgaagggcaacaatacgaccaatttgtggacgcatctgcggcacaagcacagggacgaggtgctggtcagtccggtgcagcaacgtccccaggcccggatgatcccaatcatcaagaaagacaaaaccgtgcggattaccaaggccaagacgctgagggagccgctgcgtgtggccaagccgaagatcgagtcgaacgtcgccaattatctgggcgaggcgggcgccctgccgcaaaagtgggaggagtacgagcagaacgatgagattagcgaggacattaaggacatcatatacagcgaggatccactgtgctatagtcctatacacgtgatggatgatgagggcctggatcagcctgagaagcaagtgaccgtgctaacccattcgacttcaccagccggtggaagtagcaggcccatcggtgttggttcgggcgtacaggctactgtggtggcctccacgtcctccagcagcagctcggccaagcagctgaagaacaacctggagacgtccatcgaacggctgaccgctgtcagcgaacagctcagctacatcatacaacagaatcacgaggagctcaccaaggacgacgactactattttgcacttagcttggtgcccgcaatgcgccacctttcgctcagtcggaagatgtacgtgcggtccaagatccaggatatactgttcaaggaaagtgaggactcaacgcttgccaaggatgagtaggcggtccattatatacatttacccagaggaataataaaacgaggaacgaaggaaaccatatggtaaatgggcaaatcagcgtgtcgtaatctaggttaataattatacatatgttatgtattcatttaaattatgctcttttatcgattgaaaatacttactttgattgtatatttcccaattatattttacttaaaactcaaataaagcactacaataaattaaggaaaa

SEQ ID NO: 28623 - protein, 282 aa, DROSOPHILA
MPKGRVSNVWQHYDINEECENFAICRYCGNNISRGGMASNLKGNNTTNLWTHLRHKHRDEVLVSPVQQRPQARMIPIIKKDKTVRITKAKTLREPLRVAKPKIESNVANYLGEAGALPQKWEEYEQNDEISEDIKDIIYSEDPLCYSPIHVMDDEGLDQPEKQVTVLTHSTSPAGGSSRPIGVGSGVQATVVASTSSSSSSAKQLKNNLETSIERLTAVSEQLSYIIQQNHEELTKDDDYYFALSLVPAMRHLSLSRKMYVRSKIQDILFKESEDSTLAKDE

SEQ ID NO: 28624 - DNA, 3491 bp, DROSOPHILA
acctgttgagatttcggcaattccccaagcaaatcccatattcacatcttgttcggaacatcgccacccgccattttctacgtattttccccgtttcatattcttcgtggtgaaactagtagtttttgtcactaccgcttttgttgtcttagagtgcactagttttttaatcatcgctaacagccttggaggctgtaaagttccacttggctgccctaatacactaaaagcatttaccaacactgcctgccacgccccctgaaacacgcccgattaacccccacacgcccaccggcaattgtttgtgctcatcggtgcaagcactcggcacatatcgccatctctttccaactgacagtggcgtacgcaggataaaaaggggtcacgaaacacctgcgatgatttataatatatttgaagattatagaaagtaaaaaaactaaacaaaggtataatgaaattctgaaatatactaacattattgaaaatttcctataagtcaagtaaacatttcggaagtgctactaatgttttgtaacttgttttgtcttttgtgatggttaaagggtttttaaaaggcaacatctttaattattttctttcgattctttaactctactgactacattgtgcatattcgtattgatccccttgaaccgaaaccctggtacgcccctggttcattcgaaacatccatcactttttgctgcgaagtgaaagaggatgaaggatataggatgcagatgcaggttacaggatggaacttttaagatatggtatgtgggatgcaatcatctagagtgggcaaaacaaaaaaagaacacttcagatgcggaaaccgcaatgaatacactgcgacatctgcaaggggcgtggcagtgcgcccaattggaagcaattaatcccacaaaccaaatggcaagcgaaaaaagcaaagttctttgcgagctcttatttctgagttcataacaaatatcctgttaagaaggcaccgtgtcagttaatttactgtaatttattaaagtttacactcgaaaaaaaacctatgttctatttggatgagtaagtggattcggtcttcttgatattgagaacgccgttggaatcggtggcaccctggatgttggtcaccttctggttgccactggcatcgacaacggccacggtctgctggatttgggtggcgggaatgggtccaactccggagatgtgctgatagctaccggtgcttcctactccgctgttgctgctgatggaggctgcgctggtgtagccattgtaggtgggataatagttgtcgcctccagttaaggagctctcgccgaaacgctcatcaaaggacacaccactggaaattaaaacgatcattagtgatcatcaatagaagtcctcattttccagttaactcacccaagcactggagcagcggcctgctgggtgtaagaggagccagaatgaccggagccatcggcattctgaacgctgtgtgaggcgtaggtgaagacgtttcctccactggaggacgaggaggatgatgacgaggaagacgaactggactgacgacgcagacgcctcaggagatgggcattcacgggatggacattcgactggtggccctccgagtccaaggtgaagaaggcacggggcagaaactggccagctgtatgaataaagagcaatgaattcagcgataagtatctgaaatctatgaatatagctttaaagcttagatttcgttcacatctcgcccttatttaccacgattaaatattttatgaacttttactattgaatttatttttaatattatgaaaacctttgaataattacatatacttagcatatataccatgcagatttattccaagttttttatgataatgctaatcccaaaagtatgcttataaatctcaaacattcaacaatggcaatttcttttttgagtgtgaaagtttgtccactcagcgatcgcgtgaataatcaaacgtaatgctgattttgaatagccatattttaggaatcgtaataaaaagcgaatttgttgtgcggaaagttttgctggacaaacattgtcgcaaagttaatgagctacgcgaatttcacaaaccagtttgggtttccggatgggttcgataggtttttgggtattattaacatactagcacccgtcgaccgacttgttaattcaattaataataaacacgatagcagctccgactagcgatgatgtaagtgcacaatccggcttaagctctcctcaaattatactcaaatttgcttttttgctcaccggaagaggccgaagcggtagtaatcgcaaacaaagcgatggcaatcacagcgtacttcattgtgaagcggtatggatctgtaagaacacacacttcgtcacttagtagggttaattcagcggttaggggtatgcagaggggcctatctgcggttaagcactcacaaagacgaaacgaaagactgaggcagcgaacgcgtgaaaagttccaaaacgactaagctcgcggtgcggctccctagcgcttatatatggaaatttcgaatgctgacgcagtgcgaaccatctacatcattatcatctaaagctggaagaacaagcagaagccgtcaaacaggcagaagagttgggcaaataactccaccggtaggtagactgaacaataaacaaatacagaaaaaaaaacaagaggcaggcatttaaagtttcttaaaacctctggctgtggctcataaacgtaaagttaggctcaatgattcataaggttaaatactatcacatctctcagttaatttcccctctctgcagcagagtttatctcacatataaatccacccaaaaagttaatgattatgggaaataaacacatgacgaagcagcgaagcgccaacggggaatttctgttctgtttgttttcactttatttgtatttcgcattatatattcgaacgccaaactgttttggccagctcgtgtaaattggccaagtgccctcgctttttcttattgtactttttttgtacccagtctgcgccttgagctctgcttttgacccgattcgtgtttttggcaataaagaacttctcgaacttcttctcttgggcttggggcaataacctgattacaacgtggccaacacctaacaaacggagtttcagagaaatattatgcattatacatacattgccgatcataaagctaaactatatatactcatttgtttaatggctggcatgcgtccactaattataatattttgtgaattttaataatattatgcctcgctcggttttaccgctccatctgtttgaaacaaaactggttttgatgggattttcgattgatcttgctcgacgaaatgaaaacaaattttgttatttaattttacattatcatatatgtatattccaggaaatcctttcaattaaccggttatttggggattattgtttttaattgcctaaaataaatctaaggcttt

SEQ ID NO: 28625 - DNA, 712 bp, DROSOPHILA
cacgcgttcgctgcctcagtctttcgtttcgtctttatccataccgcttcacaatgaagtacgctgtgattgccatcgctttgtttgcgattactaccgcttcggcctcttccgctggccagtttctgccccgtgccttcttcaccttggactcggagggccaccagtcgaatgtccatcccgtgaatgcccatctcctgaggcgtctgcgtcgtcagtccagttcgtcttcctcgtcatcatcctcctcgtcctccagtggaggaaacgtcttcacctacgcctcacacagcgttcagaatgccgatggctccggtcattctggctcctcttacacccagcaggccgctgctccagtgcttggtggtgtgtcctttgatgagcgtttcggcgagagctccttaactggaggcgacaactattatcccacctacaatggctacaccagcgcagcctccatcagcagcaacagcggagtaggaagcaccggtagctatcagcacatctccggagttggacccattcccgccacccaaatccagcagaccgtggccgttgtcgatgccagtggcaaccagaaggtgaccaacatccagggtgccaccgattccaacggcgttctcaatatcaagaagaccgaatccacttactcatccaaatagaacataggttttttttcgagtgtaaactttaataaattacagtaaattaa

SEQ ID NO: 28626 - protein, 202 aa, DROSOPHILA; identical to SEQ ID NO: 21582

SEQ ID NO: 28627 - DNA, 2885 bp, DROSOPHILA
tcccgcaccttcgccgaacgccttaattttgagctcagcgacgtcctggactttgtagccgaggacaacatgcaaatcattcgtccgccaaccacgatcggtattccgtcggaccagcaacagcaacagcttcagtcgcagcggtactgcgcgcaggaacttttcctgcccgacgcgggattcattatgggacgatttctgatcggtgcctgggaaatcggacttgtctccgtggacgacaatgtcgccgagtacgttgccatggccgtgcaagttctgctcaaggatctactatcggcaatcatcaagaaacgaaagcactacaagaccagcggcgagggaaacttttactacgatgtaggtgctccgttgcgtgatcctcgctgcgcaacaccgtcacccggcagaaggtcgacgacacgccgctggaactggacaaggaactgaatacggccaactttatgcggcgacagaacgacgatgtgaccttcctctccgcctgcgaagaagtgtaagctcctgaataataatgagattttcatgtgaaacacaaacttaggttttgtttctttcagccaacccaccgaacgcacagtaatcaccctcaaggactgccaactggccttacgggatcgcaacctgataggctcgcatgccgtctactccataaacatggaacgactcaatatgatgatgcattagcttataagttctaattattttattatatcagcttctgtaaaaatatatacattatacgctagtgtaccattaagtgtttggttcagcaaagattccgtggaggcggtttgaatggcaaggcacctggtagaaattgatccgccttgaatgcttcgatttcctgctcgttgagatcctccatgcgactgtaaactgaggactggatttcgttggtcggttgagcttgctgctgctgctgctgctgcatcatttgctgttgctgttgcatttgaaattgttgttgctgctgcatttgttgctattgcatctgctgctgctgatgcatttgttgctgttgcatctgttgctgctgctgcatctgttgctgctgctgcatctgttgttgattagggaatgcagatgctgctgcttgagcaaataatccggaggcagctgcctgctgctgctgttgtagttgctgagaagcctgagtaaacattccgcccatattttggcttgcggcttggccaaagattcccgtcgactgtggttgctgctgctgctgttggaaaccaccgaaaggattaggattcactggctgagcttgcacctgaacctgcgcctgggcgaaaatgttgcccccttggaaagcttgtgcagcaggctgcagctgttgctgctgtggctgtccaaagacactttgtgcacctgttgccgcagctcctacaccaaaaatgctattccttgcattggcattgctaatcgttccgccgaaaatgctattggtgttgctggcttggcttgtggcattcccaaatatatttcccgcactcagcgtgggctttccaaaaatggatgcagatgtattggcggcagccggagctgctgcagcgaagggattactggactgctgaggggcagccgacacagtgccgccctccggcgtctcgtggatcttgatcatcatttccaggacctgcggcgacatctgaagcatggtcttcatcttgttgttagcctctaggacctcacggttaaactgttggctgaactgttcgaattggttttgtcgtttggcctcgtaacacatgaaccgcacctcctcgaaggattggtcctgaataaagttggggaaattcgctttgtccttaaagggtccgtaggcggacaaaggccacatcttgccattgaggctggattccatgtcggctttgagatattgcctaaaataattaagttattagttcatctgcatagttttaatatcaatgtactcacttaacatcgaaatgctcgttgttgcactttgcgccatagcggcaggagccttgttgaaagaaccggcagacaaccatatttaaatttgattttaatttttgcctatttcctatatttattatttcaaaactgcttcaacttttgtacttttgtttataattgtcttactttgcgtattgagtattctttgagtattttatggctcactgagaaaaatataccgtgcctatgcgcgcaatttcgtgaattcgtaacttaagttcgctgaatgattaagataattttgtaagcaaacatatttaagatgaaaactggtttttgaaaatatagttccttgtaaattatacattaagtgcgaatatatctgaaaaatattggtttcttgcacagatgctattcatttttcatatgttcaaagaaattcagaaacttgcttctgcataatcgaatcagataattttaaagtgaattccggagtcctttggtatatctcgtgccgccgaatacggtcccactgattgtgaaatccgtgataacgaattttaacaccagaatttctaggattccatcagaatgcaaaaagtgctgggacgcatccaggcgcaggtcctccgctcccgggcgacgaatgcattagccaatgtggttagacacgaggccacctcctccaggacagcggctaaaccagccgccacatccaaaggtaagcggatcctccaagatgcacagttaccgcttaccaaaatcgtattcgttcgtagaattccgggagagacaggtgcgattcaacataaagaacgaacagaccgagggtagaccactttacctggatgcccaggccaccactccaatggacccacgtgtattggacgctatgctcccctatctgaccaatttctacggaaatctggttcgtacgcttcgcc

SEQ ID NO: 28628 - DNA, 885 bp, DROSOPHILA
atggaatccagcctcaatggcaagatgtggcctttgtccgcctacggaccctttaaggacaaagcgaatttccccaactttattcaggaccaatccttcgaggaggtgcggttcatgtgttacgaggccaaacgacaaaaccaattcgaacagttcagccaacagtttaaccgtgaggtcctagaggctaacaacaagatgaagaccatgcttcagatgtcgccgcaggtcctggaaatgatgatcaagatccacgagacgccggagggcggcactgtgtcggctgcccctcagcagtccagtaatcccttcgctgcagcagctccggctgccgccaatacatctgcatccatttttggaaagcccacgctgagtgcgggaaatatatttgggaatgccacaagccaagccagcaacaccaatagcattttcggcggaacgattagcaatgccaatgcaaggaatagcatttttggtgtaggagctgcggcaacaggtgcacaaagtgtctttggacagccacagcagcaacagctgcagcctgctgcacaagctttccaagggggcaacattttcgcccaggcgcaggttcaggtgcaagctcagccagtgaatcctaatcctttcggtggtttccaacagcagcagcagcaaccacagtcgacgggaatctttggccaagccgcaagccaaaatatgggcggaatgtttactcaggcttctcagcaactacaacagcagcagcaggcagctgcctccggattatttgctcaagcagcagcatctgcattccctaatcaacaacagatgcagcagcagcaacagatgcagcagcagcaacagatgcaacagcaacaaatgcatcagcagcagcagatgcaatag

SEQ ID NO: 28629 - protein, 294 aa, DROSOPHILA
MESSLNGKMWPLSAYGPFKDKANFPNFIQDQSFEEVRFMCYEAKRQNQFEQFSQQFNREVLEANNKMKTMLQMSPQVLEMMIKIHETPEGGTVSAAPQQSSNPFAAAAPAAANTSASIFGKPTLSAGNIFGNATSQASNTNSIFGGTISNANARNSIFGVGAAATGAQSVFGQPQQQQLQPAAQAFQGGNIFAQAQVQVQAQPVNPNPFGGFQQQQQQPQSTGIFGQAASQNMGGMFTQASQQLQQQQQAAASGLFAQAAASAFPNQQQMQQQQQMQQQQQMQQQQMHQQQQMQ

SEQ ID NO: 28630 - DNA, 8557 bp, DROSOPHILA
cagttgctgctgggtggcggcctcctgtaaaagtggggaaggacaaaagatgtttagcttcggccagtgaaagacactttcggccatgtcagcctctcaactagactagacgtctatatatgcataaataatattaactaatatcaactaaggattacgctcaggcaaagagggaacaagcagcgtgtcgtacgcttcgaagaaagggaaaaagaataaggaatgcacaaaaatgtaaagatcatagggaaggagatacagggaagacgcaggcaaagtcgactatgtttaggtaaatctcaagcatacgacaaacaacaaattaaacagcaataataacgaaagacatacgaaaatcatgatatacagaaacacttatagacaataagcgataatttggatatgtcatacacacctaaacgcgcaaactgaagcctttgaatggaattcgatttgatactatacgattagattgtattcattgcagtgttatgggtttcttttagtttatagattttgataagagacacgcatagacagacacaccttcacataggcagacacacccgcgcacacgtgcacacacatctcacccaaatccgaacggaaaggatcaaaaatctccagttcctctcgcatctgagtttgaatttacattcaaacatgtgggtgtgcgcttgtgcaaatggatgttgctcgagttgattttcgtttgattaggttttaatgttcatttgtggttgtatttatcattttttttttcagtttttctgtttcgtttaattcttagtaagaagtagttggtacaacaagctgcaaagtattggagaaggtaatgcgattatgttttaaattggtttctttggttcaatggtacatatatgtatagatgatggataaatgggcgggcattgctgattaaagttggacgcaaaacaagtggaacatttaacttagattacgctaaatctgttcgccgcttcccgactgactgacaaagtcttttaagaatcgttgccaatatgaatcgtttattgttgatttgataacattgcttaggtgcttagtattttacatgaacgttaggaccgcctaacttactcccaactagaattaactctaatcgacttaactctaactaagtagtgtgtaaatatcaaagcattaaagagcggaacggagcgtttcggatcagatccgggattgacgggatatcgagttatgtgggttaactggttatctgatttttttcgggctatcggagaggcgagaggcactggactgaaactggagtctagcatacctgttgctgcgatatggctggcttcgtctccagatgctggcgctggtgcagcatcaggtggttcttctggaagaaggccttgccgcactcgcacacgtgtgtgcgcaccgtgcagccgccgttcgggtgacgccgattgtgctgcatgagaccgtgcttggcggcgaatcccttgccgcagctggcgcagaaatgcgacttcggtttgttggccggcgccacggagacaacatgttgctgctgctgttgctgctgttgttgctgttgctgctgctgttgggccacatgctgcagatgctgctgctgaccatgcacgggcatcgtaggcacagcggtgaccacggcttgtggatgggtcgagttggcggcctgcaccagcgtggtctgcgacatcacctgaccggtggacgatatgatctgcactggcacagggctctggcccaccagattcggattggccgtgaccacggtgcccggattcaggctagccgtgctcaagaagtgacccggcagcgcggctgtcaaggcacacagatctgtcattaggctcttgtcgccagtgtgaaggcgcaagtgaagtgccaaggcttctcggctattaaaagcactgccgcattcgctacaaagataagtcaaggtttaaggtagttccaattgcttgggtagccactacttaccggcacacaaactgcggtcgtgccacgccattggcatccgtggtggatacagtcagcaacgtagagttgcccggattgctcaccacggttatggtctgcggatgcgtttgctgtccagcttggtgatgatgggcctgctgtagctgcttgagtttgtaatttaaatcagtcaatttctatgaaatggttttaataaaggctcatcctacaaacctgttgatttgctatgatggtggcactgctcgtgttgggattgacgccattgtgcgccgtcctcacatgctgatgcagttcggccttggtgaggaatccctcgccacagctgacgcagggatgcgcctgctcgccggtatgcacccgcctttggaaggaaattatttaagaattaataatacacaatataacaatatatgcggcgtccttacctcatgtgggaaactagcgttcgcttttgtagaaactctttgccgcatacggtgcacgaatggggaatcttgccgtgaatacgtccgtggttaaccaattgaaacttgcgtggaaacgaagctccgcattcggcgcaaacaaatggattcaatgaaccgtggaagctgtgcgggaaaaaccaatcaacagtcaagcgagaaaatcatcgatattattaaaagagccaacttaccgagagtgcataatcaggtggttttcctgcgcaaagctctcaccacattcctcgcatacatatggtcgttcgccggcgtggaacttgctgtgcgtgaccaggtgtcgcttaagcggaaatgcgcgtccacactcctggcagacgaatggtcgctcccggctatggacccgcgaatgggtcagcagatggtgcttgagggtgaagctcttcttgcactcctggcactgataaggtctctccgtggagtgaagcagcaggtgagtgttgagacagtgcttgtgcgcgaagctcttgccgcaatgggtgcagatgtgggggcgttcacctgtggggcaaacggaatgattagacctgctcaaatgtttcgggtattctgccaggaacaagaacaaccacctgtgtgcacgcgtgcgtgggttgtcaaatggtgcttgagcagaaaggacttgccgcactcgtcgcaactgtacgggcgttccttcttgatggtggcgtccgtctaaaaataaacagataacccattagtatatcacactaataattcagttgaacttcgtccaaagagattggcttacttcgctgaaatgcattgattcctgtagttcggtcttcggggacaactctaatgtgcctggctccaactttaggttgggtgcttcgccttgcgagtcctcgttatcctccagtccttgtatgactttctgcacttgaactgaaataccaggaagtatgtcacctaagagtgttgttgcaccgccaacggaacaaaagccaaatggaattcaaaggaagatacaaaaaaatagagaagaaacaaaggaaaaaaatcaaagatccgaacaaactgaatatgcaaaatcaaactatttgggttcaattgggttaatcaaacttaaaacaatgttagaccaactaaacaatggcaaaaactatgattacaacgtaaccacgcaaccaggtaaaagcaaccggaaccgagaatgtaccaatatgccgggtattttccggtaggattacttcaatcggggatcagatctgattgtagtgtgtagtgtgtggaggagtaggtggcaggagggactggatcaggggtaacaaacacagatttgagatgcttacttggtgtcccgccggacgcatggtgatgggatccgtcggcagcggtgatcgtgtgcgtctgatggtggccggcagcgatggcgcgcttgatcaggatctcgttgcactcctcttgcgtaagatgcagtgctccgatcgagctgaagtgcgacttggccgccgcagatccggcggttagcaccgtctgtccggtcttcgcatcaacaatgctgccattggtcaacgtatggtggtgggcgagacccgaatccccaccagcggcggctgcagctgctgcggccgtggccggatccactagcagatctgttttttcaattcgatgggttgatacgtttcatttcggttgaaggaaggttcgatcagcccgcgcccgccgcccgccaagtgatgaggtgttgtgtgtgtgttattatatggtgagatggtaatgttgtagtttttatgcggtgcagttaacgagatgatcggtgggtcggtggtggatcgggtgcaatagcaaaatcgggcaaacacacaagcacaatgggatttatcggaggagatggtggattttgggtttcggtttcgggttcggtttttcgggttgaattcaagggcgagcgagatcgagcgagaattaaaaaaaaaaataaattaattaaataaataaacgggagtagagagagaaaaacaatcgattaacagaaaacccaaaatatatagataatcacaacacagtaacagcaatgcgtgcaacactgaatcgattcgatgggtttttgattcgtttagaatcgatccacttacagttcttgtcgaggctcaggacctgctgattgttgtcctgcttcttgaccaccgtcgatgctccgccggcagtgataactctgcaagggattgagaattaggtatatgtacattggggatctctttgggctgctggagcgccaacgcacctttgtgttccaggcggaaatgaaggatcgtttacgacgaacatacgacgaacgacattatttttgccgccagctgtaaggcctttgacatccttttgaactgccaatgatccatccgtcgatagtagatagggcatctggaacaaagacttttagtactcatggctaatggggataaattaaaggtttgtcctaatttctaaataaacttaataatgcttatgttgtaggagttgcatgtttagtttacacgtggtcctgggaattgcgattttaggaaagcctggcttacacattttttttataaatctatctttcattcaagaaatgttacatatcaaacaacaaaggctcttttatataaaagaataataaataatttttaatctatgtacattgcccctagtcatttctacaattttaatgtcccaaaaacgatttaaacaaatgagaggaagtaaacttgtagcagttttattgttcagctcaaacttatgaatgaattgaccttcatgaacctttttttttttgggaaattaaaacttggcagcaagtacagtcgccactcgctaagatctgcaggctgtgatttggagttgttggcggttgatgcttctattggccaagtgcttgtcttttgttttcgctctgattgataataaccgccaataaccacgctacacctgcgcagccagcagtgcggcaacagatgatagacgacgaacgaggggggaagttgggcgctaagagcgggaggggatgttcgcaaaaagcgcgcctttttcactctgtatgtgtgtgagtgcaattggacatcgtggcatgggagtgtgtgtgatgggcgccaaaatggtgcggcaaaagtaatcaaaacacacgcacgacaccaaacgcacactggggagcacacgtcatttctggtcgagtgtgcgtgcatacatacatacacacacatacagagggcagcaagcgcggcgaattcggcactgacgcacacatgcggagatatcgggcgcgcaagtgcggcgaattcgccgcgtttgccattgtataagtgcccgcaaatataaactaaaaaacaacaaacacaatttctcctgtcaattgcacaacaaaaaatattgctctcaaaaaaaaagaaacaaacaacaaaaaaacctatggataagcaataattattaatagaacttaaattaggttagcgatatatgcatgaatagcctagaaaaatatcgattagcatcgattgcctgtaccagctgccagacttttgaaaatttcacgaccttcccgctaattaactgctccgatttgcctgtggggggaatttattgctatttatttatttacttgctcgccaggtgcgcgtgttgtattttgggaatttctccgcacacagagccaattgtgtacgcattcgttttacaaataccaaattatgaatgtttacgaatgaaatggaaacgaaaaaaatccgtatggatgtatgctaaaagaattctaatacactcgctccatcccccccataaaaacatacatacgtacgttcattcgtacatattcgtatattcgcatgacaacgcagttacataaagcgtgtggcgtatgcatatatacgttgtacatgtacgtaagtatgtatatcgcagttgctgtcgctcgttttccacgtataccgtatacgtgaatgccattcgggccgtatacatacacagttcgttgccgaaagcagcgagtgttggtgagacgagcgagtccgtgagcgagtgtaacgcagtgcgtgtgtgcgtttgtgtgtatgcattggtgggccacaacacaattcggtgtgggaaagcaacagcaacagcagcaccaacacccacacacgcacgcacctggagcaatgtcggcaacaggggggaaatatcctcagactggcagctttcaacgggtttatcagtttaatagagctataactttggactcaccgactccccgctgactgtatagttgatgttgggcgatatctccagtaccgattcggcggcgcggttgccgttgtccgcaaaaccccaggtatagccgaagggcggcggattctgggcggcacacattatttagcacaatgcgggttgagaaagatagagagagagggggagcggggggtttttttttttggatgggaggacggaagagaaaaaagcgcaaaatttccaaacgcaaatgtaattgcacttctcgcttgcttgtggtatatgtaggtatgtatgtatgtattctaaagcacgtacaaaatactatcctcctctctagtagtagtaagtggaaattggtaatggtatttttgcggctgtgttcgaagccaaaatgtacacaacaaattcgaatacgtttgggggggtctctctcaagcactttttcatcaattattcgttatgttttcttcgttggggatatcgcactgcgacgaaatcgaaataaaatcaccgaattcgctcgccgacgacgagacgggggcaagcaactactaactatataggaccgaaaagaaagtcaagttgctctggctgcgggcgccatttttttccgtccctcggtctcaacgaaaaaaattcacttggcgttggggaacacacactccattgataacacacactctccgttttgcgtttaggtgtcgccttggcgtgggtgtgcgtgtgcgccgatgtgtgtgcacgcgccccgtgtgacgatgtgcagtttttgcaattaaatttataaacaaaacactctttttccttcaatataattcacagacacagacaccactgaacaaattccttagtgttcgtgcttctcgttctctgacgccatcttgtgtgtgcgcaggccagggttgtcgaggtgccgcaactgtctaacatgggcggtcggaggtggcaacgctgttagggctaactaatagtgtgacccaatcgcttggtattgttaaattttccctcaacggtcatgctttgcataacaattcacattttctgattgaagaatccttattttatgccaaaacttgtattagatatataaaatatcgggatgtctctatcgccagccagtggcattggtcgtttctacgccaagtcggcaaaaatcatacgtttcgtacgcctgggatgcaccaatcggcctttttatcacattgtcgtcatggaggtgcgtacttttaggccattaaaatggttaaaacttttaattggtaattgtattttccggtttagaggcgcaagaaccagcaccagcctgtcatcgagcaggtgggctcctttgatcccctgcccaacgattacaacgaacgactggtggccctgaacacggagagaattcgctattggctgggcaaaggtgcacacttgtccacgccggctgcagaactcctgggaattgccggactactgcccatccacccgcgcacctacatgaccgcctggcggaaccggaggacagctgctgaagcggaggcgtcgccagaaaaggcggaatcaaccgcataaatatagttgtgcctcaataaaagcctccttttcgtttttacgtttaacaaacggagatttcttctggttcagcgaacactggtgctcttatcaacaacaaaatgaatacagaattaaaatttattgcaaaacgtaaccaatacgaggtgaggttggtgaccaggcccaaaaccaaatgcatggataagcgagaagcggtcggagctacggtacattcgccttctagtcatgcttcagcactccagcggctttcttcatgccatcatcgatgatcctgtcaacggctgtgtgcaaatattgatctccttttagtaaaattgcaatatctaagaggtgaatttactcacattcgt

SEQ ID NO: 28631 - DNA, 3079 bp, DROSOPHILA
gacaaccctggcctgcgcacacacaagatggcgtcagagaacgagaagcacgaacactaaggaatttgttcagtggtgtctgtgtctgtgaattatattgaaggaaaaagagtgttttgtttataaatttaattgcaaaaactgcacatcgtcacacggggcgcgtgcacacacatcggcgcacacgcacacccacgccaaggcgacacctaaacgcaaaacggagagtgtgtgttatcaatggagtgtgtgttccccaacgccaagtgaatttttttcgttgagaccgagggacggaaaaaaatggcgcccgcagccagagcaacttgactttcttttcggtcctatatagttagtagttgcttgcccccgtctcgtcgtcggcgagcgaattcggtgattttatttcgatttcgtcgcagtgcgatatccccaacgaagaaaacataacgaataattgatgaaaaagtgcttgagagagacccccccaaacgtattcgaatttgttgtgtacattttggcttcgaacacagccgcaaaaataccattaccaatttccacttactactactagagaggaggatagtattttgtacgtgctttagaatacatacatacatacctacatataccacaagcaagcgagaagtgcaattacatttgcgtttggaaattttgcgcttttttctcttccgtcctcccatccaaaaaaaaaaaccccccgctccccctctctctctatctttctcaacccgcattgtgctaaataatgtgtgccgcccagaatccgccgcccttcggctatacctggggttttgcggacaacggcaaccgcgccgccgaatcggtactggagatatcgcccaacatcaactatacagtcagcggggagtcgatgccctatctactatcgacggatggatcattggcagttcaaaaggatgtcaaaggccttacagctggcggcaaaaataatgtcgttcgtcgtatgttcgtcgtaaacgatccttcatttccgcctggaacacaaagagttatcactgccggcggagcatcgacggtggtcaagaagcaggacaacaatcagcaggtcctgagcctcgacaagaactgtgacatacttcctggtatttcagttcaagtgcagaaagtcatacaaggactggaggataacgaggactcgcaaggcgaagcacccaacctaaagttggagccaggcacattagagttgtccccgaagaccgaactacaggaatcaatgcatttcagcgaaacggacgccaccatcaagaaggaacgcccgtacagttgcgacgagtgcggcaagtcctttctgctcaagcaccatttgacaacccacgcacgcgtgcacacaggtgaacgcccccacatctgcacccattgcggcaagagcttcgcgcacaagcactgtctcaacactcacctgctgcttcactccacggagagaccttatcagtgccaggagtgcaagaagagcttcaccctcaagcaccatctgctgacccattcgcgggtccatagccgggagcgaccattcgtctgccaggagtgtggacgcgcatttccgcttaagcgacacctggtcacgcacagcaagttccacgccggcgaacgaccatatgtatgcgaggaatgtggtgagagctttgcgcaggaaaaccacctgattatgcactctcgcttccacggttcattgaatccatttgtttgcgccgaatgcggagcttcgtttccacgcaagtttcaattggttaaccacggacgtattcacggcaagattccccattcgtgcaccgtatgcggcaaagagtttctacaaaagcgaacgctagtttcccacatgaggcgggtgcataccggcgagcaggcgcatccctgcgtcagctgtggcgagggattcctcaccaaggccgaactgcatcagcatgtgaggacggcgcacaatggcgtcaatcccaacacgagcagtgccaccatcatagcaaatcaacagctacagcaggcccatcatcaccaagctggacagcaaacgcatccgcagaccataaccgtggtgagcaatccgggcaactctacgttgctgactgtatccaccacggatgccaatggcgtggcacgaccgcagtttgtgtgccgcgaatgcggcagtgcttttaatagccgagaagccttggcacttcacttgcgccttcacactggcgacaagagcctaatgacagatctgtgtgccttgacagccgcgctgccgggtcacttcttgagcacggctagcctgaatccgggcaccgtggtcacggccaatccgaatctggtgggccagagccctgtgccagtgcagatcatatcgtccaccggtcaggtgatgtcgcagaccacgctggtgcaggccgccaactcgacccatccacaagccgtggtcaccgctgtgcctacgatgcccgtgcatggtcagcagcagcatctgcagcatgtggcccaacagcagcagcaacagcaacaacagcagcaacagcagcagcaacatgttgtctccgtggcgccggccaacaaaccgaagtcgcatttctgcgccagctgcggcaagggattcgccgccaagcacggtctcatgcagcacaatcggcgtcacccgaacggcggctgcacggtgcgcacacacgtgtgcgagtgcggcaaggccttcttccagaagaaccacctgatgctgcaccagcgccagcatctggagacgaagccagccatatcgcagcaacaggtatgctagactccagtttcagtccagtgcctctcgcctctccgatagcccgaaaaaaatcagataaccagttaacccacataactcgatatcccgtcaatcccggatctgatccgaaacgctccgttccgctctttaatgctttgatatttacacactacttagttagagttaagtcgattagagttaattctagttgggagtaagttaggcggtcctaacgttcatgtaaaatactaagcacctaagcaatgttatcaaatcaacaataaacgattcatattggcaacgattcttaaaaga

SEQ ID NO: 28632 - protein, 671 aa, DROSOPHILA
MCAAQNPPPFGYTWGFADNGNRAAESVLEISPNINYTVSGESMPYLLSTDGSLAVQKDVKGLTAGGKNNVVRRMFVVNDPSFPPGTQRVITAGGASTVVKKQDNNQQVLSLDKNCDILPGISVQVQKVIQGLEDNEDSQGEAPNLKLEPGTLELSPKTELQESMHFSETDATIKKERPYSCDECGKSFLLKHHLTTHARVHTGERPHICTHCGKSFAHKHCLNTHLLLHSTERPYQCQECKKSFTLKHHLLTHSRVHSRERPFVCQECGRAFPLKRHLVTHSKFHAGERPYVCEECGESFAQENHLIMHSRFHGSLNPFVCAECGASFPRKFQLVNHGRIHGKIPHSCTVCGKEFLQKRTLVSHMRRVHTGEQAHPCVSCGEGFLTKAELHQHVRTAHNGVNPNTSSATIIANQQLQQAHHHQAGQQTHPQTITVVSNPGNSTLLTVSTTDANGVARPQFVCRECGSAFNSREALALHLRLHTGDKSLMTDLCALTAALPGHFLSTASLNPGTVVTANPNLVGQSPVPVQIISSTGQVMSQTTLVQAANSTHPQAVVTAVPTMPVHGQQQHLQHVAQQQQQQQQQQQQQQQHVVSVAPANKPKSHFCASCGKGFAAKHGLMQHNRRHPNGGCTVRTHVCECGKAFFQKNHLMLHQRQHLETKPAISQQQVC

SEQ ID NO: 28633 - DNA, 6607 bp, DROSOPHILA
tttcatttatttactctgtataaatttcaatgctattctcttaattttctcactacgaaaattgattttctgcttccaaatgagttatgaataccaaattattgcaacttctttgccgtaaagattggtgttcatccttagaacttgcactaatcggtttcataaagggtttgcctttgaggatgcccttcctcatttattttattgaattgcaaaaaacagatctcaaattttgagactagttcacagaacaaaagcttataaatcaaatgaaactatggattaccttccaaaaaggttgtagataaaatcccaacatataatatgacaccaaataataaaataatcctggttactgcaaagtatttatcgcaaatagatagatgttcgtctttaaaatttgcacttacaggtttcttgaagggcaagcctttaaagattcacccagttataaactaaaatggaaatactttaaaaaaaaaccaaagaggagaacgcagtttttagtaagaaaccctttttcgcttgatctcgtggaaaaaggcattcctacatcgctgattttgaattattttgggttacgacttatgttgtagatcaaggatctgcatttcttactaaggacttttttttagggtcgacggttgaatttttttttttaggcggagacatttactggcagtttttctgtattttaaaattaatttcgaacaaaggcttaaaaaaggttattattttattactgcccccaagagagtgtgtgttacctttttcgattttatcctgtttgatttatataatgcatgcgaacgcataaggtaagttaatttccgtattattcttattcaatttacgcttacgaacacattaaatgatatattaaagtaaattatgcaactaaatgagcatcaactgcagaactgaatcgaaaaaccattgaaaacaaactcaaaaacgataagtacagttgaacgcaatgaaacgctaattcgagcccaatttacgagctctggaatcgtattgtgtgcctcgagttcagcaggagcgccaatccggcggccacaatgaggggcagcatcatccactggccagcaggcgagttggccccgttgcacagatccttggtgcaggagcagtagatggcggccacgtcgtgggttcccgagcgtctcacgcacttgttgtcggtgttttcgtctgggatgtatccgcatccacgcacaatccgggtcttcccgtaaactatgaagcattagttggcattagttatcgactttttaaagttactattgtggacctactcttttgcacggttttgcggcacagggtgggcttgtatttgtccttcagatgctccagaggctcctgtttgctgcagttcacctcgccaatggagtacggctcgaagggatcgccgcagcggggatcgaactcgctgttgcagtcgtagcacatcagggcagtggtcactgcaaattaagtaaagttgttatttattagtaatattacagcaagtactactaatacgattatagataagatagtaagatagtataaactggaatatcttatactagacagcgtttcagatttatgaacgatttacatagatgaagtcatctcctgtccatcctcacatcgtatctaaataatcctattaaagtatcttttagttagcttaatccacttaatttgcggtttatgattaaaagcttgaatttacatatgtacataaatgcggcttaaattggattagatacgattaaatttagccactttggaattgggtttgatcggcagattgccaatttctatgcataaatattatttcggaaaaataaaatccaaaaaatctattgccaaaataagatgagcatctgttgatcccttgaccttctacatacatacatatacatatgtgcattatatagtattctatagattctacataaaaattcgactttgcaattatggcacagcatatagtgcatttatataaagccaaatgtcagggcttcgaactgcgtcagtgtgtgtgtaaatgtgtgtgtgtgttcatggggctgcatacgcatgtgtatgtgagtgtatgtgagtgtggatgggggactttatgtttttttgcattgcataaactttggggctttggcttaccttgtatgcagcagagcacgcctaacaacaacaacgtcttctccatgaacggcgacattttgtatgtatttggatttatttcaattagttttatttgctttttgagcttatgttttcacttcttctctgcccggcggctggagcaacaatttgtttcggtgacgagttcccttcgttggacaatttgcgtgctgatgctgatacgatgctatatcagcatattagcctaaacaaaattaatttcggtaagttaggcaagtaaattttgtgcgcatttcctaataacccgatgacgttcgccgatttttttttgtacaatataattcgactgcaatgaaaagtgaaaatcgcggtggcgaaaataaacgcaaaaggagagaagacgcaaagcgaaaggggcaaaaacaaaaagtgggacgcagcggaaaaaaagaggaagacaaatgcgttttggaaggaagcgttgaggggcggaaagggacggcaaggcgacggcgcaatgcaacacactcgctcgctcgttctctctctctccttcttgctcaccgatgacgcgcgccctctagcgacccaattagtgagccaatggatcccatgtggaacgcattcgaacgacgagctatttgctcgttgttgctgttttccaattttcacccatgtttcttttttggtatatttcttcttgacttgggatcgaatgtccatttaattggattgcaatgattgctcgaacgcagctacagctgcaactgcagcccccctcccccacaccaattgattttcccacccaacactgccactttttttcccattttttccggatggtgggtaattgctaacggtactcggtagctaggtaacaaattaccaatacgtaccgcccatcggaaaaccccaccttcgtattatctgccccactcccaggcgcttttaatagtttagctcacgtttgcgatttgtggccaagtgctttcgatgggctttccaacccccttttttccattttcctccaattgtcggctgaatctattttccttttccttccttttttatacttctgtcaagtgaaaaggctttgttgggctttgcttacgggattgtcctcaaatctgattacattattttacaatgtagtacttttttaacataaccatctaacataagaacgtattcaactacatatttaaaatatttaagagcatatttaagcatctttcatattgattacaatatgtgtcatatgtttttaatacgattttatagatttttgaccctaagaactttactcatagagctcattaaattttccttttccttaactactatcaaatattgatcgatactaaacttatatgaccccttattaggtccccttattagttccccttttagacccacttttcgacccccgcggtgacttcactttgaatttgaacagccaatttcctggccactcaagtaattacattgtcatcccatttccgggactgcctgcagttgcgctggccatttgggccccattcaaaaccacaaaaccccgccactccccccgcccagccatcaattggcacgtaatcgagaaaagtgcaatgcactgaagccatagattctagagcactgcagttgggttgcccactccaaaacaaaatatggggcggtagtcgcattgggcagacagagtacaggcttacagggtacgaaatattacgcatacgccccgttctggccaccagcgagatttgggtttctggcacatggcacacaggtaaccatccatccggctgaggatacacagccgtgcatggcaagacgtctgaatgccgagcgaatgaaaagccaatcaatatggtagccaaggggccgttgtcatgtcggccattcaatcgttcatagttgttggtcaactggcagctgacgggccaaaacaggaagatttccaatcggcaggctatgtttgatatctatatataggatgatgatgatttgtggtgggtggcttgattgagtgggcctagtttcatgttagccagccatcagcgttcgctgttcgcttgcaactcgcaggacatgcaacaccctgcctcttccgccagccccggaaaattcaataactgacccagttcaggtgctgttctagccgaccacttttcagccagcccactcgatggtttttcctgccatttaccatcgtccaccgtctgtctccgttttttggcatttcctgtgggaaatgggaaatgttttggagtcagaacccatccagcggcattggttctttcttctttcatttcagctagttctttttgttgttatgtaagagcccagacaattggcagtagcacgaatctggcatatcgatttagccattaaaaaaaatggaacaagcaacgaaaaaaaaaaaaactagaagaagaacaacaacaacgcgagcagaacaagtggcatgggaaaattactcaggtggcacaggtaaaattatcgggggggttgggtctgcacttttgttgtgtaatgcctggcgaagacctcgaggattaagggattcgggggatacgacagattcttgctggcttatgaacttggccagcagttaattagcccgtttaaggttaggtattgttctctttatctgtcttatatatccgcaactattcagtttaaatggttcgtccatttgcgcttgcaacttgttttgtaatcacttatgcactgtgcacttccgcttcacttcgaagtcacttttcacttttacttgggcagttatataatgccaatagttttccgcaaagtttccctttcgaatgcagttttcttttccatttatttacgtaagagtggagacattcgcaattttcctggctctcgaactatttcaagctgatgacaccgaagtggaaatgaaagggcccccaaatgaaaagcgaaaagaaaagcggatgccagagaaaaagggctcagaaatatggttgaaaggggggtggggggttggtggaacggctagcgggtggaaacgggtgaatagttgtgggcgaagggtgcgcggggtgtgggcggatttaagtgcgattccagtgcaaattctctcgcaaggacgaagcacaaagtcaaagcggccgagagcgaaagagagaggaatatcgagtgcggaaaagagacacagagacagagagagagagagagagagagagggtgcgagcgcccttttgagaaaaaccaagcgaaaaaagttaaatcgatagcgaaccgcgccactgaagcgggattatctaacacggcttacagtccgtttcgcccagaatcgcgactttactttccactctttgcacttgtctcgatttttccagctacctttgcgctcgctaaaaaaaactctcgaattcgtacttcaaatgctcgattttgtgtgccaagggcctcctgatttgctgtggactctgatgcggtcacgcgacgcggtagatgcaaccccaaacacggtgaaattctttctgagcgctccgccaaatccgcagctgtccggcgagatttccgccgagctgtttctgtttctctggagagcgagaatctcaccgaaagagagagattgcgcactgaacaaccctggcaaatctctattttatattctgcgataagttttaagtattttcaaacatctaacttcaatacttcttgcttatatattttttttcaaatttttaaatttaccgaatgattggatatctacagtatccaaataaattttttataataatgttatgtcataaattcaatttatttttagtctgctataagtttaaaaaagtattttaaaacttctaggcttactacttctctctcaaaatttagaaattaccgattgaggattggatttttatagatactaaaaaacattttcaaaacaatgttatgttataaatttcataatatttttgcttggcttctacaaaatgaaaattttttaaaaagtactgcttaattttaaagcattgtagctagaaatttcaatttcaaatgagtattattgctttcaatattgttatcagattgtttatagctaaaacaaatatattttttttgcaatgtcggttcatgtcattatgttaatagggttggaactgaagatatcaatccgaaaaactgccggctttgctctgctataaatctgtactgaaatattatataatgttaactacttcttcacattatatagatcaaatgtatgcacttgttttgtagcttttttccagttcttaaacaaatttagaaactatttagaataatagaacaatttttggattaacacttattttattttatttacatatttgtacaacagccctaatattagatatttaatgttgttcatataacaaatatcccgaacatcaacaatatttccttatgatctaatgacccttatgatcagttaagctttcagccctttatgcaattg

SEQ ID NO: 28634 - DNA, 705 bp, DROSOPHILA
cgtcgcgtgaccgcatcagagtccacagcaaatcaggaggcccttggcacacaaaatcgagcatttgaagctaatatgctgatatagcatcgtatcagcatcagcacgcaaattgtccaacgaagggaactcgtcaccgaaacaaattgttgctccagccgccgggcagagaagaagtgaaaacataagctcaaaaagcaaataaaactaattgaaataaatccaaatacatacaaaatgtcgccgttcatggagaagacgttgttgttgttaggcgtgctctgctgcatacaagtgaccactgccctgatgtgctacgactgcaacagcgagttcgatccccgctgcggcgatcccttcgagccgtactccattggcgaggtgaactgcagcaaacaggagcctctggagcatctgaaggacaaatacaagcccaccctgtgccgcaaaaccgtgcaaaagatttacgggaagacccggattgtgcgtggatgcggatacatcccagacgaaaacaccgacaacaagtgcgtgagacgctcgggaacccacgacgtggccgccatctactgctcctgcaccaaggatctgtgcaacggggccaactcgcctgctggccagtggatgatgctgcccctcattgtggccgccggattggcgctcctgctgaactcgaggcacacaatacgattccagagctcgtaa

SEQ ID NO: 28635 - protein, 155 aa, DROSOPHILA; identical to SEQ ID NO: 13599

SEQ ID NO: 28636 - DNA, 9680 bp, DROSOPHILA
gtggcttcgccacagcagccatgccttcgtcgttccgtacgtctagcgggtaggatgcgttcgcagaactatagagccattcccaaggttatgaatttgcggcgcagcacgcggctggcgggaatccgggaacatgccacctccgttgttgtggaaaacgggacgcgccttcaaagtgcagtccaaaagaaacgcacgcgaaaagtgaaacctgcgcccaaggcctggatggccaataatactaaatgtttactgggccatcttaacaatggaaacgttaagcaattgcaggagattccagggatcggttcaaagaccgcctctattttggccgtgcacaggtcagttgacatacgttcatttgcgttttacccaataacccttaatccttaatccacatttttcagatcccgcctgggttgcttcaagaatctaattgaagtcaaatccctgcccatttggtcgggaaataaatggaaacgattttctcaaattaactgtcttgacacttgatacaattactaattaaatagcattttaattcgaatatagtatagtgattgttatttatgtggcatatactttgattttacaactatagtaggagtaaaaaaaaaggagccggatatccttaaagaaacagttatatatgtgatttattttttaaataggcttacctaggatatattatataatatattaaattaacaaaacaagttggcattttaaattaaagcacaaattgattgttataaaagtattaaacaaaaaaaactagtcaaaaaagaaaaactttcaaataaatgacttattaaaagtgaccaaataaataatattcattaactttttttttcaaatttaactccctttcagcgttgccagattgggttgcatgcgggatttgattatttttattcacaaattctgggtagagggccacttgtgctgctccggcagctggtcacactgtacagtcgcgcagtttggtttctttggtgcgagaagacggttggtgttgttattttttttttagttcgctccgctgtttttaggtgctacgcgctttatggcccgctcttaatcttatcgcaaatcaaatcaaaccgcggccaatgagcaccgtaatttcactttttggctaacggtaacggcacttccgctctccgaattcgatattcaaacagtcgcattccatcgaaaagcgaaacaagaagtggccgtaaaaatgaccggtgaaaacagtgaatcgccagcagagccaaacgcccacccaacaacggcaattgcatcagcagcgggacgtcgagaatgggctctatcccacgatttcggacggaatatgccacattattatcggatagaatacaggaaatgtaggatttaggtaagggaataataaatttctagtagttttcaagtcattttggagagcacatagtggttaattcatgtaccatattaatgcatgggaaattggcgaaaaacaaacactcagccggcacttcgcggcactcacacctacacaatcatacgtgcgtgtgaatgaagttgcttgtgcttgtggtggtctgccctgttgccgtcttcttctcaccctcggtgaaagttgagttcgatgaatcatctgagcatcgatccgctatggcggcgatcttcactcttcgcactcactcaacagggggattctatctacgaatccatcagtttcggccgcttcgattctagtttagttagcactctcttctggttgatttgggcagattcatatatatatatgtatataggtatgtatgatcatacgattagcatacgagataagctgccaatccaatccaaacacaaggcgctggaaatcggcattccatacacattcctactctcttttggctggaaatcttatccgatttccctcgcttcaaacatcaaaatactctgtttgggtttcccgagcgttgattcattaatctagccatgatataacaaccaaaataatatcaagctatagaatatattttttaaagaaaaaaaatcagtctgcgggcatccagttctcagcgagaacttagcggcatccagctaatggaggagacagtagtggcttcgccacagcagccatgccttcgtcgttccgtacgtctagcgggtaggatgcgttcgcagaactatagagccattcccaaggttatgaatttgcggcgcagcacgcggctggcgggaatccgggaacatgccacctccgttgttgtggaaaacgggacgcgccttcaaagtgcagtccaaaagaaacgcacgcgaaaagtgaaacctgcgcccaaggcctggatggccaataatactaaatgtttactgggccatcttaacaatggaaacgttaagcaattgcaggagattccagggatcggttcaaagaccgcctctattttggccgtgcacaggtcagttgacatacgttcatttgcgttttacccaataacccttaatccttaatccacatttttcagatcccgcctgggttgcttcaagaatctaattgaagtcaaatccctgcccatttggtcgggaaataaatggaaacgattttctcaaattaactgtcttgacacttgatacaattactaattaaatagcattttaattcgaatatagtatagtgattgttatttatgtggcatatactttgattttacaactatagtaggagtaaaaaaaaaggagccggatatccttaaagaaacagttatatatgtgatttattttttaaataggcttacctaggatatattatataatatattaaattaacaaaacaagttggcattttaaattaaagcacaaattgattgttataaaagtattaaacaaaaaaaactagtcaaaaaagaaaaactttcaaataaatgacttattaaaagtgaccaaataaataatattcattaactttttttttcaaatttaactccctttcagcgttgccagattgggttgcatgcgggatttgattatttttatgcacaaattctgggtagagagccacttgtgctgctccggcagctggtcacactgtacagtcgcgcagtttggtttctttggtgcgagaagacggttggtgttgttatttttttttttagttcgctccgctgtttttaggtgctacgcgctttatggcccgctcttaatcttatcgcaaatcaaatcaaaccgcggccaatgagcaccgtaatttcactttttggctaacggtaacggcacttccgctctccgaattcgatattcaaacagtcgcattccatcgaaaagcgaaacaagaagtggccgcaaaaatgcccgtgaaaacagtgaatcgccagcagagccaaacgcccgcccaacaactgcaattgcagcagcagcgggacgtcgagaatgggctctatcccacgattccggccgagcgacgatcgcccccctcgcgtccgcaaacgctgcgacaggacaccatcgatatggaggaaataccgctcaatcagacgaacagccaggagccagaggatcggcgcaaaatgcacgagatatttgacaaggtatgtaggacttataatactcgcaattcccttccccagcacaagtggcagctcctcctaagtattagatcttttctggtttgtagagccagctaaccaagtagtagccatggtaactatacctataaaggtattactgttcacacggtgttacaacttagcactatatctttaaagtaaatctatgatgatttaacgttgatttaatagttatgccacattattatcggatagaatacaggaaatgtaggatttaggtaagggaataataaatttctattagttttcaagtcattttggagagcacatagtggttaattcattagttagaaccagctacgactaattatcccatttaaactggctggtggtaggcaacagaaggttaatgctgagatcttgtgaaattgcaccatattaatgcatgggaaattcgcgaaaaacagaagaacgactgtaattaaaacacacagccggcacttcgcggcactcacacacacacactcatacgtgcgtgtgaatgaagttgcttgtgcttgtgtggtcggccctgttgccgtcttcttctcaccctcggtgaaagttgagttcgatgaatcatctgagcatcgatccgctatggcggcgctcttcactcttcgcactctcccaagaaaaccccacctttaacccttcaatgggccggcgggcgaaaaccgacacgatcagatgcttttgtttgcaaacatgccagtggaacaaacttaaggtatacattattaaaaaaaaaccttgtatcttgtggtgattaataaatacgtgagatttgattcccgtttaacattaatgggttaagaattcgattatagtgcctaaataatcaactgctatatgtacttatatcatacaagcataattacacttttcggtgtatttaacccatcaccgcttgtctgtcagtcaattttgcactttcgcagaattccgtatcacattttataagctttttttcgctgcagtttgttttcttaaagtagaaaaatcgtgtgtgctgcaaaaaaaaatgggggggagggtggttgcctactgttgggggactgagttttcttatcgtgacagagggttgggggaaaaagaccagcaaaaaaagaagaagaaaaaccggttataaattattgtttgttcgctttgagttctgcctttgttgttgttgttgctcttgctttattcttggtggcgttagtcacttaacccccaactgacacccaccgcccacctgtttgcccgagtgttaccattatcaatttaacaatttgtggatttcgtcttttttaattctaccagtgcgattgcctcaacgtgcaacgtcctcttgattcaccatttgtttatagccatatagagtgtgtagcgttcatatcgcgttcaatgtaccccggcaacaaggggattctatctacgaatccatcagttttggccgcttcgattccagtttagttagcactctctcctggttgatttggacagatacgtatatatgtatgtatataggtattctaaccatacgattagcatacaagatgagctgccaatccaatccaaacacattcgatgccgctggaaatcggcattccagacacattcctattctcttttggctggaaatcttatctgaattccctcgctacaaacattcaagtggccaaaatactctgcttgggttttccgagcgttgattcaataatctagccatgatataacaaccaaaataatagcaagctatagaacatattttgtcaaaaaaaaaaaaatcaccaatctcaaccaacattattcgttggaaagttcaacttgaacccggaggggactgtatcattttgatatttttgaaatatcatgtttgatatgtcacagataacagtctttctgatatgggaaaatagcagatagatgaccattttcgttgatatttttattcattgagctgtgcaaaagagtaaatcttaagttgtctgttggctaatataggaaagttttggaacttcaggtgttccaatggttttacaattaactttttccgaaaaccatattttttacaaactgaccaagtggctttcgtgtgttccgaacacacttgacgactatgactaagtcccaatccccgcgagactccgttaccgctggcagcttatcgcctggttttgataataaccaactttttggttttgttttttccccctgttctgttttattttaagaacacctaaaggtgtaaaatattagtttacgactggaaaggaggatacatatttatgtgcatgtacatacatgggcacctatctaattgtctatagtatatgccaatgtctttcctctttttttttgcgtgaatctaacttttaagtgcgagcgttgacttttcgctgggttttctttgttatcccagttcctagttatttactttactaaataccttaaccatacttaaaaggtcagtgcgcatagcttacctatgacaaatgttttttatgatcgaaaaccgagaatacaaagcgataagacagtaacatccatatagggactttctattggcgaaatggcaattgagaatttcgaacttctgaaaggaataggtgacaaatgttttttttttagcaaaatccttttgtatttaccaatggggattattgacgttttgcaaaaaccatcagttgcgtttagttcacaataactttggatgcctttgtgcaacttcatgtgactttgtttcgatttgttttcgattagccccgttttggatttctagtttctcgtctcgatctgtggcatttattcctgcccatttatggccactttttggtccgacagcgttcgcggctgtgttgcaagtgctgatggtgatgcaatcaaaaaggaggaaaatcactcaacaaacataataatatgtgggtacttgtttatttgtgaactcatgctgcaggtttgagtgtgttacgctatgatttagaatagttcctcgggtgaatgagattcattcggagtctaagggaaggtcaaagaaagtggaattttggctcttgggggcgaggcaactggtggcctgctcctcctctggcgcatccacagcatcgtgccaatcctgggaatcgtgctcctcctgctccttctgatccgttagctggagcagacgcatccgcaagcgctgctcttccagttgaatgactgaaggcctaggagcagccacttcgcgaataagcgatggcatggcggtcgtccagtttggcagcagagttaaccccgttgccctgccctgccgctccagacgctgcaactggcggcgctccatggccatcagttcccgcttggcccgggcccgcacctggtcgtcgctggtcgtggtgcagagactcagggccgcaaagatgccggccatgcccaggtagagaaccagtacggtcacaatgccggacgattcctgcagcggctcctcctcctccgcgacgtcgcatgtgggcgtcggtgtccagccaagccaagaggtcacgtggcgggtcatctccatcagttgcgacatcgttctcggttgaatcttgaggcgaagatacaaatatatataatatatgtatggtttatactaaataattatgtcattaaccgatgacaccaagcaaatggtagtttctttacttccttctagggaaatgtattcagtagtttatttttattacagcctagttttaaaaggtaggatgaatgcgctgatatgtacccaattgtaatcggtgtttccaagatgttgtatttcaagattttttggattcggtgcgggcctgcccgaccactcggaatttcagctaggtactgagtgttcgaatccctaatgttttcgaacccccatgacgctttagtatatggcctactgtgtttaaatgttgacttacccagattctatgtgtgagcttaatcatgatgactaaccaaccatatgtatatgcctctcacacagcacgactctgacagagatgggctgatcaacacgcacgagctgaaggaactgatctcggatggctattgccgggacattcccgcctacatcgccgaccagatcctgaagcgcagcgatcaggataacgacggccacctggacttcgaggaattctatgcgatgtccctgcgccacaagtggatggtgcgcaacatgctgacccgctactgtcgctacgttgtgccgccaccgaagcccttagagggcgatgagcccgacggtgcctacgagaagcaaatgtccatctgcccgccgccgctcaccatggtgctcttctcgattatcgagataatcatgttcctcgtggacgtcatacatttccagtgagtagtgatggtacaattggttgtatatgataataacactagtaatctgctatgttcagggacgatcccaactaccaggatcgcataggcgagagcacaagtggaccagcggccaccctgttcatctacaatccgtacaagcgctatgagggatggcgctttgttagctacatgttcgttcacgtgggcatcatgcatctgatgatgaacctgattatccagatctttctgggcatcgccctggagctggtgcatcactggtggcgcgtgggtctggtctacctggctggcgtgttagccggttccatgggcacctcgctaaccagtcctcgcatctttctagcgggcgcatcgggtggagtatacgcactgatcacagcccacattgccacgataattatggtaagtctttgttatactatttgatattattccataattaccttatggtcgccaaacagaactactcggaaatggagtacgccattgtccagctgctggcctttctggtcttctgcttcaccgacttgggtacctcggtgtaccgccacttgaccgaccagcacgatcagattggctatgtggcgcatttgtccggtgccgtcgccggtttgctggtggggatcggtgtgctgcgcaatttggaggtgcggcgatgggagcgcattctctggtgggtcgccgtcatcgtttactttgccctcatgaccactggcatcatcatacacgtgtttgttcccgactacttcccaaaacaggagtacaactagccccatcactagctctagccctagccctaacccttaaccatgtccaaagtgcacttcgatattgagccgaggttgcagtacgcacagtactatatataggatttcttctgaccatgtgcctatgccagctgcaaaaataatttatttttttacaacttgccatgtcagcttcattcccaatccgaaagtggtgcaagcatgtcgtacgtatttttatatatttatatacatacatacatatatagtaacgtaattatgccttcctcataattctcttatacaaaagaccgaccgcggtggtccgccgtatcgattccttgttactcgatattgcgcatccacttaagccgtaaccaaaacccagacactaggcaggcacatacatagccacgtagcacataagaattctttttcatatgtatgcacaaaagcataagcaagaagcgctctcgcgcagatcaagtaaacaacccactaaccaagtacatttaagattttctcacaccatttgtttcagtcttaagctgatattcaatcaataaaaacgcaaagcgaattcattcgaagtttttattcatttcggttcaaatacggatcatttattcgactcaaaagcaaaaattattttactatatgtattctcgatccacatgacgcgacgcggcgcaacgaaatgtcgacggagaacaaaactcagagctgcatttgtattacacatttcgttgacattttttttttttcaagaaaaacgagaaatatctttaaacaaagtgtactgtatatttttggagatttattattaagatcttatatatttaaatgtaataaaaacaatgtctttgtacgaagaagatgggtgttttgcgtatgatttttatttttttaattgtgtcattcatgttcaaatgtaatgagtacaactttgatcttgccttcgtaggaccagcaagaccaggcagaactacttacacgcaatcttacataagtactatatttttat

SEQ ID NO: 28637 - DNA, 1398 bp, DROSOPHILA
agaagacggttggtgttgttattttttttttagttcgctccgctgtttttaggtgctacgcgctttatggcccgctcttaatcttatcgcaaatcaaatcaaaccgcggccaatgagcaccgtaatttcactttttggctaacggtaacggcacttccgctctccgaattcgatattcaaacagtcgcattccatcgaaaagcgaaacaagaagtggccgtaaaaatgaccggtgaaaacagtgaatcgccagcagagccaaacgcccacccaacaacggcaattgcatcagcagcgggacgtcgagaatgggctctatcccacgatttcggacggaatatgccacattattatcggatagaatacaggaaatgtaggatttagcacgactctgacagagatgggctgatcaacacgcacgagctgaaggaactgatctcggatggctattgccgggacattcccgcctacatcgccgaccagatcctgaagcgcagcgatcaggataacgacggccacctggacttcgaggaattctatgcgatgtccctgcgccacaagtggatggtgcgcaacatgctgacccgctactgtcgctacgttgtgccgccaccgaagcccttagagggcgatgagcccgacggtgcctacgagaagcaaatgtccatctgcccgccgccgctcaccatggtgctcttctcgattatcgagataatcatgttcctcgtggacgtcatacatttccaggacgatcccaactaccaggatcgcataggcgagagcacaagtggaccagcggccaccctgttcatctacaatccgtacaagcgctatgagggatggcgctttgttagctacatgttcgttcacgtgggcatcatgcatctgatgatgaacctgattatccagatctttctgggcatcgccctggagctggtgcatcactggtggcgcgtgggtctggtctacctggctggcgtgttagccggttccatgggcacctcgctaaccagtcctcgcatctttctagcgggcgcatcgggtggagtatacgcactgatcacagcccacattgccacgataattatgaactactcggaaatggagtacgccattgtccagctgctggcctttctggtcttctgcttcaccgacttgggtacctcggtgtaccgccacttgaccgaccagcacgatcagattggctatgtggcgcatttgtccggtgccgtcgccggtttgctggtggggatcggtgtgctgcgcaatttggaggtgcggcgatgggagcgcattctctggtgggtcgccgtcatcgtttactttgccctcatgaccactggcatcatcatacacgtgtttgttcccgactacttcccaaaacaggagtacaactag

SEQ ID NO: 28638 - protein, 284 aa, DROSOPHILA
MSLRHKWMVRNMLTRYCRYVVPPPKPLEGDEPDGAYEKQMSICPPPLTMVLFSIIEIIMFLVDVIHFQDDPNYQDRIGESTSGPAATLFIYNPYKRYEGWRFVSYMFVHVGIMHLMMNLIIQIFLGIALELVHHWWRVGLVYLAGVLAGSMGTSLTSPRIFLAGASGGVYALITAHIATIIMNYSEMEYAIVQLLAFLVFCFTDLGTSVYRHLTDQHDQIGYVAHLSGAVAGLLVGIGVLRNLEVRRWERILWWVAVIVYFALMTTGIIIHVFVPDYFPKQEYN

SEQ ID NO: 28639 - DNA, 10514 bp, DROSOPHILA
aaggcaacgtaaaccaagtatggcaagaaatccataaagatacgtatataaatagatattatttgtaagtttgtaagcctagagatccgatgtgtatgtgtacaacagcaagcgtgtgtgtctgtcttctttataaatatatatatatggttttttttttttgataaattaataattatattattgtaatgtatctacatacggcactgaatgaacaactttgctgctgcaattgtatttgtatttgtattgtgtattccatttacggcattttgatagtaaatatacaacaacaacaaatcaacgtatttccgactgcatcccgaaggttactgaaaccttaatccacgaagtacgcgacgagcggttagtcccgcccgagtattaacttaatggattctaacgatccgatcttgtgacccatcatcatcccttttcgcgacccttccaaaacgaaaatgaagaacattctaagctccgcttgcccattcagcggaagaaagcaaaggaaaatgtaacatttgcctcataattattatatacatttagcgcttattgaatattttttacaattgtattccgtaaataaatataaaatacatcaacatctagtcgcgtgttttaagttaaaggaagttaaggccaaagcaaaatgttagcaacagtttttgttaaaagttaacatatataataatggtaatttaaatattcaaatctatgaagtgacttattttataagtccacttatgtttgttatatttaattggtatttagaaaaggattcattttaaattaacaccgttgagggttcaattttggtagtgcgtctttgctaaccatgccgagtgggatcaagtccttgctaagttaggatgttgtcttagctaactgtgccatccctggtcggggtgtgtcttagctaacaattacgtgtcgatagatataatgctatcgatatgacagagtgtcgggaacaatcgatagcattacttcgatatcggtactagtgccacctccagttttgtgattgtgtcaaaaatacagggttttattgttgcactagcaatttaatccgaggaatataaattttgtgtggagttatgttcgagacgtcgttgccagcgattcaagaggcgagcggtcacacgtgtatgtgtttcactggcggtgcgggcgccaactccgccaaaaagcgtactacttttaaccttagttgacattgaaatgtacccgcttagttggatgtccacgatggtgcgtgtgtgtgcgtatatgtgtgctatgcggcgtctgtgtgcgcgagtgtgtgtgtgggattgcaaaggaggatgggagaaacgagagcagagcaaaaacaaaaacaaaaggaacctgctgcacatagtcggtgcatgcgagcgtgcttatgtgtgtgtgcgtgcgtgctagcaaaacaactgcaagaaatcagcaacagtagtagaagaagagaagctgtatcactgataaggaggctaaacaacaacaaaaacagcaacgataatgtgcaccctttcgaaatgcaaacaaaacaaagcgttgtagttgtgtaatcattcgttgtgaacacaccacacacacacacacacacaacacttgtttaataatacattttaattctattatttttgatttaatttttgcctgttattcaaatcgatctgtgtttttgcagttggcattcgttattaattaaatcagccgccaacagctgagcgagagagcaatcgagagcgacaggagaggatccacttccaatcgaatcgggtggaatcgaatagcaggggcttggtaattaaaaggaagaccgaactgaactgaactaaactgaaacggaacgaagcgaagcgaagcgcggcgaggcggcaagaaacgaaaagaaaagaacgaaagtcggcagagtcggaaagtcggcaagtctgattgtcggcaaagtcgcaaagtcggagagtcacagtctcaatcgcagtcggcgagagattccactcgtgtcgcacgtccgttcgtttccacattgtcgttataaaaatagcaacgccttaaacgatcgcatcaacctcatcaacagaacaccaccagaaatcaccgccccctcctacgcctcaatcgccatcgccaccgcatcccatccccatcatcttcattagcaggcagcctgacagagtaactaactgatcttgattgcgaccataatcaccgtcatcatcatgtaatccttcactaaccaattgatttccgctcgtccaccaaatagattccaaactgccgtttcggcagccggcaagatttcacgaaatctaatggccaaggacgaggaggatgatctgctgcccgacaaggatgcggccaagggcttctatgccaaatacgagcccaaggagattctgggcaggtaagaatcgaactacacttgccgtgatctcaaacctcttattaaatccttttaaattcagttgaagtattattgatcctgcacttaaccattcaaatacgtttctttctatttactttgcgtagttaattttgcaaatttaagatcatagaaacattgatacttgtatcctcagaaatcactagaacgtccaaatattgattgtttctgctttcccaacctcttactgccaagtctgcagtaatgcagtttgggctaaatggtgccaagtgagtcagcctcatcaagcttccatggcatggagcaatggcatgggctgcttttcaagcggcgcctgtctgccggcctactcacgccacaacgaagatcagaatttgccaagcaaatagcagagactaagcgaaaacaagggctaattacatattacaattctagggattagagattagataaatacccgatcatggcaatgtcaagtgcagcagaagcagagctctttatctacatgcaatgtttgtcttacaggggcatcagttcgaccgtgaggcgatgtatcgaaaaggagacgggcaaggagtttgccgccaagatcatcgacttgggcgccaccacagagtcaggcgagacgaatccatatcacatgctggaagcaaccagacaagaaatctcaatactgcgccaggtcatggggcatccctacataagttagtctcacatagcacccacatgtacttaattccaccactaaccatctacattatcgtgcacagttgatctgcaggatgtgttcgagtcagatgcatttgttttcctcgtcttcgagctgtgtcccaaaggtgaactcttcgactatctgacctctgtggtgacgctatccgagaagaagacgcgcaccattatgcgacaaatctttgagggcgtcgagtacatacacgcgaagagcattgtccatcgggatcttaagcccgagaatatcttgctggacgagaaccacaacgttaagatcacggattttggcttcgccaagcagttgcaagagggcgagaaacttacaagtaattataacacagcatccttctgtattcgctaagctaaactatatgtactttccccctattagatctgtgcggaacgccgggttatttggctcccgaaacgctcaagtgcaacatgttcgagggatcccccggctactcgcaggaagtcgacatgtaagagcgaataaactagccacttattattacacctttttttggctcacttaaattatagaagcaatttaagcacaaaaagtatcacatttattgtaatacgaattgtctgctcaaattactaaattgcttatgttaacagctaattttattattaaaaatttttgcttacataaaaaaagaaaggtctaaacttttgtatcgatattagacccgttttccttttttttttgttttatagacgcaaattttgctgatacatttcattaactagtgttcctcgtgtcaggcgatttgttttgatctttaggtgtgcattttaatgaatgagtcagaagcagaaaggcataataatctgaaatctgagtagttccgataccgacgtctatatttcttcggttcagcaaaacgtagggctttttgtatttttgagttctttaacgtttcccactggtatctacgttacttggtttcagcagaaatttttaataggaaaaattgacaccttttacccatttctttttcgatttctttttgttgttcgcagatgggcctgtggcgtgattatgtttacgctgctcgtcggttgtccacctttctggcaccgcaagcagatggtcatgctgcggaatatcatggagggcaagtacagcttcacctcgccggagtgggctgatatttcaggttggtcaaattgatatgcacatgccaaacgtatgcttatttacttggtttcgattgattgcagaggatcccaaggatctgatacgcaaatgtctagtcgttgatccttcgcaacgtataaccgtcaaggaagtattaagacatccattcttcaaccaaatggtaagtgccggaattgttggcagccgccgggctccaattaccacgaccaccaccaccaccactactacaaccgcctgtacaagaggaaaatcagtcaaattagttcaattagtcgccaagaatgaggtccgcctacgagtcgtcttttgtgctcgggcagcagtctatagttttcgggttcctgttcttgtacatagatactagatctctagttgatgggtttaacctcgggtgggttaatcttctacacaaccaatccaccaaaacaaccaaacacctggccctgcaaatgtttctaaacacaacgtacatctaagaacacacactctgatggaaagaacacccacctgtgactcacaaaccaaccactcacaacagcctattaacagcttcttcttactgttacctcctaaaaatacgattatgatttataattcggttagggtagcagcctaaccccccgtagtttagttcaattgtcagatttatagcctgacaggatcagtcattagtttggatcccccgccccccttaaaaagaaaaagaaaggaaaacccttcggaacctcttgcgttttgttaactttttatttctatgattactatttattataccaaacattttctttcttcttttccttacatataaactatatatcaaatcgaatccaattaattttaaacgaacccaaacgaacgataacgaacacacactaccatcgatagctgttcgagcaaaacattgatggcctcaagcgcagcctgtcgaccaagtcccgacgaatgagtcgcatcactgagatcgcactggtaacgaaccgttcccggactaacccaagctctctctatctcttaatctctctgtgctgtgtgtctccgtgttcatatattgatatcggagccgtaatcgtaatcgctctaataacgattatcccgataatcctgataatcccgataataaaatcaagcaatcgggccggcagacccaactcatgaccatatgcaaccctgccggcccagcattcgtgtgtctgttttccgttgcattctgttctgtttcgttctgtgccgatctaatataacccagctaaactgtacatcatagtgcatatcaattgtatactatacatacttatttatttaaaatccgttcaggtcatctgtgccaagcataataacttttaaccggccggcaatagccagcgaaaaacgaaacaaaaacgaatacgtacccgatctgcttcgtttttgtttgcatctgatttgatttgcttgtcgactgatcgatgcaccacaatgataacaaaaaaagaatatatatatatacatatatataacccttctctataatcccattccttgttgtactcgatgtttttttgtcgattttgtgtgttttttgtacaaatcaaccgattgcctcgataactaaaaacgataacacacgtctgcagctctgcgctcgccatttgaatcataatctgttaagttaataactgtgtctgcatgccaaccaaccaaaaaaaaagcaaaacaaaaatccagcagggtttcccttatcccaacctccaaagaaaaccccacaattcctattttgagtcactgcatgcaagcgtgcattaaccattcagtcagcgagaagaagatttgaagatttggcgatagtagatagtagaattcacagaatagatacaataccccatcaaggtgcatataagtatgaaacacgaaggtatatattattggtagtccactaggatgttgtacacttcccacagatcaaataagtagactgtaagttgaagtcattttaggtattatattcatatacgtataagaacgtcctgtgcttcacccaacccaatttttaatttaacctccgtgactgataaaccaattttaatttcttccgggcccactctgctgctgcctctgaccctcctgcccactgccaatctcatccttcctccgtctcgcctcgccttcggttttttgtttattaatcgcggtgtcgacgggatcaggtgttaatgggtgatcgccggcatccggccccgcccatcgcgcccgcccaaacgaacagcaggcatctgctgcaacccgaggcgtcatcgtatcgctttggtcagctgaacagtagttgcgccggtgcccccaattatctgtactgtgcgccacagagctcctactcgtcgaatcgaatgcgcgacggggcgctggacgatgcgggtgccagtgctgcatccgccacctgccatgtcatgtcgccatccaacgcctccaattcctacgccaccaacaccacagccaacacctcgaactcggccttggcatccgcctcctcccacaaaacgctcacggcgatggtctactatcagcagcaaccgcagcagcatcagacgcagcagcagcagcaacagtaccagcagcaacagacgacacagctgccggtgcagctgcagttgcagcatccactattgcagaccggtggcgatggcaagcaatcggtgtatgcacctcctacagtgcaggcaggttttccattgatattctttgatcttgcttacccaacacgaatggcccagcgggcgatggcaggaatcgctagggaaacgttaaattgcataccacagagcaggacgagtgtgccccacaattgcattagagttgcctgagatttttcatcattaaaagaatacttaaagctttgctacgatcattttaaatgtttatatacaaatgccttttcttgacaaatgtttatttgaactatttatttaattgtgtatgtttatatttccttaaatattatatttaaatgttaacttatgttgattacttttgaaacatttaactttctatattaatttaaataataatttcgtttaagactatatatcagtcagttttgtatggaatttttcgtttttgctaacgttttttgacagccgcgtgggttatacctaatatttagttgccacacgtactattaccgattaatttctagtgcttttagttgattcgaatcagtccactccactccattaatcatcagagacaagctgcactcgattcaccttcattgtatcactcatccattaatccatttcacaccattatgtcgttcggctgtctctttctaaatgatgttcgatccgtcgatggatcgttatatctagcgatcgatatgctttccactgctgctttccattcaaaccaaatcattcgtctactatttagcgtaagactttgaaagtacctctactgcattatactattactattactattactattattatattctcttatagctgacacttagtcatatcatagcgagtaaacactatgtttgtattatatgcacctttctttagtacatatctctcgggtgaactggatgatatttacaagaactgtatgtagttgacttgcttctgccgtttatacctctgtgttgtagcccctatagtaaatatatagtatatagatcattaatcccgcctatcagtgtctctcatttgtctcatgtgtcttgcggaggaagtcaggatatttagataagctaactagcatgatagacttaaacttaactatcaataacccaacatccacattgaaaaaactatggtgcttttcgatcgtaacgttaacgttattaaccattgcttctaattacgttgtaatatcaactgtaagctttattttattcggatttaatatacttttgggtgtgcatatgctgcccatctataatcgtatcaattatgaaataacgccaaaatcgattcactgacggattattttgtttaatttctcctctgttgatgatgttatacacgttttgtttgtgtgtcatgtcctctatattgtcagagtctcaacgcccttataagatgtgtgtctataagtcggtgttgtggagactcccttgtgagtaaaccaagtcaaactgagatagatttgcatacagtattatatccatacaaccacgcccactccgcatatacctaaaattatcgtctatgtatattcgttctatctgcataatgctacacatatgtctatatatatatatatctatctatgtatgtatgtatgtatatcgcgccagttgtcaatgttgttgttcacctcaaaatgtttctcttactgtaattaccccgctaacccattgtcctaacctctgacccctgaccccaaactgttggctaatggctttcggttatggctttgttgtcttctgttacggcctccgcttgaccatctaaactataaaacattcgaaacgaaagtaactaatgccacccagaatcactaacgaatcatctatcgaaaaaacactgactgacccagttgttgtactcttcactaaaaaataacaaccataagaaaaggactaacactggctgtctacgatccgtgttgttgttcctcctttgtgcgaggaagtaaccattaaccattaggctatagttcaccaactgctaaccacgagtcgaattaacaaaaaaaaaaaaaaccataaacccctgctaatttaacccgtggcgtgtgcacctctaacccaaacacgaagccaaaagaaagagatcgatccgcattgccgagtatccagatggtttaatccgtatcctttgccctctctctctctccctctctctctctctgtctctctctttctgatgtttagctgcgcaaacaaagtcgcttcaacgcgcgcaaaaagttccaattcgccatactcgtgatacgggccatcattcggatacggcgcctacgcttcaccgccgagccgctgcacgttgaggaggccatccgggatccgtatcgcgtcaaggttctgcgcaaaggtgagttgctacaacaattcatatatcgaatatagtacactaattcaacttttgttgtaggtcatcgatggctgtgccttccgtgtctacgggcattgggtcaagaagggtgagggccagaatcgggccgccctcttcgagaatactccccgcacggagctccacgcgctctacatcaacaatctcagccgatagaaggcggtcgggcatggggcatgggccatgggccatggggaatggggcgtggcggagtcgcgctgatctacacaagcacacacacacacacacacacagaaagaaagaaaaaagaaaataagaggaaacacagtaagcaagaaaccaagaaacaaaccaacaaacgaattagcaaaagctactactatgagaagcaggaaattgcgattgcaacaggacacaccaaacacaccaaaaaggattcaatccatccatacattcggattcgcctcgttctggacggacagccaacacgcaggtgtacatatatacgtatgtatgtatgtatgcatgcctagtaacattacctcccctgccttcttcgtccttgtgattttgtttaatactttttaattcgattttattgcgtctaatgcgcgccagccatctagtgtaatcagttagtgtagtgaatgtagcgttcaaccacggccatgcataccacccagatggtacatggctatccagtggtccaacgttatgacccggcgccagaacgagccgaatcggatgacgagatgcgattgattgttgggttgggggaatgtacacacctcatctcaccatactccacacccaactaagcccacacaagcaagcgtacatgcatatgtattttctgttaatgattctattaaattatttaattgtattgctaagcgtttacattttaattgttatgttgtagtatacacaataaataaaaacaaacaaaaaaaaaaaaaaagaacgaaataataagctgaaaacaaatccattgcccattgcctcctagttagttgagcaacttaaggattatggcaattaataatggcttaagatgttagatgtgcttgtcgcaattgtatttccgctcgcagcaagcgggaaattcgcgattgatgttcacaaagtcgcgctgcttgcagcccggtggcggagcgactgcatcgcaggttttgaaggtcaccaagccatccgc

SEQ ID NO: 28640 - DNA, 2147 bp, DROSOPHILA
gtactagtgccacctccagttttgtgattgtgtcaaaaatacagggttttattgttgcactagcaatttaatccgaggaatataaattttgtgtggagttatgttcgagacgtcgttgccagcgattcaagaggcgagcggtcacacgtgtatgtgtttcactggcggtgcgggcgccaactccgccaaaaagcgtactacttttaaccttagttgacattgaaatgtacccgcttagttggatgtccacgatgttggcattcgttattaattaaatcagccgccaacagctgagcgagagagcaatcgagagcgacaggagaggatccacttccaatcgaatcgggtggaatcgaatagcaggggcttgattccaaactgccgtttcggcagccggcaagatttcacgaaatctaatggccaaggacgaggaggatgatctgctgcccgacaaggatgcggccaagggcttctatgccaaatacgagcccaaggagattctgggcaggggcatcagttcgaccgtgaggcgatgtatcgaaaaggagacgggcaaggagtttgccgccaagatcatcgacttgggcgccaccacagagtcaggcgagacgaatccatatcacatgctggaagcaaccagacaagaaatctcaatactgcgccaggtcatggggcatccctacataattgatctgcaggatgtgttcgagtcagatgcatttgttttcctcgtcttcgagctgtgtcccaaaggtgaactcttcgactatctgacctctgtggtgacgctatccgagaagaagacgcgcaccattatgcgacaaatctttgagggcgtcgagtacatacacgcgaagagcattgtccatcgggatcttaagcccgagaatatcttgctggacgagaaccacaacgttaagatcacggattttggcttcgccaagcagttgcaagagggcgagaaacttacaaatctgtgcggaacgccgggttatttggctcccgaaacgctcaagtgcaacatgttcgagggatcccccggctactcgcaggaagtcgacatatgggcctgtggcgtgattatgtttacgctgctcgtcggttgtccacctttctggcaccgcaagcagatggtcatgctgcggaatatcatggagggcaagtacagcttcacctcgccggagtgggctgatatttcagaggatcccaaggatctgatacgcaaatgtctagtcgttgatccttcgcaacgtataaccgtcaaggaagtattaagacatccattcttcaaccaaatgctgttcgagcaaaacattgatggcctcaagcgcagcctgtcgaccaagtcccgacgaatgagtcgcatcactgagatcgcactggtgttaatgggtgatcgccggcatccggccccgcccatcgcgcccgcccaaacgaacagcaggcatctgctgcaacccgaggcgtcatcgtatcgctttggtcagctgaacagtagttgcgccggtgcccccaattatctgtactgtgcgccacagagctcctactcgtcgaatcgaatgcgcgacggggcgctggacgatgcgggtgccagtgctgcatccgccacctgccatgtcatgtcgccatccaacgcctccaattcctacgccaccaacaccacagccaacacctcgaactcggccttggcatccgcctcctcccacaaaacgctcacggcgatggtctactatcagcagcaaccgcagcagcatcagacgcagcagcagcagcaacagtaccagcagcaacagacgacacagctgccggtgcagctgcagttgcagcatccactattgcagaccggtggcgatggcaagcaatcgctgcgcaaacaaagtcgcttcaacgcgcgcaaaaagttccaattcgccatactcgtgatacgggccatcattcggatacggcgcctacgcttcaccgccgagccgctgcacgttgaggaggccatccgggatccgtatcgcgtcaaggtcatcgatggctgtgccttccgtgtctacgggcattgggtcaagaagggtgagggccagaatcgggccgccctcttcgagaatactccccgcacggagctccacgcgctctacatcaacaatctcagccgatag

SEQ ID NO: 28641 - protein, 576 aa, DROSOPHILA
MAKDEEDDLLPDKDAAKGFYAKYEPKEILGRGISSTVRRCIEKETGKEFAAKIIDLGATTESGETNPYHMLEATRQEISILRQVMGHPYIIDLQDVFESDAFVFLVFELCPKGELFDYLTSVVTLSEKKTRTIMRQIFEGVEYIHAKSIVHRDLKPENILLDENHNVKITDFGFAKQLQEGEKLTNLCGTPGYLAPETLKCNMFEGSPGYSQEVDIWACGVIMFTLLVGCPPFWHRKQMVMLRNIMEGKYSFTSPEWADISEDPKDLIRKCLVVDPSQRITVKEVLRHPFFNQMLFEQNIDGLKRSLSTKSRRMSRITEIALVLMGDRRHPAPPIAPAQTNSRHLLQPEASSYRFGQLNSSCAGAPNYLYCAPQSSYSSNRMRDGALDDAGASAASATCHVMSPSNASNSYATNTTANTSNSALASASSHKTLTAMVYYQQQPQQHQTQQQQQQYQQQQTTQLPVQLQLQHPLLQTGGDGKQSLRKQSRFNARKKFQFAILVIRAIIRIRRLRFTAEPLHVEEAIRDPYRVKVIDGCAFRVYGHWVKKGEGQNRAALFENTPRTELHALYINNLSR

SEQ ID NO: 28642 - DNA, 3732 bp, DROSOPHILA; identical to SEQ ID NO: 2812

SEQ ID NO: 28643 - DNA, 1732 bp, DROSOPHILA
agcgaaagagtgattgaaaatggcatggaaaattggaggaaatcagtacgcaacactgtcgatgctcttcgccagcagtttgctattgctgagtgcggtcaaagccatcgattcggatctagagtgggatgacttcgaggacgttgatgtagaggatgtgcagcaggaggatgtcgatgagaagcctacctataagagcccggtgatcgatgccaagaaattccacttcgcggaccacttcgacgacatggaggcatccacaaggaggtgggtactctcgcaggccaagaaggacgacatcgccgatgagatctccaagtacgatggcatctggaattgggagccgccgcagcgcatggtttgggcaaacgatctgggtctggtgctcaagtcgaaggccaaacatgcggccatagcagcccaccttcatcagccgttcgatttcaagtcggagaagccactggtggtgcagtatgagattacgattcagaagggtcaggagtgcggcggctcgtatctaaagcttttgtccgccggaaaagagacggaacaactacagaccttcaatgacaagacaccctataccattatgtttggaccggacaagtgcggcaaagatgtgacaattcactttatattcaagcacgtcaatccaattaatggcaccatcaccgagaagcattgcaacaagccaaataatagttttgaagagccattcaaggataagttaccccatctctatcagctggtggttcgtccagataacagctttgaaattcgcattgaccacaagatcatcaaagagggttccctgctaaccgatttcaagccaccagtcaatccgccggcagagatcgatgaccccaatgaccataagccagattcgtgggatgagcgagagaagatcccagaccccactgttcacaagcccgaggattgggacgagaatgaaacactaaagctgccagatgccgacatgatttttgatccaactgccacgaaacctgaagattgggatgacgaaatcgatggcgagtggcaggctccaatggtagacaacccagtgtgcaagaaggaccaaacctgtggcatcatccgcaatcccaactacaagggcaagtggattgcaccgatgatcgataacccaaactaccagggcaagtgggcacccagaaagattgccaatccagacttctttgaggatctcaagccctttcaaatgacgcccatcagcgctgtgggtctggagctgtggtccatgtccagtgatattctcttcgacaacctgatcatcacagacgacgtggaggtggcccgtgactttgcggccaacagctttgacatcaagcgtcgctacatcgatcgtgaacgggactcaatcgtgaataaggtagtcgagctagtcaaggactatccctcgatttgggccattggcctggtggccattgtggcgttggttgccctcactaaatgctgtagatttggtaccactaagattcaggaatcggctgctgccgagtccaagaagaccgacgatcctcagccccatgagccgaggccgtgggggagtaggatgagcagagcgaagaaatggaagttgacgataccaccaagaagagcatatagctgtccgttaccacccaaaaagaaattagatgacaacgaatggaagttcaaggcggcgaagaaacaaaagcacacacagactaaggaatctaacactgaggagtaa

SEQ ID NO: 28644 - protein, 556 aa, DROSOPHILA
MLFASSLLLLSAVKAIDSDLEWDDFEDVDVEDVQQEDVDEKPTYKSPVIDAKKFHFADHFDDMEASTRRWVLSQAKKDDIADEISKYDGIWNWEPPQRMVWANDLGLVLKSKAKHAAIAAHLHQPFDFKSEKPLVVQYEITIQKGQECGGSYLKLLSAGKETEQLQTFNDKTPYTIMFGPDKCGKDVTIHFIFKHVNPINGTITEKHCNKPNNSFEEPFKDKLPHLYQLVVRPDNSFEIRIDHKIIKEGSLLTDFKPPVNPPAEIDDPNDHKPDSWDEREKIPDPTVHKPEDWDENETLKLPDADMIFDPTATKPEDWDDEIDGEWQAPMVDNPVCKKDQTCGIIRNPNYKGKWIAPMIDNPNYQGKWAPRKIANPDFFEDLKPFQMTPISAVGLELWSMSSDILFDNLIITDDVEVARDFAANSFDIKRRYIDRERDSIVNKVVELVKDYPSIWAIGLVAIVALVALTKCCRFGTTKIQESAAAESKKTDDPQPHEPRPWGSRMSRAKKWKLTIPPRRAYSCPLPPKKKLDDNEWKFKAAKKQKHTQTKESNTEE

SEQ ID NO: 28645 - DNA, 4747 bp, DROSOPHILA
aaggtttcttatagcgagcagtgactgtagatcgtacgactctgacttatgacgtacgacagctgaagattgccgaaggtgcccgaaattcgacttggcaacagaattagcatgtccacggggaaggtacaataaattcgttaaatttcaaacagcgcttacatcagatccgaaattattcagaaaatctctcggattttatttttatggcttgaacttgaactgtaagcggcttccaagtgactcacgtccaaggcaaatcttgaacacaaaatcaagcactctgctcccctttggagtcgccaggagggactcctccagataaggtgtagaaatctctgacgtattcccaatgccaagaaatatgcagacgctatccacacacgtagatacatatgtaaataggcatgtgtgccacgatgaataaacatgggaaatcgtctacctaaaattattgttagccacgcacgagacagctgaccgcacagtgggcctatttacaatattatcgaaagaagcatttaaaaaatgaggaatttctactttttctatgacgtattgtatatttattatgaacaattatgtagttccaagcaaatgccccaaaatacgcaatgctaattatgtacatatgtgcacatatgacgatcttgtttaattatttcgcacgcagcatcgttttttttttttggcacaaaaactgatttagaacgaccttcgggaaattcgtcattgaaaattcccggtagctgaaataatatgtacatatgacttaactaatcccaactgtaacttcctgcgtgctgcttttgctgggtgtgccatggagcacgagaggattggcgcccagctctcggggggaatgggtcatcgtgtccggctcacgtgttccgtctgcacttgtttacgtaaagtggcgctgcatactcggaactagttctgcgctgggttggccgcccaccctgctgccttccccgccagcgcttcacttgctcatcatcccgctcctatcgagagtactacgtgtctctgtatgtctattattaccgacaccgagccgtgttgttgtttacccgctgtttcagttgcgttttttttttctgcggaatttctctggtgcgatgcgcgtggcgaattgaatcggccatttggcaattaaaactgaaatcgatttggccgtggctcaacttcgaagaaaaggggcgtggctgggggcgcggggtcaggtgtcacgtgtcgtcagcgcaaaacagtcagaactactgccacccgagtcataaatatttgggttaatgaaaagggaatatctgattacataaaaatggtttcacaagaaagtatctttccattagctgcgcgaatgtgtaatatatttttgcttatgcaccaatgcattaaattgtagttcaaaaataactttgtttatttcgaattgtttactgctttattggattttatttataaattgcttggtaaacaagtgcatatgtgtcgattaaacaaaacaagaatacaacttgtgttggttcattgaagtaaaattgttattcctttttgagaaaacttattaaccctttggctaaaagttacaagttggagtggtggaaaaattggcaaagggaaatttgaataaaatccagcgaatgaagaaatttgataaatgatgcttgcaactacatataaacagaatgcaaagctaaccaaatgcggtttcaaagaaaaactttataatttcataagactaaatgtgatgtaaacgaaacgtaacacacaaaatatgggaaagtaatgtagagcattgatggtaaccaatctgtttctcgatctcttccagctgaaagtcaattgaatctctgttcctccgtcaccgcgtcgcgaagccgttaaaactgccgctcccaaacattcgctgcgatggccacctcatcgatactcgccaaaagcacaattaatagcacatcgccaccggccacgcccagcagcagcgcgtcccccggctccacactgaccacccggaagcggacctacgagatagccattgccatgccctcgtccaccgcctccagcagcgccacaaaggtatcggaagttcaggatcagcgcacaaacagccccggcaagtccaagagcaggcccggccagctggagagtgtcttggtggtcggcgagggagccagcgagcccaccacctcggccaccacactgcgggacagcacacgcaccatctcacaaagcgacgccgacgatggcggcgaagcggcagccgccgaggacctgctgcccccacagtcggattacctcaacggcgtcaagcggaagtacgtcccgcagcagcaggcgtcgccgaatcaccgggtggtgcccgcatccacctcgcagcaattcttcagcggggcctccgattttgcggtaagtagtcaagagttaggatgcaaagttagtctaaatcgtagtagctgaaatcgtttgaaattgatgttcgagtcgtgagtcgtatatttccgacgatgtgtgataagatcgagaaagaatgtgtagaccaaggacacaatcgtccagttgaatagcccaactaatcgggaacttttcttcctgcagacaatttgcaagccggcgccctactctcacgacgaggaggccatgctggagcgggatagatgtgactacactcaaaggatcacctaccagatggcccgctccggacagacgacccgcagggtgagggtctacgccgatggcatctacgatcttttccaccagggccacgcccgccaactaatgcaggccaagaacatctttcccaacgtgtacttaattgtgggcgtgtgcaacgacgagctcacccaccgcatgaagggacgcaccgtgatgaacggcttcgagcgatacgagggagtgcgtcactgccgctatgtggacgaggtatgttctgcccggcactgattagagatctttcagtctatagcatcttactctgtcttgcagatcgtccagaatgcgccatggactctgtccgatgaattcatcgccgacaacaaaatcgactttgtggcccacgacgacattccgtatgtaaccgatggcatggacgacatctatgctcctctcaaggcgcgcggcatgtttgtggccacggagcgcactgagggtgtgtccacctcggacatcgtagcccggatcgtcaaggattacgatctgtatgtgcgtcgtaatctggccagaggctattcggccaaggaactcaatgtgtcgttcctgtccgagaagaagttccggctgcagaacaagatggacgagctgaagtcgcgcggcaagcgcgagctgagcaaggtgaaggtggacatcatcaccaagtgggaggagaagtcgcgcgaattcatcgacaccttcctgctgctgttcggacgtgagaacctgaatcatttgtggaacgagtcgaagggcaagctgctgcaggcactcagtccgccgggcagcccgtcgggatcagtgaacggtgatgacacggagggcggcgaggactacagcgaaactattgacgagtacttggagatggccgagaagttgagcgggggcagcggcagcggcagcagtggatcgctgaacggcaaacagaggccgaagcagaagcgctcctcgctggcccgccgcagttaccagagtctgcagagccaatcacccgacttggaagcggatggggacgaggatgcggatgcggatgcggagtacgagcgtcgaagcaattgattctattgcggggcagcccgatcttttcttcttctcttaatgtctttaatgctattgtaaatggacttgcttgcaactagttcgacggcacactatagatgccccaggatcgccacgcaggctccacgaacacacacttatatttactctagccctaagtggtattgtaatcccaatgttttagttggcactcgttctcctcctgcctcaactccacctgcccatctccatctgtgagaatcgagggaatcctgtagctaatttagctgtgtgtgtgtgtgtgtgggacaagcaaccaccaacgcggaaaagactcatttttgtattaggcactcgacggactgtgcacgaaatcaatcggcagtggcggcagattcaggtgccgaaaatatctagaaatatttatattaaattatttcgcataacattaaactaagttaacaacaccgcaaccagaacaccaaccaatatagagaaatccaaacaaacaaattacgaaatacattcggaaaatgcaaaaaacaaaaacaagtaattagtaacagttggcaatagcggaactattgcaaatgctttgttaaatattttttgaaaaataaacattgaatcgaaaggaaatagaagtaaagcgagtggcttgtgaatcagtttgctatctcatacgtttatccagcaattgcgcatccgattcagcagccatccatggcactgctggaattcttgagcgcgcgccaccgatgatgatgaaaccgtttgccttgattggacacccattccctcgcaattagctgcccattcaccggcttgaagcggttcactgatttgtttaatggcgctgcggtttatatatagatgcgcacccatcgcctgatcgaatcggcggacccgtgccaagtcaggcgaccgacccgttgcttcctatttgcttgcgccgcaatttgcggcaattgaagatgagcgatgaatccgagccagagacttgggcctgagactgctagag

SEQ ID NO: 28646 - DNA, 1692 bp, DROSOPHILA
cccgctcctatcgagagtactacgtgtctctctgaaagtcaattgaatctctgttcctccgtcaccgcgtcgcgaagccgttaaaactgccgctcccaaacattcgctgcgatggccacctcatcgatactcgccaaaagcacaattaatagcacatcgccaccggccacgcccagcagcagcgcgtcccccggctccacactgaccacccggaagcggacctacgagatagccattgccatgccctcgtccaccgcctccagcagcgccacaaaggtatcggaagttcaggatcagcgcacaaacagccccggcaagtccaagagcaggcccggccagctggagagtgtcttggtggtcggcgagggagccagcgagcccaccacctcggccaccacactgcgggacagcacacgcaccatctcacaaagcgacgccgacgatggcggcgaagcggcagccgccgaggacctgctgcccccacagtcggattacctcaacggcgtcaagcggaagtacgtcccgcagcagcaggcgtcgccgaatcaccgggtggtgcccgcatccacctcgcagcaattcttcagcggggcctccgattttgcgacaatttgcaagccggcgccctactctcacgacgaggaggccatgctggagcgggatagatgtgactacactcaaaggatcacctaccagatggcccgctccggacagacgacccgcagggtgagggtctacgccgatggcatctacgatcttttccaccagggccacgcccgccaactaatgcaggccaagaacatctttcccaacgtgtacttaattgtgggcgtgtgcaacgacgagctcacccaccgcatgaagggacgcaccgtgatgaacggcttcgagcgatacgagggagtgcgtcactgccgctatgtggacgagatcgtccagaatgcgccatggactctgtccgatgaattcatcgccgacaacaaaatcgactttgtggcccacgacgacattccgtatgtaaccgatggcatggacgacatctatgctcctctcaaggcgcgcggcatgtttgtggccacggagcgcactgagggtgtgtccacctcggacatcgtagcccggatcgtcaaggattacgatctgtatgtgcgtcgtaatctggccagaggctattcggccaaggaactcaatgtgtcgttcctgtccgagaagaagttccggctgcagaacaagatggacgagctgaagtcgcgcggcaagcgcgagctgagcaaggtgaaggtggacatcatcaccaagtgggaggagaagtcgcgcgaattcatcgacaccttcctgctgctgttcggacgtgagaacctgaatcatttgtggaacgagtcgaagggcaagctgctgcaggcactcagtccgccgggcagcccgtcgggatcagtgaacggtgatgacacggagggcggcgaggactacagcgaaactattgacgagtacttggagatggccgagaagttgagcgggggcagcggcagcggcagcagtggatcgctgaacggcaaacagaggccgaagcagaagcgctcctcgctggcccgccgcagttaccagagtctgcagagccaatcacccgacttggaagcggatggggacgaggatgcggatgcggatgcggagtacgagcgtcgaagcaattga

SEQ ID NO: 28647 - protein, 526 aa, DROSOPHILA; identical to SEQ ID NO: 51

SEQ ID NO: 28648 - DNA, 8150 bp, DROSOPHILA
acgtgatcctcggcggcgaggcgaatattataaacaggacgtacatcaggggtcatgaacgatagcaccgcatatatgctgagcaggctggtgccgttctgggtgtgattcacggccagcaggttgccatcggagctgcaggcaatgtaattcggaatactgggcagtggcaccagacgcgcctgcggctgttgggctgtgctcttcgcattgaccaaatcctttacaataatcactgcaaggagtgccaggataaatttatatatttagcctagctaactcaagctacattacctttgagttccggctgcgttggactcccggcaaagagcaatccccggctactggagaccgccagcaggttcacattgctgcggggctcaccgcattttttgaacgcaacaatcttgtggtgcagtttgaattgaaagtcctgcgaccaaaaccaatggaatgtttgacatctcagtgctatgcaattgtgcttacctgcgtgtcctcgcagtctggtgcattctgcgccatttttgtctgttttcgctcctatttcgccaaattttttgcggcttgtcgatttcccaatcgagtcgatggtgtggctgcaagttgagatcgttggaaacgttggcaagcaaaaagcgcgccacttgcagtacggtcactttcaggaaactcaccacaaaaactcaccaccaaaaaatccaacaacatatacaatacaatctgatttaaatttcatagatgttcctttaaaaagaaaatgggataaaatcttatataaaaatagttttctcctataactaactgatgaacttgttaactaaaagaaaccaacttagcttgaattaagtattcaccaatcttgtcttagcggttgaccatatggcaattgcactttgttggtattttttcagacggtattttgttttggacagtatgtgcgagaacgaaaatttcagcacatcgctagcgcagcagccttgttgttgttcgtctgtctctgtcctacaagcgtttctttttgtttgctgagaattaaacaaaagcgatttgttcgcgggcaatgcgaatgcatttgcaaagcagggcacaaagcatcggctgtttcgactgtgattgcacaaagccatgtagtagaggtcgagctggcgattcgcaattatccacaggcgacgcaacacggtgctaaaaattgcgtagccaattaatctcgaaatccttcgaattcaatcgcagttaccaaaaagtaaatgaaatttaaatcgacttaaacagaaatctgtggattttatttcgatattgcccataaagtaccccaaatcacataatttacggaaaagtcaaggaaattccaggtgaaaattggggttggaaaggaggccaggataacggagtggactctaattaaataccctacagttttcccctagagcagccaggcgacgctcaagatgatcagcagcctgttttcgcggcttataatgtgagtaataaccgattactactatagcaaatcccgacttcatagccaccgcaagtgagtgtgagtgcgagtgagagcgctacagctgctgacccccaaaaaaaaacaaaactaacttttcaagctcggccttcgaaagcgagaaaagcacctacgaagcccgtcgtcgtttcctaattgtgtgggcgtcacgcttctgatttctaagttttatacatttccgtggttcctcgattcgctgattgccggattgtttgtttattaatcagctgtcgcaaagtaccgttcacttgtgcgcgagtgtgcgcggcctgtgtgtgtaaccctcgattgaactcctaatttggagttgcaactttccaagcttctgcgtctctgtgttcccgaggccgacgcactcgcctcgcccgatttgggtgcagaacatgtggatatagcctgtcggcgacccggcgactctctgtgactccgctattgttgtcaatatttatagatcgcaactcgacgcttgcccatagtgtggcacagtcgcggccaagtagctagcacctcatttgttcaagcacacaatacctccgttagcattttccattatgtcaatacatcttaacttcgaactagactttacttttgataatgaaattagtaatcggttcaaatcaataactaacatcatagtcaagatatatagttcttacatctaaggaattaaatcgaggcgatttctcccattactcgctaaagtatcctttccaaattaaagattcaaatatcttgatactgaggtgctattttcttgaacgcctctgtcgcaacattcggaactgcggcgcattcctacgtgtaaacattgagtgctcctctgttgctggttctctctagacccgatcgtgggtttattaatagacctctcgcctgagcgttagacgccgagctacggcagtctctgctcggcgttctagcggccaggaactatctgcgatccgtgctgcgggcaatgcatccccgttgccatgaggccaatctatcagcaggagccgccgctcttctaccagcggccagctaatctccgccgcctacgtcatccgccgggcaccgtctacggacgcagttactcgctcgaggaccagccagaggacgtgatacccgtgtatccaaagtttatctacgccccacaacagcagcaacagcaacaacgggccccatatccgctgtatcaactgggcgactcgctgagctcgctggacagcgattttcccgagaatgagtacgcgggtgcctacatagtggaggatcgagttccgctggccaacgcacctactcccaaagttgtccagaacctcaatgcgttgggtcgaatgctggagctgctgcagcgctgtcctctgccatgcctctccttcaacacggcctgcatctgctcactgattgtcatattccttgcgcctcgcacttgtgcccagagtttactgtttcccgctttcagattgttctgcggcaccctgtacccggcatatgcctcatacaaggccgtcaggaccaaggatgtcaaggaatatgtaagtatctgaacacgtaactaaaaaccgtagcgaactgagctaaggtttataatgttcattcatctctcgcctcaggttaaatggatgatgtactggattgtctttgcatttttcacctgcatagaaacattcacggacatatttatctcctggctaccgttctactacgaggtgaaggtggccctggtgttctggctcctctcgccggccacaaagggcagttcgactttgtatcgcaaattcgtgcatcctatgttgacgcgccacgaacaggtgggaccagagaactcgagtgtatatatagatcgctcaatacatcataatttcttctctttgtgcaggagatcgacgagtacgtgaatcaggccaaagagcgcggctattcggcggtcctgcagctgggctccaagggagtaaactatgccaccaatgtcctcatgcagacggccatcaaggtaatcctccccacacacagctcgcacctcacacaccacacactgcccccactgacgcactcacccacaatctcgcacacttactcgactcggtaaccatattcatttggccattttcgatcgcctccagcgtcgttgcataaagtgagcagcaaacagacatcagcttctgctgttctatattcgaaaatttgcgcaacactctcgcgtgctcatcttgatcatcgccaactggccagcgaatctgcagcagagtgcggggagctcctcgtcggagaatcatcagcatcatcgccttcatcatttgatcgccttctctttacatttacttttattattatttagtctaaacgtctagattggaatgctcttttgtgccatttgcgtgtttgttttggtttagtttgtagtgtgtttctctttgtgtagcccgatcactatatagactatacgtgatacaagctgaaagataaatcaacatgttgaaataatgtaataaaaacaatatctgaacaaacccatgtcaaagatcccagatactcgccgcaattcacaactgttttgtacacaatacagatgtgggccaagtcacttgtggactgcaacagattttatggcatctgaagtgcagcaaccaaatgcagtcgataacaaatgccccttgatgtaggtcaaagaatagagaaaacatagaatgaaaggtgtaagtgatttgtttagcaggttcagttgcgcattccttgtggttaactcaatacggtctttaacaaagaatctgagtcaatcgtctgatgactggaacacttgagctttctttgttggctgacaaagacatctgtgcaaatgcaggataggaaagggagaaaatatatttttacttaagctaatatttgggatttctggggaaagagtattgattaagaagctggaatcgcataaggtaataggaactcattatgtatgcaaggtatttaccatcgaaattcagcctgaaaataactttatttctttgttttaagacaaagaaactcgtttgcttcggagtcttttgtgcgtagctagtaccctagacatctgactggcactccttgcttccacatttgcattccgccacttccactcggccatcgccgttgtcgccttcccagctgcccagttgtatagttgcatagttgcacaattctaattccaattccgaatcgcctcctagggtagggcatacaaatataaatagatgccgggcatgagacatctctatggcgtgtgtgtattgtatgcttcatttgacccagctgcaattcatttcaatttgagacttttgcgttgctactattttaattaacgttttcgtttcttcacttatgtttctttgcatttaacccaccaaataaaactcaaaatcccaactaaacgcacctgcctgcaccgctcgattgccactaacccgcttaccgctagacctacgcgctgactacggcgccatctggccatggacgcggcctgcaaaactcccattcggccgatgagctgtacaggggccaggatacgatggacagcacggaaaactggctgccgcgagccagttccttgagcagcatcgagagctacacagagacgatctacgagccgaggaccgagaccaagcgactggttattcgagaggttagcgaggaggcggagttcgatgatgatcccctgggcgatgccggagcagcccgtctccgggacatgcccgtccggaaggcacaaccacgtcgggctgctagcactgccaaggctgcaggcaaacgcggccagaaacacaacgatattgagggcgccaggagctccagcagctccagcaatgtgatccgctcccgccgcaagctgcgcgaacccacgcccgatgtggatgtggaaaactactgaagatggctaccatcaagcatacagatactcagcgaacaatcggattttacacactcagcgaaacacttacacttcatcacattaacactgtcgcccactagcagttatatttttgtttcaataatgtattttaactacgtttacacctaagtttccgattagttgtagttaatattaaattatttaaatgccaactcttgtgctcttgtgctctactccatcatccacgatcaaccacttaacaacattgctcccctgaagggaggcggcaatctggtgcagacgatcaagcggagctacagcctcagcgatcttagcgaaccggatatgcatcgcacgcaggacgagctggacgacgtgatgatgtcctcgatgacatcgtcggcggtggtcatgcgttccacagccactggcgcacgtctactgaggccaagaaatcagacgcccgtgggcagatccggcagcggaacacgccactccacgggcatgtattttacggaggtggatgtgaccgccaagaatgccggcgatttcaagtgagtcattgttcagttcagtaccacaagaaactcaatacttgggtaatcccctttttcgatttcaagttatttcatttgccaaattcgataatcaaattatttcgtatctatttcagctacaacattcgcagccaggatgacatcagctctggctactcgagcgccgaacctgtgagtggtctcagtcgcacctcctccatgacaaacgcttccaaggctcgagccaagtccaaacgcaatgaggtaggaatcatttcagtctttctttttggaactatcttaatccgtttagagattggtgttggttagcagttgctggaagagatgagagacgaggtctacttagacaaccagctgtattttcaaggtgtgcaaaggaagagctcagttccagaagctgaagaactgaaaatagtggagagttctgaaagcatccaatctcaggagttggaaaaggtgctgaaggaggagaacattgatgcagaagatgaggccttttttgaaaccttgcctttgatagaggagcacataaatgaagtggtggctaactatggaagggatgaaaagttgttgccccaagagcggaagcataattcgatagaagaggagcagtttgaagatgcattgtttgaggaaccacagaaatgtgtctcagatgaagtggatgctaaaaatattgaggagatactaacggatagaagtcaaaaccagactccgaatggatctgctgaaactactgattcaggaacaccttcccaaaacaagccctatgtccatccaccgatagacccatttttgctggttctaagcgcttctgcatctgctccggatccctttatgcccgaacggccgcgtccaatgtcgccgcgtgaaatgcgcgagactctggaggagattaagcacagtttccgtgcccaactggaagcagagccctccgtatcagcctcaccatcaccctccttgcggcccaaggccaaccatggcaagggacgagctccaccaccgcccttgccacccaagaagcactcattgagtccccaaccggacgccatcagccagacatcgacgggcagcgtggaacgcaagtcaggtatcggacaactgttcaagaatatcaaagctaatgtgctgcgtaacaaagctaatcccagccagcagcagcccgaggatgagcagctggcggccaaagagacacagatttgaagtaagcccagccgcaagcccgttttcgaagctctcatcatccccgtgttatgtttcgctcaccgccgggcgatttctgctccgcctttaacttccatggcccccaatatggcattatctttctgtacagttgcgttactaacccccagatttaaggatttgcagcatgttgttttagaggctccaattgaagtacatactctcatccttcatctactttcttgacttattgcaggacaaatccatgtctgctagctgcaccaccttgccccgctcgagcagccggaaatcggagagatcccagggtggaactgccactggccagatgaaaacgcgcaacaagtcggagaagtagtggagcatcggtttaaggctgcccatctttgtcagtatgttgatttagatggtgacggtgggcagacagtggaatccatagaaccagaacctcatgttttagtttaaattgtaactttatacggatatcgatacagattatgataatattagctatatatgcgcatgcactgtgtactttgtttgtgattctattagagctccgggcgcagttcgtcctggttgccactggtactcatttcgtgactagtttagcgttaagcgagtctcctagcctctatccaaaggttctgcaacagatgtactaaccaaaaatgaaacccgaagaaacctatcaattgtgtagcataaattcctaatattgtaattgaacattaaataaaagaatctataccattgatccattgaactgaacaaccagagatgtctttaatgatctttgaactagcaattcagaaccgtttacttagatacgaaggacttcttactcggcttcttctacaggcgccttttgggtgtccccgcccccagctgctcctgcctcggcctcgtcctccggttgctccgactcatcgtcatcgtcgttatggtaaagaaccttgcgtatatagcgggccaccagctcctgtggtctcttctcccattt

SEQ ID NO: 28649 - DNA, 2161 bp, DROSOPHILA
ctgtcctacaagcgtttctttttgtttgctgagaattaaacaaaagcgatttgttcgcgggcaatgcgaatgcatttgcaaagcagggcacaaagcatcggctgtttcgactgtgattgcacaaagccatgtagtagaggtcgagctggcgattcgcaattatccacaggcgacgcaacacggtgctaaaaattgcgtagccaattaatctcgaaatccttcgaattcaatcgcagttaccaaaaagtaaatgaaatttaaatcgacttaaacagaaatctgtggattttatttcgatattgcccataaagtaccccaaatcacataatttacggaaaagtcaaggaaattccaggtgaaaattggggttggaaaggaggccaggataacggagtggactctaattaaataccctacagttttcccctagagcagccaggcgacgctcaagatgatcagcagcctgttttcgcggcttataatattgttctgcggcaccctgtacccggcatatgcctcatacaaggccgtcaggaccaaggatgtcaaggaatatgttaaatggatgatgtactggattgtctttgcatttttcacctgcatagaaacattcacggacatatttatctcctggctaccgttctactacgaggtgaaggtggccctggtgttctggctcctctcgccggccacaaagggcagttcgactttgtatcgcaaattcgtgcatcctatgttgacgcgccacgaacaggagatcgacgagtacgtgaatcaggccaaagagcgcggctattcggcggtcctgcagctgggctccaagggagtaaactatgccaccaatgtcctcatgcagacggccatcaagggaggcggcaatctggtgcagacgatcaagcggagctacagcctcagcgatcttagcgaaccggatatgcatcgcacgcaggacgagctggacgacgtgatgatgtcctcgatgacatcgtcggcggtggtcatgcgttccacagccactggcgcacgtctactgaggccaagaaatcagacgcccgtgggcagatccggcagcggaacacgccactccacgggcatgtattttacggaggtggatgtgaccgccaagaatgccggcgatttcaactacaacattcgcagccaggatgacatcagctctggctactcgagcgccgaacctgtgagtggtctcagtcgcacctcctccatgacaaacgcttccaaggctcgagccaagtccaaacgcaatgagttgctggaagagatgagagacgaggtctacttagacaaccagctgtattttcaaggtgtgcaaaggaagagctcagttccagaagctgaagaactgaaaatagtggagagttctgaaagcatccaatctcaggagttggaaaaggtgctgaaggaggagaacattgatgcagaagatgaggccttttttgaaaccttgcctttgatagaggagcacataaatgaagtggtggctaactatggaagggatgaaaagttgttgccccaagagcggaagcataattcgatagaagaggagcagtttgaagatgcattgtttgaggaaccacagaaatgtgtctcagatgaagtggatgctaaaaatattgaggagatactaacggatagaagtcaaaaccagactccgaatggatctgctgaaactactgattcaggaacaccttcccaaaacaagccctatgtccatccaccgatagacccatttttgctggttctaagcgcttctgcatctgctccggatccctttatgcccgaacggccgcgtccaatgtcgccgcgtgaaatgcgcgagactctggaggagattaagcacagtttccgtgcccaactggaagcagagccctccgtatcagcctcaccatcaccctccttgcggcccaaggccaaccatggcaagggacgagctccaccaccgcccttgccacccaagaagcactcattgagtccccaaccggacgccatcagccagacatcgacgggcagcgtggaacgcaagtcaggtatcggacaactgttcaagaatatcaaagctaatgtgctgcgtaacaaagctaatcccagccagcagcagcccgaggatgagcagctggcggccaaagagacacagatttga

SEQ ID NO: 28650 - protein, 569 aa, DROSOPHILA; identical to SEQ ID NO: 20880

SEQ ID NO: 28651 - DNA, 4326 bp, DROSOPHILA
tctgtgcttcaaaatcgggtgacggagatgtggaatggtctgatatcgttagctcctctaccaaggaacacctatcctccgtatcgtctatgtccaggaactcgaggtcctgcttgcaggccggcggaaggccgtattccagacgcagggcgtccaagtcctggctatcctgcggctccgagtgtcgcagaagctcaaaaatggcttgtactttggaaacgctatccgagaaggtgatcagctggccaatcaccgagtagcactcctcgcacaacatgctgcccagttccggttcctcgagggtcatctgcgtgtgtggaaaactaatgtataagctatctgtaggctgggaaaacgaataacatacctccacatcaaagcatttgctgataatcctaaccagatcgtcgtcccgctcgcgcactttgtatacaacgtcgtcgcgggcgcacaggcgacaccagtatatccaatcgcttgtgggaactcccatggctaatcctcaacagaagccccacagtttggtacagtatgccctcgggttttgactaaattctattgccaaagcgctgattaaaatcagctgtatggagcggaattccgaatcgattaattggtatgcgcactccgatgatttttggaaatatcgataagtgcaaaacaacaagttgttgccgccattttcaaaaagtattcagtttaaatttggaattgaaaattgtatttattttacttttttttctcaatcataagaagtattactaacgttttccttcctgcgtgtcgatgtttattaacatagagatgtattatcatcatcatttggatgtggtttcccagggatataatgttgtttttaaaacatgcgaccgagtttttactctggtatatatatataaacaatataataatttattttcgacttacatataagaaaaactgtgtataacaaaaactaattttagcacatttgcttaatataacaaaatggaatgataaactacatctcaacgtcttccatatcgttcgccccactctccacccaattctcgatggtgtaataggcttttagagccaattcgtcgtccagcgtcggctcgccaagcaccaaagggcccaattgcttgtcgaccataacgtcttgccagaattcgctgcgattcttggccagcgcgatcttcttcagctcctcagcgaacttgtcgtattccaaaaaggtgttgaagtctatacagctctgtcggtacagggtgatgagctcgcccagttgcccgatgttctgtttcctgcgctgcagcagtgtgatgatcaccacgcgggtatcggcagccagcgcctgaaagcgggcatctcgctcagtggcattactgattgtgtgaacgctagccaggactcgcctgaaatcagagattggatcaattaagcccacaccgtctgatggcaacgggatttccttctccgctggttccgacttgactgccacaccattctctgcctgctccttggccaacagcttttcctgccaggcgcgactatagcgcaatggaaatagcttctttacgatggctgccgctctctttgacttctcctccaagggatctggcactcgccagaatacatctgcgaagtttttgtccttaagcattttgtcttccttgtcgttatcatagataacttttcgctctaggatgtccatgacattctgctcaaagatgctgggaagtgcgtcgaacggcagcagatcattctgcgcccacggacgtggctgctgcgtgtcccgcagtgtgcactccagatcggtgctatcgattaactgatcaatggcattcagctgttcctcgctgcactccgtcttggtggttcgcagtgccggaaagtcccagaagtggtgctgagacgtataggaaacttccagcatatacaaagtagccggatgggtatcgtctgctaagcggggcagtagcacaaccatttgcggtctattaaacttggtgctatatattttccagcacagtatggcccgatccgaagaaacgagagcacgcaccagagcgtccagcttcacggcggcagattgattgtgcttctgatgcaccaggaggtacaaggactcgccacaaaagtactcatccggcacggcatttcttttgataaagccaaagaagtggagaccaggtgggtgtggttcctttggctctagcacggcctcgtcgtatggcaccggagtgccgcccagcatgtaaccggttatcagattctccggcagcggggtgatctcagtgcctttgatataatgacgagtctcccgtatcactatctcatccttttccgcccagacctttaccagctttacgggcgtctggttcttcatggcgattatgccctgcaggctaatggagatcttgctgccgatgttcagctttgcgttccacacccagggtcgccggttggtcaccttgaagacggtatgcagtgcctccttgaagctgcacaacgtcgcattgcagcgaggaacgagactgagggcgtacttctggttattcagctcatcggggccgcatttgcgcgaaaagttgaaaatagcctgaggctgagaagtgatggcattgtctatgtaggctatgttgtgagttctaagtgataatgtaaattattattactattatgcatttaacaaaataaataatcttaccccacaattaactcgatgttttcgccaagtaattcgtccgtgatttcgttgaacttctcgtagtcctgtggaaagtcgttgaaatcgaagagcaggaggatcctccgcctggcgactctcaagctgcaaggaatattccataaaatgtgatggttagatgataaggtaagtcacatacgtagttgcgacattctgaagctccagggccgcctgtagaccatttagccattctccatcctcgcaggctgtcttattcacaaactggaagaattccagcaagagctgccagctgcaaagtcttggttcaccaaagggcagcacatttgggtgggaagcatcctcagtttttatttcatcggtgtcgcaacccacgaggacgaaggacacgtagtccttcctatcgcacacgatctgcaattgtttcagttagcatatttaactgagttcccaattgtatttcacacaccttgtccttaagaatctccgccacacattttgcggacttcagcttcacttcttcggcggcacatgttcgcacatccagtacaattataaggcattcctggaaatcaaacaatggagataccttaacattaaatgcgattatttgtgaacctaccttgttagaagccatcaaacaagtttatttacctaaattcagcgactatgtttttaaatttcacaacaataataccattcagtcgataacagaaaacaccggcggcttactgacctaatgcactaccacctatcgcttatcgatatttctagcaccgcgttgccaacttacttgctaactgttacttttcataaaaacgaaatgcaaaattttgttttaattataaatagtcaatatatttggttcgtgctcaaaatactaataaaatagtaagcaatagttccccatatctccctatgcctttccgtaggtctgcagcttttccagatactccgcattctggctcaggtgattgaatatcaagttcgtatcgaggacattcgtcgcaggacctccatattccgcaggcaaactttcgtagccaaccatttcgcgcagcttgctcagatgtcgcccatcgtgggtaaagatcttttaaacgaagcatttttagagtgaacaaattaaatccttatatttttttttaccttttctttgaactccttgttcatgaagggcataaacaaagtggaggttacgtgcatcaggaaacctcgttgtattatatgcacgatgcgctgactgaagggcagaactccgttcttttcgtttaccaccttcataaacgccggcgaaaattgcctgagaaaatttcgatttgtcctggaatttaataatcggaaaaataaaaataaataaaaatagactattgggaaaagaaattaaagaaaaataccatttttcaaaaatattttagattcaattcacaaaatcattgaataaatttaaactgtaaaatatacttttaaaaacacaaataatacttgaaatgcgttttcatcttactatacatactaagtaatactactaatcaagataatattgagaataaataagcgtaacttttgtgtaataataattttataggatataacacacccttgaagatcacaaatgaccgtaatcccattctgtt

SEQ ID NO: 28652 - DNA, 2100 bp, DROSOPHILA
atggcttctaacaaggaatgccttataattgtactggatgtgcgaacatgtgccgccgaagaagtgaagctgaagtccgcaaaatgtgtggcggagattcttaaggacaagatcgtgtgcgataggaaggactacgtgtccttcgtcctcgtgggttgcgacaccgatgaaataaaaactgaggatgcttcccacccaaatgtgctgccctttggtgaaccaagactttgcagctggcagctcttgctggaattcttccagtttgtgaataagacagcctgcgaggatggagaatggctaaatggtctacaggcggccctggagcttcagaatgtcgcaactaccttgagagtcgccaggcggaggatcctcctgctcttcgatttcaacgactttccacaggactacgagaagttcaacgaaatcacggacgaattacttggcgaaaacatcgagttaattgtgggaactcacaacatagcctacatagacaatgccatcacttctcagcctcaggctattttcaacttttcgcgcaaatgcggccccgatgagctgaataaccagaagtacgccctcagtctcgttcctcgctgcaatgcgacgttgtgcagcttcaaggaggcactgcataccgtcttcaaggtgaccaaccggcgaccctgggtgtggaacgcaaagctgaacatcggcagcaagatctccattagcctgcagggcataatcgccatgaagaaccagacgcccgtaaagctggtaaaggtctgggcggaaaaggatgagatagtgatacgggagactcgtcattatatcaaaggcactgagatcaccccgctgccggagaatctgataaccggttacatgctgggcggcactccggtgccatacgacgaggccgtgctagagccaaaggaaccacacccacctggtctccacttctttggctttatcaaaagaaatgccgtgccggatgagtacttttgtggcgagtccttgtacctcctggtgcatcagaagcacaatcaatctgccgccgtgaagctggacgctctggtgcgtgctctcgtttcttcggatcgggccatactgtgctggaaaatatatagcaccaagtttaatagaccgcaaatggttgtgctactgccccgcttagcagacgatacccatccggctactttgtatatgctggaagtttcctatacgtctcagcaccacttctgggactttccggcactgcgaaccaccaagacggagtgcagcgaggaacagctgaatgccattgatcagttaatcgatagcaccgatctggagtgcacactgcgggacacgcagcagccacgtccgtgggcgcagaatgatctgctgccgttcgacgcacttcccagcatctttgagcagaatgtcatggacatcctagagcgaaaagttatctatgataacgacaaggaagacaaaatgcttaaggacaaaaacttcgcagatgtattctggcgagtgccagatcccttggaggagaagtcaaagagagcggcagccatcgtaaagaagctatttccattgcgctatagtcgcgcctggcaggaaaagctgttggccaaggagcaggcagagaatggtgtggcagtcaagtcggaaccagcggagaaggaaatcccgttgccatcagacggtgtgggcttaattgatccaatctctgatttcaggcgagtcctggctagcgttcacacaatcagtaatgccactgagcgagatgcccgctttcaggcgctggctgccgatacccgcgtggtgatcatcacactgctgcagcgcaggaaacagaacatcgggcaactgggcgagctcatcaccctgtaccgacagagctgtatagacttcaacacctttttggaatacgacaagttcgctgaggagctgaagaagatcgcgctggccaagaatcgcagcgaattctggcaagacgttatggtcgacaagcaattgggccctttggtgcttggcgagccgacgctggacgacgaattggctctaaaagcctattacaccatcgagaattgggtggagagtggggcgaacgatatggaagacgttgagatgtag

SEQ ID NO: 28653 - protein, 699 aa, DROSOPHILA
MASNKECLIIVLDVRTCAAEEVKLKSAKCVAEILKDKIVCDRKDYVSFVLVGCDTDEIKTEDASHPNVLPFGEPRLCSWQLLLEFFQFVNKTACEDGEWLNGLQAALELQNVATTLRVARRRILLLFDFNDFPQDYEKFNEITDELLGENIELIVGTHNIAYIDNAITSQPQAIFNFSRKCGPDELNNQKYALSLVPRCNATLCSFKEALHTVFKVTNRRPWVWNAKLNIGSKISISLQGIIAMKNQTPVKLVKVWAEKDEIVIRETRHYIKGTEITPLPENLITGYMLGGTPVPYDEAVLEPKEPHPPGLHFFGFIKRNAVPDEYFCGESLYLLVHQKHNQSAAVKLDALVRALVSSDRAILCWKIYSTKFNRPQMVVLLPRLADDTHPATLYMLEVSYTSQHHFWDFPALRTTKTECSEEQLNAIDQLIDSTDLECTLRDTQQPRPWAQNDLLPFDALPSIFEQNVMDILERKVIYDNDKEDKMLKDKNFADVFWRVPDPLEEKSKRAAAIVKKLFPLRYSRAWQEKLLAKEQAENGVAVKSEPAEKEIPLPSDGVGLIDPISDFRRVLASVHTISNATERDARFQALAADTRVVIITLLQRRKQNIGQLGELITLYRQSCIDFNTFLEYDKFAEELKKIALAKNRSEFWQDVMVDKQLGPLVLGEPTLDDELALKAYYTIENWVESGANDMEDVEM

SEQ ID NO: 28654 - DNA, 5512 bp, DROSOPHILA
aaaaaggacgctgttgagggttgcattttatgttaaacataatattaattatttgcttacttttatctcacaatgcactcttagaaatttccactgttatgttattcatgtgtttgcataaaactggagaaattaaacacggtatctcaacaaaaataaaagaaagccgccaacaaaatcggttatgtttgacttcttttcactttgatatacaccttaattcatttgcttgttcaattagcatgcactccttagttatttggtacagtgtattttttacgagagttctcgacaattttcgagcgctaaaacaaagaaaccgcgctcgatgataaaaaccgcgtccgactgccgctgtttttttgttgttttgagaggcgctagtggtggaacgatggctgggaaaacatcgataacgctatcgatcaagcgattacttatccttctgttgctgacgatgttttccagttgaatgtatggcagcactgcttatttagtcacaaaaattatatttgaattaaaaagccgattttgttatcaagaaataaattttgaagtgaaaatgttttccacaaatgttttaattcattaagtgccacttgtcgcaattaagtaactgaataggttttaaataataagtaaataaatatcattgttaaatatttataaatgagcattcatttgcagctttaaatagataaacattttacatatttgtacattgacatcacaaacatttcaactaaaatttaaactcgtataacattacgctaaagtatcgcttaaatattggctcgcatccctggtactcttgttacgttacgttattcggcaattacatcagtctggcaactctggccctcacacacactcagtcgccccccaaatgtatcggaaacatgcagccgagataaaatagtgaaaaactagttaccaaacataaccgatcagtgcggataataagaattggcaattcaaaattaaatggtaaacgaacgtcggcgcgattaattaaactcaaccataggaacgcggagagagtggccagtgaaagccagaacactctctttcgtcggagcgtctgtgtgtgtgtgtgttacgtgtgtgcgtatgtgtctgtgttgacaaaatacaacaaatcgcagcgaaaacaggaagtgtacgaacgataaagcataagattgcacatttcgcattaaaataggcgacaaaaacccgggggcgcatgcagatccacacatttctggcccactcacactcacacaacgcagatcagggggcgtttttctagatcagtgaccaagtcttatatggctttatgttttgatgctgcactaaatatgggtgaaacatcacgtcatttatgccacgctccttctccaaaaacaaagatcatgttgatttcactgcatttgaatatatatatatatatatacaatagttaatgttcgtgtgcgtcattcgctcatcagctatatagtatacgagtgttgttattgtggatcgctttcgcatgttaatgcttttgtgtgttattttttccattccattttttttttatcaaagtttcgcgctatcgcccagtcagctcagaagcagccgctccccaactgagagcacagagaaaccagctctggccacttgctcctccggatccggctcctgctcctgtccccgatcccctcccccacccgccaaatcctgatcctgctccaaatgactgacggcgaacagcaggaggcgctggtcaagcgggccgaggacgagcgcgaggacatcttccggcgctacgaactcgggctggatcccagcaatgtggtggactcctgggagaatcccaccttcgagatctaccacaggacagacaagtgagtaatattaatcattcgccagaaaaaatcccaataatgccattgatgctcccacagatatggcttcttgcacgactcgcggctgccgtcgacgcgtgatgcccaggaggtgcatcgcaacaagattgaaatggagcgggacaaaaagtggatgaagatgctaaatcagtggccgccgccccaggataagctgcacaagcgcgtctacaagggcataccggatcgcgtgcgtatggtggcctggaataagctgctcgacatccagcaatcgataaacaacaatgctggcgtctacctccgaatgctgcagctggccaggaagtactccacggagacgcgacaaatcgatgccgatgtgaatcgtcagtttcgcgacaatcttgcctttcgcgagcgctacagcgtaaagcagtgctcgctattcaatgtgctcaacgcctatagcatctacaactcggagctgggctactgccagggcatggcctgtgtggctggcgtgctgttgctttatttgcacgaggaggaggctttttgggcattaaataccctgataacagaccaaaaatacggcatgcacgggctgtttatcgagggattcccgaagctgacgcgattcatcgatcaccacgaccgcatcatgtcgaaaataatgcgaaaactacacaagcactttaccaaacacaacgttgacgccctgctgtacgctattaagtggttctttgtcgtcttcgtggaacgcgtatgtaaaccacaaggtgtatttattacaaaaatacttaatagatctgttttttgcaggttccttttagtttgagtctgcgcgtgtgggatatattcatgttagacggcgatcgcgtcatactgtccatggccatcaccattctgtaccttcacaaagacgaactattgcgcctgaaggacatggacgccatcattgagtacttgcaagtacggctgcacaagaactttggctacagcgacgatgatgccattcaggctctggaacgcgtgatgaagaagctgaaggacctcaagttggatgtgccgccgccagccaagtcaaacgagttccccacccgcaaactaggtgacttcgtggaggcggatatggagaagaagatcgggcgcagacgcaatgattatacagacgcggagaagcaagtcataacagatgtgatatcaaggtgggatctcttggcgttgttaacgttaacatatttataataattttttaactttattagacaagaacaaaacgcgatcgacgttcagtccacagtgtcctacgagacttcggagtgcgcaacgggtgagtcatgcgtcacacacaagtccttacactgtttatctactaatcctaatgcttgctttaaacaatccacttaccccacttgctgactgtaactataatctgcaataataattgaaaatttatttcttattttgtattgtgtggtgcaagtttatcacaaattgtatgtatatatatcatgtatgtatgtatatgtaaaccgaaacacgagcagttcctcaaatcgaacttgaattggtgttgccctagacttaatcctatgtacaaagtcctgtttagttctagactatgatatatggcatatgtattatgtttgatttgagtagcgatgtatagttttccttttgagtatacgttaagatcgtagccactttcagcgagtcatcgttggcagtccaacccaaatgcgtcaccatctcgctggccgaagcattaaactaattgaataatatgctaatattgaccttttgcacgttggagggaactaagaagggaattcctattcctatttgtgtaatttgatggatggctcgaaacagtgggacgagtttaagtggttctggatggagtaccaagttttagacgtagcggatctaatgggcactaattctaactgtatatgtaaattattagcatttaagggccaaataaccaaggcagccacaaaaaccagttcatgcttattaaatacgcccctcgacgttcatgttatcggatgatccattttgtaaccattgtctaacattgtccgctgcgtgtacatatatatccgtttcgatcacaagccaccgcttctgcgtcttgccggcaatcggagctgcaaaaaaaaaaaaaaaaaaagaaaactcgaaatcagatctgacctaatttgcaatcgcttctgtaattctgttcctaggtgatggatactcaatgaaaacgtttgagagtatcactagcttagccacctcgccggcgaatagcagctactcgctgtacagcaatggatttgtggtgaccactatcgatagtgaacaagatcccgcccgcagccagagtatccacaatctcagctacctgcagacgcatccagctctgccgcccaacgggctgcagcatatgcggcacagctttagcagcgatagcgacagtcgcaatcgcatcgatctggatcaggcactggaagtgctccagcgacagcagctgcccctccatccgaagactcccagcagccaggtggtgtatatcgtgcaaaatggaggcggaggcggcaggtatatggacgggcatcgggatgctgcggatgatgatgacgatgatgcgctgagcgtggagaacacacgcctttaatcttagttgattcgtatttcgtattctttctttatgtagttaatgtttgttttgcccacttggtttgtaaaacgcatatgccaataacgaattccttaccccccccccccccctcaaaaatccccttaaacattcggtagtaatatccacatgtacttagctttaatttttgtattgtcgaaccgacagaaacctgaaattgttattcatttgctagcattcatcgatgtgtgtatttagtgtttcttccacactctttcttttcccctcgctctccgatattatccaaccgagagtctcaacttaatattccaaatacttataactcctaagactccaactattccgtttgaaactacgtacaacgattaatatttattgctaaccgcctaacttcttacccacaattccacaatacctactagcataaaccaactgattaggtaacttaagctttgctcttgcatttactttatatttgcattacaaacaaaactcaacttttagtttatgttaaagccaaaattgtagctgtaatctaattgattagccaataattatatatgattatacatatagcgaaacgtaccacacaaataaatatgattttgtactgaaaagaacacatttgccagcatggttgatttcgcagttagcccaatatatacagtttattgtactacaatatatgtttcaggctaagaaaacagtattagtacgaagtaatcgactcgatttgcacctcacaaacaagtacaaaaaacacaagaacactaacacagctaacaaaaatttcacattgccacaatcacagccacaattgaaaactaaatgcaattttccaaaaaccaaatttttttcccaacgcattggcaacacgacgaactgggattggtcaaaccaaatcgacaaaaaatacgaaattcctataaacgcaatttattagttacgcttaccgttcccgaggattcgcactcaatacgaagttcgcttgcaggta

SEQ ID NO: 28655 - DNA, 1987 bp, DROSOPHILA
cacactcagtcgccccccaaatgtatcggaaacatgcagccgagataaaatagtgaaaaactagttaccaaacataaccgatcagtgcggataataagaattggcaattcaaaattaaatgtttcgcgctatcgcccagtcagctcagaagcagccgctccccaactgagagcacagagaaaccagctctggccacttgctcctccggatccggctcctgctcctgtccccgatcccctcccccacccgccaaatcctgatcctgctccaaatgactgacggcgaacagcaggaggcgctggtcaagcgggccgaggacgagcgcgaggacatcttccggcgctacgaactcgggctggatcccagcaatgtggtggactcctgggagaatcccaccttcgagatctaccacaggacagacaaatatggcttcttgcacgactcgcggctgccgtcgacgcgtgatgcccaggaggtgcatcgcaacaagattgaaatggagcgggacaaaaagtggatgaagatgctaaatcagtggccgccgccccaggataagctgcacaagcgcgtctacaagggcataccggatcgcgtgcgtatggtggcctggaataagctgctcgacatccagcaatcgataaacaacaatgctggcgtctacctccgaatgctgcagctggccaggaagtactccacggagacgcgacaaatcgatgccgatgtgaatcgtcagtttcgcgacaatcttgcctttcgcgagcgctacagcgtaaagcagtgctcgctattcaatgtgctcaacgcctatagcatctacaactcggagctgggctactgccagggcatggcctgtgtggctggcgtgctgttgctttatttgcacgaggaggaggctttttgggcattaaataccctgataacagaccaaaaatacggcatgcacgggctgtttatcgagggattcccgaagctgacgcgattcatcgatcaccacgaccgcatcatgtcgaaaataatgcgaaaactacacaagcactttaccaaacacaacgttgacgccctgctgtacgctattaagtggttctttgtcgtcttcgtggaacgcgttccttttagtttgagtctgcgcgtgtgggatatattcatgttagacggcgatcgcgtcatactgtccatggccatcaccattctgtaccttcacaaagacgaactattgcgcctgaaggacatggacgccatcattgagtacttgcaagtacggctgcacaagaactttggctacagcgacgatgatgccattcaggctctggaacgcgtgatgaagaagctgaaggacctcaagttggatgtgccgccgccagccaagtcaaacgagttccccacccgcaaactaggtgacttcgtggaggcggatatggagaagaagatcgggcgcagacgcaatgattatacagacgcggagaagcaagtcataacagatgtgatatcaagacaagaacaaaacgcgatcgacgttcagtccacagtgtcctacgagacttcggagtgcgcaacgggtgatggatactcaatgaaaacgtttgagagtatcactagcttagccacctcgccggcgaatagcagctactcgctgtacagcaatggatttgtggtgaccactatcgatagtgaacaagatcccgcccgcagccagagtatccacaatctcagctacctgcagacgcatccagctctgccgcccaacgggctgcagcatatgcggcacagctttagcagcgatagcgacagtcgcaatcgcatcgatctggatcaggcactggaagtgctccagcgacagcagctgcccctccatccgaagactcccagcagccaggtggtgtatatcgtgcaaaatggaggcggaggcggcaggtatatggacgggcatcgggatgctgcggatgatgatgacgatgatgcgctgagcgtggagaacacacgcctttaa

SEQ ID NO: 28656 - protein, 571 aa, DROSOPHILA
MTDGEQQEALVKRAEDEREDIFRRYELGLDPSNVVDSWENPTFEIYHRTDKYGFLHDSRLPSTRDAQEVHRNKIEMERDKKWMKMLNQWPPPQDKLHKRVYKGIPDRVRMVAWNKLLDIQQSINNNAGVYLRMLQLARKYSTETRQIDADVNRQFRDNLAFRERYSVKQCSLFNVLNAYSIYNSELGYCQGMACVAGVLLLYLHEEEAFWALNTLITDQKYGMHGLFIEGFPKLTRFIDHHDRIMSKIMRKLHKHFTKHNVDALLYAIKWFFVVFVERVPFSLSLRVWDIFMLDGDRVILSMAITILYLHKDELLRLKDMDAIIEYLQVRLHKNFGYSDDDAIQALERVMKKLKDLKLDVPPPAKSNEFPTRKLGDFVEADMEKKIGRRRNDYTDAEKQVITDVISRQEQNAIDVQSTVSYETSECATGDGYSMKTFESITSLATSPANSSYSLYSNGFVVTTIDSEQDPARSQSIHNLSYLQTHPALPPNGLQHMRHSFSSDSDSRNRIDLDQALEVLQRQQLPLHPKTPSSQVVYIVQNGGGGGRYMDGHRDAADDDDDDALSVENTRL

SEQ ID NO: 28657 - DNA, 3641 bp, DROSOPHILA
tgataaaagttgttatttaccaattgtgccctctgcgatttgtgcctagttcgagggcgaaaacgggtttcaaaaacgccaaggtgattcatctggctatcaggtgagttaaaaaccacaaagactagaaaaatgggtcagcacaaaggggaattggacaaaatctaaacaaagaagcgcaacagaatctaaagcgcaaagcaaaaggggcaataaaaacgggcatagacgaagatgccgactgttgattattgtggagtgcaattaaagtgtaaataagtcgccacacagacatgacgcaattagattcaacaagtcaatacgaagcaattaatcggcattaatgcagggcaggtatatttgcgttctcaactcgaaaataactaaaaagactacatatattgcttaccactcggaattgcgtcgcaaggaatgcagtaaattcactgatttatcactgttgttgcactctttttaattggctgaaacaacactaatgtgcaagtcaaccgattgtatttaacaagtcgctcttgatgatccagtcccaaagacctttcgttgtttaatgaaaaccagcagaaattgtttaaacaagaaatctccgacagagtgaccagtccgaatcttctggaaataccagaagttgcctgagcagacggcttatcgataacagcgtgggcagtgatgcagttcttgtgtgtaaaacggccaaattcagtcgctaaatcgaaataattggtcagcctaaatatatgcaagagctttttagtttatgtttatttaataatgagtgttaaataactaaaaactatacctctcttgttacttttgcaatcgaaagatttctaagtcactcaacgaactcaatttaaattatacaacaaatgtctaaactgaattttgttcaacagtgttttgaaatactaaatgttagaattcacccgttgatggtaacactgctgaggtaagaagaagacaaattttgctcgtcattgggaattgacgattcactgaatttttgataaactcaacaaagtaaacgcattatatatcccgtaagtagtgcagcgactactaataaccccaaaccgatcacggcaccataaaacactttcgagttatgcgccaaagaaagtcgtaattacaatacgttcttcatccaatcttcgccagctctcaagaagcacccgcatcatgtttggaagacaaagtggactgggtagttccagcaacagcagcaacctggtggagttccgcgcaggtcgcatgaacatggtgggcaagatggtgcatccggatccgcgcaagggcctggtctacatgacccagagtgacgatggcctgatgcacttctgctggaaggatcgcacctccggcaaggtggaggacgatctcatcgtcttccccgatgacttcgagtacaagcgcgtcgatcagtgcaagacgggccgtgtctatgtgcttaagttcaagtcatcgacacgccgcatgttcttctggatgcaggagcccaagacggacaaggacgacgagcagtgccgccgcatcaacgagctgctgaacaaccctccatccgcccaccagcgcggcggcggcggcagcaacgacggcgacctccagtacatgctcaacaacatgtcgcagcagcagctgatgcagctcttcggcggcgttggccagatgggtggtctcagctcgctgctgggccaaatgaagtgagcatttaaacccttgcagccatagtgtccaagaactagtcaagtagatagcttcttaacttacagggtatcgtttttattgtttataagcatgtaatcgaaggaatgaagccagaacttgagttcaccccctttttcaatattttcctttctatattctccgcagctcccggacgccctcgtcgcgcaacacctcctcatcgggtggcggtggggcatcggccttgcagacgcccgaaaacgtcagtgtgccgcgcactccgagcgctccatcgaaatcgggcagcagccgcagcagcagcaatgtgaactcgcaggtcggcgaaggtgccggctcctccgttgatgcggatgcccccggtaagaactcaaccacatcgaccacaacggcgtcaaaatcgaccggagcctatgccaatccattccaagcctacttatccaatctctcccccgaacatggcgcaggacgatccctgaatattgacctatcgacggccctacccggcgccgatgccatcaatcagataattgccgatccggagcatgtcaagacgctgatcgtgcacctgcccgagtcggaggatgtggacgatgatcgcaagcagcagatcaaggacaatatcacctccccgcagttccagcaggctctggcccagttctccagtgccctgcaatcggcccagctgggacctgtgatcaagcaattcgagttgtccaacgaagcagtggccgccgccttctctggcaatctagaggattttgtgcgtgctctggagaagagtctgccccccggtgccaccatgggtggcaaaccctccgccagcgagaagaaggccagcgatcccgaaaccccaacttcagtggcccgcgatgagaacacagatcccgctaccgaaaaacaggaggagaagcaaaagtagcttacgtgtgcggcttggtagtcattgatatggaatccgaaagcaaattttttcatgtgctgagtgatttttggatgctaaataaattcaaatgggagttaatcggtagttatctatctaattgtgtgtttgatatacatcaaaacggcttattaatttatatttaaaatattactactttaataaaaggatacgcgttttggtaagtactcgtccagctcttttcagaatgcatcattatactcattatacttgggtttttggcttacctaatttaatttaaaaaaacaaagtctaacgtgtacaatttattttaaattttgaagttaataatggggggatatatggaagtaacggtaatattaatcccgacaaggtcattttgttggtgtccccctaacaaaagctcgctgccccgctctctcatcgcaacacactggtcgtccctttctggcgcgaattgcgcgctctctcagcgagagccgtctcacacagatatatacacacacaggcacacgcaacaatatttattttattcaattccaaaacggccagcaaataagttgtgtttgtgcaaaactcgcgcgttcgcaattttccgaagctgactctcaattctcatacataacgatctcaagcgatctccgccaggcgaatcaaacccggatatatccagatctgcagtaattgccatattttttcgccaatttttgcgttgcgggctggatgtttttgtatctgttgttgttggtgctttcattttgcagcaatctctgtgcctgtgtgtgtttgtgtgttggtgcttttggcggacgtgagaaggtgtgtgtgtctagtggcagcctgtatgttttttttttgcatgactgcttcgcggagctgtggggaaagcttttccctccaaagtagttgtcataaaaaagttaaaagccgcggcaaaaacaaaaatcaaagcaaacacagaaagcgcgaagagagagggcagtgagacagagagaga

SEQ ID NO: 28658 - DNA, 1249 bp, DROSOPHILA
aattgacgattcactgaatttttgataaactcaacaaagtaaacgcattatatatcccctctcaagaagcacccgcatcatgtttggaagacaaagtggactgggtagttccagcaacagcagcaacctggtggagttccgcgcaggtcgcatgaacatggtgggcaagatggtgcatccggatccgcgcaagggcctggtctacatgacccagagtgacgatggcctgatgcacttctgctggaaggatcgcacctccggcaaggtggaggacgatctcatcgtcttccccgatgacttcgagtacaagcgcgtcgatcagtgcaagacgggccgtgtctatgtgcttaagttcaagtcatcgacacgccgcatgttcttctggatgcaggagcccaagacggacaaggacgacgagcagtgccgccgcatcaacgagctgctgaacaaccctccatccgcccaccagcgcggcggcggcggcagcaacgacggcgacctccagtacatgctcaacaacatgtcgcagcagcagctgatgcagctcttcggcggcgttggccagatgggtggtctcagctcgctgctgggccaaatgaactcccggacgccctcgtcgcgcaacacctcctcatcgggtggcggtggggcatcggccttgcagacgcccgaaaacgtcagtgtgccgcgcactccgagcgctccatcgaaatcgggcagcagccgcagcagcagcaatgtgaactcgcaggtcggcgaaggtgccggctcctccgttgatgcggatgcccccggacgatccctgaatattgacctatcgacggccctacccggcgccgatgccatcaatcagataattgccgatccggagcatgtcaagacgctgatcgtgcacctgcccgagtcggaggatgtggacgatgatcgcaagcagcagatcaaggacaatatcacctccccgcagttccagcaggctctggcccagttctccagtgccctgcaatcggcccagctgggacctgtgatcaagcaattcgagttgtccaacgaagcagtggccgccgccttctctggcaatctagaggattttgtgcgtgctctggagaagagtctgccccccggtgccaccatgggtggcaaaccctccgccagcgagaagaaggccagcgatcccgaaaccccaacttcagtggcccgcgatgagaacacagatcccgctaccgaaaaacaggaggagaagcaaaagtag

SEQ ID NO: 28659 - protein, 389 aa, DROSOPHILA
MFGRQSGLGSSSNSSNLVEFRAGRMNMVGKMVHPDPRKGLVYMTQSDDGLMHFCWKDRTSGKVEDDLIVFPDDFEYKRVDQCKTGRVYVLKFKSSTRRMFFWMQEPKTDKDDEQCRRINELLNNPPSAHQRGGGGSNDGDLQYMLNNMSQQQLMQLFGGVGQMGGLSSLLGQMNSRTPSSRNTSSSGGGGASALQTPENVSVPRTPSAPSKSGSSRSSSNVNSQVGEGAGSSVDADAPGRSLNIDLSTALPGADAINQIIADPEHVKTLIVHLPESEDVDDDRKQQIKDNITSPQFQQALAQFSSALQSAQLGPVIKQFELSNEAVAAAFSGNLEDFVRALEKSLPPGATMGGKPSASEKKASDPETPTSVARDENTDPATEKQEEKQK

SEQ ID NO: 28660 - DNA, 11009 bp, DROSOPHILA
tcggaaatcgatcttcactttttcaggcccattggcttgctgcgtactccgatgcgggtattctcgccggggatctggctgcgaaaatgagcccactccttctgatagtactgaaataatgccaccggatcgcagtgcatggattttcgacgttggtgaactaaatggggaaagatgggaatgactattaagttattttaaaaaatatcaatgtgttaaaaattacttacccgaaccagatctccgattggaggcgctacgcggatgcgacttgctccggcggcggcgttgcatcctgaggcggtcttcattagcctccgattcgctgctagaaatagatggtgccttttcccggcgggtcttgctgcggctgcgacgccttccgttcacctgagatttttggggaactgcattgttagccgacattggaggcacagaagcatccatcaagagttgttccttaaaaaggcgagctaagtcagcaaaactggccccaccatcggagcgctccttaagatcgtcatccttgtcagtcttgcactccttctccttggcagatggacacggacatgatggagccgcattctccttatccttatccaaacttagtttggcacgcgagctgacggtgccgcgcttatgcaggccgctgaaatcgctctcctttgcgttctccgccaggcgttcctcatgcttgatgagcttgcgcaagtctatattgggatgggatcggatcagagaagtagccattagcagggaaatgaggatagcggatagtggatatgagataggtgcggttaatcaggatggcaagatgtaactagaaaatgacgtgcatataactaaccgaatctgtatggttaaaaaaactggacatcgactattccaacctaagaacatgaagctttgacccagatcagaagagagaaattacacaaatgtttttttacttgacattactactatcagcccatgcgatgtgcattcaataaattaaaactttcctttgtatgtttaattgaatatttaatttaatttactctttgttttaatatttttacaattgcttttggttttttgtttaaagttaattgtttttctgttacatagtttacgtttttctccttttttattttgcttgagcgttgactttgataatagtacatagctaagaaaatgatttccacaattaaaaacaaaaacgattaatggaatctttactacttaaaaactaggttgaaaatgagcgattttggaatagtccgaattggttgatgagaattcttttggggggcagggaatttgagctaaactaagattaaactaaggcttatgtacgtattttcgtgtgtgattgtttgtgggtttttattatgctacacttagctgataaatgggatgaactcttctaacgatctaactcgattaaatttgacggacttcatttgacagttagagttttcagaaaacattaatgatattcgcttttacacaattttggcagtggttctttgtctcaaacgagtatattaaatgggtacattagaccgtttatcatttaatttccactttgccaaatcagaaaaattaaaactggaaaattgactgaattgaaatcgctgtgactttgtggttttggagggatttgtggcctaaaaatacctaaaaactgaaacttattactcatcgtggctgtacacactaaaagctatacgtgattggtgctgaatgatgcgtttcttgatctggatgatgattagatgacacagggtgctcagcgacggtatcgaaagcgtcggaatggcgcccttagtcgcctgcaggtgacacgcacctccttcttcaggaactgcgagatggccaatgacttcacggcagccgtcgccgcttcggcggcacaactgctcgccgcctttccactattcggtggcgcatacttggagatgtcaaacttccgcttcggcgtcgtctggtgtgggcaatgctcatgcgaatcgcctgcctgggtgttgcttaaatccaaatcggtatccaagccgtcagatgataccgtgaatatgtcggaattgtcacccagtttctcacttggcgaaatacagctgcctagacttccgttcagctggggagttcttctctgatgctgttgaacttgcccggtacttggtgtggaggtggcctgtagtcgctggccattatgcagagtaagcaagagttttttgccctgtgaagagtcttcaggcggcgtggttaccgatatggaaggtattcgagctcttttttcatgaggctcagttttctgaatgcccatgtcctgctcttcgtaggcatcttcaaaaacatcttcgtcctcgtcctcctcctcttcttcttcctcgacatccgcatcagttgcttcgatttccgcctcaacatcctgctgctgatccacagaatccgccattgtttcatcttcgtcgggcagactttccatttcatccgcctgcggttcagcctgctcgtcaacatcggtcgctggcggagtcatcacggcatcttcgcgggaattctgtttatcatcagcaggtgatccaccagagggcgagtttccgcctccttcatcatcttcatcgtctttgctcaggagatttcctctcgtcgcagaagtcgtagtagttgtggtagtggttgtggtctgttcctcttccgtttccattggctcctgctttatagggtgtagctcagcaagacccattttctggaaattaattcgctcatctggcaaagctcgactgccacctaatccgcctgcgttccgtcttctctgagctttaggccaacccgtgcgattggacttcaggctcttccttttcctataatagctggcgtatagattgagattactcattcgtcgaccggaaccaggtgggtttcctctggatacatcttcatcatcatctccactccctgcactacccataattagatcgcacaagtcaaactcgcttgtaaagcaatcagtaggtggtggagtttgtggtgtgttaacaagtctttcttctcgtccttcagactccacctccggtgatatctggtcaaattctatatcgtactccttgccagctagctccagatatttatctaactgccaggcaacgaagccaggattgcaatactgacgggcttgatccaaagctttaagggcacacgtttccatttcgtattcgagcaatcccttcttgctgggcaatttgcggactccacgatacgcacccgttccgggaagattttgggtagtcggtcgcactgtgcctgcaacggaaggattaactcttcttttacgcttacccagaagcgcacttgctgaggattccctttgactggttgcgaattccaatcggcgcgaataaatctgactctgattacgagccgctggtgtcaggcggcgacttctaacgggtgaagaagttgcgggggtaggaactggcgctggcggggaatgatcatatttgttttgcccccgcctcattctctttactgtctcgctaatctcggtggcaaatcgtagttcctcaacaggagtcgcagcttgagaacgagtcgttcggggcgatgaaggtgctactggttcctgttttatcggagttttaagctttggtgcggctacaggaggaggtggctcttctgcttctgagttcgttttactttgtgagtcctgacgctgccgtataatgcaactgaccaaagccagagtagaagcatgttctctaggggattttcttggtggtaattcggcaatccgggccagctgcttattcctgcaggttatgccgctccgttgactgttactgcagcttgaactggatgtgctcctcactctctctatcagctgcactctatcccccatagaacccgaggcaaactccctttccagtaattctggtgtgctcgccttgctatcacatttggctccggcagtggccaaggaatttccctccaactgctgcagttgctcctgttcctgctgataacgttggagcagatggagctttttgttcttgtaggtcgcggatgaggaagaggactggacttcctcctccttcttaacttctttcttgggcgcgggcttctgatcttccagcttgatctgctctcccttatcctgctttacttcgcttgcctcgcggcataatgcacaactgtgtgctggcaatgttttggccatgggtatgggacccatttcatagggcagtttcctataattagtgctaccataatacgtgtaatagttctcttcacccgcatcctgtcgcagaaaaactctattccaaagctccccacttggcaacgattcgaaggtatactgcatttcccgaagtctttcgcttttactgcaatcaaagaataaatctatcgctggtggcactgccttcgtttgtttaactttatttttcgtgggacttgacggtttctggatcttagtgcggcttttcgaaggagacgttttgacctccgttaactccagctctccggcactacgatttatggttaatctggaaagccgcctagctgctctttgttcacgagtatctgttgatttacgaggagctgccgtgattcttcgttggctaccagcaatgtagtcttcatcgctaccactactgcaactactgtccacctcctcatctaattctttatctaatatctcttccagatcttccaactccttcactttctgctcttcgatcacttccttctttatttttattttgggctttactaattcccccatcctatcctccagtttattggccattttccggcaagttgtctgccttagctgctgctgctgatgactgctggcggtggctgctgtcacaatagccgtagctgtgcgactgcttttcctggtggccaccaattgctcctgctttatcttgatctttagctgcggttttggctgcggttgaggcccttcttctggctggatgggggcgcttggaaagcgctgctggttactattgctgctactactccccgttgataattggcgttggaaaacatcctgcgccgctgctcctcctacttttcttcgccttcccactgcttgagctcgcttgcgtatgctagtaggtaatcctgaagattccttagtttctgcttcgctggtgctagtgtctaggctggcggaggagatactgtatctgcctcttacatccgaggtggtttgtcgatcgacatccgtgggcagctcactgctgctccttgtagttggcaccgctgttctgggaaacataaagttctctgcctctccattgagtcgttgtaactctgtttgtcggatcttttggaactttacaatcagcgagggcgaatccacttggttgggaggtcttcctcgccctctgggaggcgtagcacattcctccctagtttctactactttataaatagaagaaggcggcaacatggctctcttagggggtgacagaccggagttctgtgttttccttcgtcctgaattcgttgttggcgttgctgcggctgttgttggatgttcctgacgctgaagttcagaaagactaccaggtgaatttccttgaaccttcttggcaccagggaatggcgtttgaggtgatgccactgcaactccttgaaacttttctgacgaatgctttcccttggttatccttttggacttctcccgcaacgctggcgatggcctctgacggggactctgcaactcctcattactcaacgattcatcgacatccatgtcaagttcactctctacgggctcctcctccaggaacctattcacatccgccgaactttgaattagagtgtctagagccagaaaattatccgaattctttgcaaacagctcgtgatctttgctctgcaaatggatattcaggatatcgtattccaatttacagatctcacacactccaccttgtttttcactcgaatctattggttcgcgacaattggaacgcggactattcggaatcgcagactgttttttaagttcctgcagagaaggatgctggagtggctttgcttccccagcagcttgtttgtctttctgtgatgtgcgtgaacccaaaggcttgcgggtcatgctatgctccttatccttggtcttcgactttgttagtagtcgaaaggcgccgtcttcgctgcttaaatctatctttggccagtcgtctggctgtttgataagatggtagtaaggtctataattacgcttgacggattcgatcttcacatactgcttttttagctgtatatgatgggggctagctgatgttgatcctcctccaccttccttcttaccctcaaggtattgcttaagctcggtctgaatgcgctttataaagcgttgggcataatccgtctgccagatggtatagctccgttttagggatgtcgtgggtgtgctattgccactgtttacgactccaaccgtgctccgccgcacgcgactcagtattgcatccgctcttgattgcctctgattcggttttcttgccgaaccatcattttgctggtagtgactcgtgggggtgccgggtgtgctaggtgtacctggtgttccggaggttccgcctatgacctctggcttatcagtgacaaaatgtgttatatcgtcactgagaaagaactcgagatgtccacccaatgctttgatgtcggactcaatgcgctttgctaactgatgatcgcaaatgtccaggtagaacttaaagtggcacagggggcgtttgctctttatgacctttactttaggaggagttgctgctgttgcggaagctgctgctgttgagtggctagttgttgttgcgagtctgctggcgctttgtttgtccgactgcggttgcataccttctggcgcaaattagctgcagccaacggacccagaattaaagagaaaagaaattgcagaaaacgccattaattaaaatttattttgaagagctgagctacagtcgaattttaacaaattaaagctttggcaatattctaccaaattcacaaagtacaaaataactgtatgctttatgtagagttaaatttaatgaaacttaagattttaccattgcactcaaaaataaatttaaaaatcagaccataaaaatgattatttacaaaaaaaaaaaaattgaacttaagtaatattaatttccaacttattacatccaaatacgttgtacatgttcttataaaatgtttcagtaacacaaatatttaaaaacattttattaaaaacaagaaccactcctataaagtttccctccaattttagttggaacaaagttataccagtctaaagctgtagttataaccattgatataattggtttagtttttaatttttattcaaaattcgaccgtagctggaaatccaacaccaaccgcgttttaaacttgtttgccacgaaaaatgatataaaaacaaataaatcactgtgggggaaatcctactcccggtggttcttcttcctcttgttccttgtacgtttcccgatgtgtgttatgcaatgttgcattcggatacacacaaatcaaatcaataactgcacttggatgcatttcggtatgtattgcctaaaaggccatcgagtgttaagtgtgagttaatttattttaattccaaactaaatggaacacagaaacacgacccaagcgggtggaagaagaagaagcagcagctgtgctgcagcatagcgctgccaggtcggggggctacgcttagcgaggcgttgccagcacgcgaaaaaattaggggtgacacagctgcaacataattgtactgtattgttgcatttgattaaaaaccagttatatttacaaaacaggcacgaaaaaacaaatgtggaagaatagcgattcaagaaaaaaaacagttggtgatgacacttattcttaatcactcatactaacctcggcttgtatataagctctatttaataaattgtactttctttatttatactattattatttaattttataaagtcaaccctaacaaatataattatgcatcttatcgttgtatttcttgctaatttgcgcaatatggcttatcacattccattcatatttgttgttttggttttttacgtctcccaaaaaaacaatgcgaatgagctgacaaagccataatggccgatgaccgatattaaactcataatgacaattagtccggcaaccctgccgttcacagtactaacacattcgtaaatacttgcaaataaattgtatgcctagccaatatgcactgacgcgcgtcaatatatatataacctgaaaaacgagcacatcagcgctgcgctggcactttttctgccctcgctttatatttgccattacaaaacgaaacgttggcgcaaagagaaacgaaagaaaccctagtggcaaccctcaagcggtagcagtagcaacaacaactaaggaaaaataagaaaaagagtaggagcacacaaggagtaaagcgaaaaataacacgaaaaacgcacaaaacacaaaaagagagtggagggaaaaaaacaacacacacacacaattcatacagttgcggtggaaattatagcactttcaatttaaaataaccgaaatagacattttaatgagtgtaatgagttttgtgcattaggtaaataaaatatattccgtaagacaatttttctattaatattacaaattcaaattgcacatcgacatttccctaacgctttacccgctgctgtatgcgtacatatgtatgtttgtggataaaattcatgtgaagttgcggatgaagcttacaatgtggtggaggccgaaacacacgagcaaacgcagaaaagcaggcccagggcagcagcaacaacaactatgactagcaagccaagtacaaaaaacacacagaacagtggggtcacaagagccgtgtgtttaggatttccactgaaatgtatttatgccacagtacgtgaaccttgccaaagcagttttccttcgatgtcgggccggcctttattcgattattcctaaatttttggtccgaatgaattttgttgctgcaaaccactgtgccatgggtatgtatagtgtgttattcacaatttccaagtaatactcgtttttatattttcttttttccattgctccgtatttctgcctgtgccgctgctctttttcttgtctgtgctttgtacgcacgttcgttttggaaataaaaacaaattgaaatggtgacgaatcgtttgaaattcagtttgaaaagccgcaaccaaaaaaaattgtgcatacaaaataacaaaccaaaaacaatcccacacacacacgcacgcacacttgtacggattgcttaccttttagaaattcacggagttgctcggctgatatgttcctatagcccaaatcatttagatactggagaatggcccgtgcatctagtggcaaatgtgacattttacttttcgccaagtagagcaatcgttcttgatattcgtattgttaattattttttgtttatattccaccctcacacatacacacgcgcgcgcactcgagcacatacaaacacacacacgaatgcaaaatcgccgttcgtttggtttctctttctcgtttgtttcgttcgcttcttcttccttttgttcgtattcgtcttcgtgcgccgacaatcgaccaattttcactgtacttttgctctgcgttggccgtttttgagtttatacttgcatttacttgcgtcaagttaatcagttgcaatgactaaatatacacaactgtatgggaacgatcggtataagcgtctatatgccttcgttcgcccgtcgttcgtttgctaacgcctttgttatttttatgccttttatcaggttttcgcggtcggatggtcgccaattcgattgtgcacgcacagttcgagtgtcgaaattgggccttttcttattttcacatatttcctcgctagttttataacaattttcaccaattgaaaataaagtgtacacggacagggcagcgcacacacgctcggcaaccaaattttcgtcgtgttatcgataactatgttggctggcgatggtcgatggttgctaagcggcgtgactgagtcgcggtcacatatcgttttaagggaaaaagtcacggattagcagttttaaaaaaggtctagtttaatattgattcgtttttcgtgacgagagacattaattattcattgaatttatttatttcatttaaaaatatacactaacgtacttacaattttgttaacatgaatctatgatatataccataaatttaaaatttgtaattgcgatttgaaacatcgacagcgatggctatcttcatgtatcgataggcaacgacagtccgtccctaccagcaacgcgaaaggtttttgtcttgctttcttgttgctttgtgtgattctcgagtctctgttctgcgtctgcgtcccgttctcgtgccaacgaactgatttcgccccgcgttcgtgctcaatcgtaaattcgaaataaattaaaaatgtctcgcagttcgtacctgttgtgtgtgctgtttttaggtgagcgaaagagagggagaagaaatgaagaaatcgcctcgcgatcagattttacggatacgcatctcgttattgcaggcgccagctgcttggttttcagtgcgagtgcagcgcggaacaatcgaaggggttacaaggccacggaaccgcccaccaccacccagcccccgcagacggccaaggagtatctggatagtcgacccggaatctccacattcggcatcatcgccatcatcttcaccgtaatcgttctctgcctcgtcttctactacggcatcatttgctaccccttactctgtcgcgatgacaagaaatatcggtttatggacgtatcttcaaccattactgccgccacatcgcgctccattcaatccatagagaactatcccgaccagaaacaccatcatacgttggcctgattcggggtgtggacacctggaggatagtggtttagtagtacttcaat

SEQ ID NO: 28661 - DNA, 6557 bp, DROSOPHILA
ccgagcgtgtgtgcgctgccctgtccgtgtacactttattttcaattggtgaaaattgttataaaactagcgaggaaatatgtgaaaataagaaaaggcccaatttcgacactcgaactgtgcgtgcacaatcgaattggcgaccatccgaccgcgaaaacctgataaaaggcataaaaataacaaaggcgttagcaaacgaacgacgggcgaacgaaggcatatagacgcttataccgatcgttcccatacagttgtgtatatttagtcattgcaactgattaacttgacgcaagtaaatgcaagtataaactcaaaaacggccaacgcagagcaaaagtacagtgaaaattggtcgattgtcggcgcacgaagacgaatacgaacaaaaggaagaagaagcgaacgaaacaaacgagaaagagaaaccaaacgaacggcgattttgcattcgtgtgtgtgtttgtatgtgctcgagtgcgcgcgcgtgtgtatgtgtgagggtggaatataaacaaaaaataattaacaatacgaatatcaagaacgattgctctacttggcgaaaagtaaaatgtcacatttgccactagatgcacgggccattctccagtatctaaatgatttgggctataggaacatatcagccgagcaactccgtgaatttctaaaagagctaatttgcgccagaaggtatgcaaccgcagtcggacaaacaaagcgccagcagactcgcaacaacaactagccactcaacagcagcagcttccgcaacagcagcaactcctcctaaagtaaaggtcataaagagcaaacgccccctgtgccactttaagttctacctggacatttgcgatcatcagttagcaaagcgcattgagtccgacatcaaagcattgggtggacatctcgagttctttctcagtgacgatataacacattttgtcactgataagccagaggtcataggcggaacctccggaacaccaggtacacctagcacacccggcacccccacgagtcactaccagcaaaatgatggttcggcaagaaaaccgaatcagaggcaatcaagagcggatgcaatactgagtcgcgtgcggcggagcacggttggagtcgtaaacagtggcaatagcacacccacgacatccctaaaacggagctataccatctggcagacggattatgcccaacgctttataaagcgcattcagaccgagcttaagcaataccttgagggtaagaaggaaggtggaggaggatcaacatcagctagcccccatcatatacagctaaaaaagcagtatgtgaagatcgaatccgtcaagcgtaattatagaccttactaccatcttatcaaacagccagacgactggccaaagatagatttaagcagcgaagacggcgcctttcgactactaacaaagtcgaagaccaaggataaggagcatagcatgacccgcaagcctttgggttcacgcacatcacagaaagacaaacaagctgctggggaagcaaagccactccagcatccttctctgcaggaacttaaaaaacagtctgcgattccgaatagtccgcgttccaattgtcgcgaaccaatagattcgagtgaaaaacaaggtggagtgtgtgagatctgtaaattggaatacgatatcctgaatatccatttgcagagcaaagatcacgagctgtttgcaaagaattcggataattttctggctctagacactctaattcaaagttcggcggatgtgaataggttcctggaggaggagcccgtagagagtgaacttgacatggatgtcgatgaatcgttgagtaatgaggagttgcagagtccccgtcagaggccatcgccagcgttgcgggagaagtccaaaaggataaccaagggaaagcattcgtcagaaaagtttcaaggagttgcagtggcatcacctcaaacgccattccctggtgccaagaaggttcaaggaaattcacctggtagtctttctgaacttcagcgtcaggaacatccaacaacagccgcagcaacgccaacaacgaattcaggacgaaggaaaacacagaactccggtctgtcaccccctaagagagccatgttgccgccttcttctatttataaagtagtagaaactagggaggaatgtgctacgcctcccagagggcgaggaagacctcccaaccaagtggattcgccctcgctgattgtaaagttccaaaagatccgacaaacagagttacaacgactcaatggagaggcagagaactttatgtttcccagaacagcggtgccaactacaaggagcagcagtgagctgcccacggatgtcgatcgacaaaccacctcggatgtaagaggcagatacagtatctcctccgccagcctagacactagcaccagcgaagcagaaactaaggaatcttcaggattacctactagcatacgcaagcgagctcaagcagtgggaaggcgaagaaaagtaggaggagcagcggcgcaggatgttttccaacgccaattatcaacggggagtagtagcagcaatagtaaccagcagcgctttccaagcgcccccatccagccagaagaagggcctcaaccgcagccaaaaccgcagctaaagatcaagataaagcaggagcaattggtggccaccaggaaaagcagtcgcacagctacggctattgtgacagcagccaccgccagcagtcatcagcagcagcagctaaggcagacaacttgccggaaaatggccaataaactggaggataggatgggggaattagtaaagcccaaaataaaaataaagaaggaagtgatcgaagagcagaaagtgaaggagttggaagatctggaagagatattagataaagaattagatgaggaggtggacagtagttgcagtagtggtagcgatgaagactacattgctggtagccaacgaagaatcacggcagctcctcgtaaatcaacagatactcgtgaacaaagagcagctaggcggctttccagattaaccataaatcgtagtgccggagagctggagttaacggaggtcaaaacgtctccttcgaaaagccgcactaagatccagaaaccgtcaagtcccacgaaaaataaagttaaacaaacgaaggcagtgccaccagcgatagatttattctttgattgcagtaaaagcgaaagacttcgggaaatgcagtataccttcgaatcgttgccaagtggggagctttggaatagagtttttctgcgacaggatgcgggtgaagagaactattacacgtattatggtagcactaattataggaaactgccctatgaaatgggtcccatacccatggccaaaacattgccagcacacagttgtgcattatgccgcgaggcaagcgaagtaaagcaggataagggagagcagatcaagctggaagatcagaagcccgcgcccaagaaagaagttaagaaggaggaggaagtccagtcctcttcctcatccgcgacctacaagaacaaaaagctccatctgctccaacgttatcagcaggaacaggagcaactgcagcagttggagggaaattccttggccactgccggagccaaatgtgatagcaaggcgagcacaccagaattactggaaagggagtttgcctcgggttctatgggggatagagtgcagctgatagagagagtgaggagcacatccagttcaagctgcagtaacagtcaacggagcggcataacctgcaggaataagcagctggcccggattgccgaattaccaccaagaaaatcccctagagaacatgcttctactctggctttggtcagttgcattatacggcagcgtcaggactcacaaagtaaaacgaactcagaagcagaagagccacctcctcctgtagccgcaccaaagcttaaaactccgataaaacaggaaccagtagcaccttcatcgccccgaacgactcgttctcaagctgcgactcctgttgaggaactacgatttgccaccgagattagcgagacagtaaagagaatgaggcgggggcaaaacaaatatgatcattccccgccagcgccagttcctacccccgcaacttcttcacccgttagaagtcgccgcctgacaccagcggctcgtaatcagagtcagatttattcgcgccgattggaattcgcaaccagtcaaagggaatcctcagcaagtgcgcttctgggtaagcgtaaaagaagagttaatccttccgttgcaggcacagtgcgaccgactacccaaaatcttcccggaacgggtgcgtatcgtggagtccgcaaattgcccagcaagaagggattgctcgaatacgaaatggaaacgtgtgcccttaaagctttggatcaagcccgtcagtattgcaatcctggcttcgttgcctggcagttagataaatatctggagctagctggcaaggagtacgatatagaatttgaccagatatcaccggaggtggagtctgaaggacgagaagaaagacttgttaacacaccacaaactccaccacctactgattgctttacaagcgagtttgacttgtgcgatctaattatgggtagtgcagggagtggagatgatgatgaagatgtatccagaggaaacccacctggttccggtcgacgaatgagtaatctcaatctatacgccagctattataggaaaaggaagagcctgaagtccaatcgcacgggttggcctaaagctcagagaagacggaacgcaggcggattaggtggcagtcgagctttgccagatgagcgaattaatttccagaaaatgggtcttgctgagctacaccctataaagcaggagccaatggaaacggaagaggaacagaccacaaccactaccacaactactacgacttctgcgacgagaggaaatctcctgagcaaagacgatgaagatgatgaaggaggcggaaactcgccctctggtggatcacctgctgatgataaacagaattcccgcgaagatgccgtgatgactccgccagcgaccgatgttgacgagcaggctgaaccgcaggcggatgaaatggaaagtctgcccgacgaagatgaaacaatggcggattctgtggatcagcagcaggatgttgaggcggaaatcgaagcaactgatgcggatgtcgaggaagaagaagaggaggaggacgaggacgaagatgtttttgaagatgcctacgaagagcaggacatgggcattcagaaaactgagcctcatgaaaaaagagctcgaataccttccatatcggtaaccacgccgcctgaagactcttcacagggcaaaaaactcttgcttactctgcataatggccagcgactacaggccacctccacaccaagtaccgggcaagttcaacagcatcagagaagaactccccagctgaacggaagtctaggcagctgtatttcgccaagtgagaaactgggtgacaattccgacatattcacggtatcatctgacggcttggataccgatttggatttaagcaacacccaggcaggcgattcgcatgagcattgcccacaccagacgacgccgaagcggaagtttgacatctccaagtatgcgccaccgaatagtggaaaggcggcgagcagttgtgccgccgaagcggcgacggctgccgtgaagtcattggccatctcgcagttcctgaagaaggaggtgcgtgtcacctgcaggcgactaagggcgccattccgacgctttcgataccgtcgctgagcaccctgtgtcatctaatcatcatccagatcaagaaacgcatcattcagcaccaatcacgtatagcttttagtgtgtacagccacgatgagtaataagtttcagtttttaggtatttttaggccacaaatccctccaaaaccacaaagtcacagcgatttcaattcagtcaattttccagttttaatttttctgatttggcaaagtggaaattaaatgataaacggtctaatgtacccatttaatatactcgtttgagacaaagaaccactgccaaaattgtgtaaaagcgaatatcattaatgttttctgaaaactctaactgtcaaatgaagtccgtcaaatttaatcgagttagatcgttagaagagttcatcccatttatcagctaagtgtagcataataaaaacccacaaacaatcacacacgaaaatacgtacataagccttagtttaatcttagtttagctcaaattccctgccccccaaaagaattctcatcaaccaattcggactattccaaaatcgctcattttcaacctagtttttaagtagtaaagattccattaatcgtttttgtttttaattgtggaaatcattttcttagctatgtactattatcaaagtcaacgctcaagcaaaataaaaaaggagaaaaacgtaaactatgtaacagaaaaacaattaactttaaacaaaaaaccaaaagcaattgtaaaaatattaaaacaaagagtaaattaaattaaatattcaattaaacatacaaaggaaa

SEQ ID NO: 28662 - protein, 1695 aa, DROSOPHILA
MQPQSDKQSASRLATTTSHSTAAASATAATPPKVKVIKSKRPLCHFKFYLDICDHQLAKRIESDIKALGGHLEFFLSDDITHFVTDKPEVIGGTSGTPGTPSTPGTPTSHYQQNDGSARKPNQRQSRADAILSRVRRSTVGVVNSGNSTPTTSLKRSYTIWQTDYAQRFIKRIQTELKQYLEGKKEGGGGSTSASPHHIQLKKQYVKIESVKRNYRPYYHLIKQPDDWPKIDLSSEDGAFRLLTKSKTKDKEHSMTRKPLGSRTSQKDKQAAGEAKPLQHPSLQELKKQSAIPNSPRSNCREPIDSSEKQGGVCEICKLEYDILNIHLQSKDHELFAKNSDNFLALDTLIQSSADVNRFLEEEPVESELDMDVDESLSNEELQSPRQRPSPALREKSKRITKGKHSSEKFQGVAVASPQTPFPGAKKVQGNSPGSLSELQRQEHPTTAAATPTTNSGRRKTQNSGLSPPKRAMLPPSSIYKVVETREECATPPRGRGRPPNQVDSPSLIVKFQKIRQTELQRLNGEAENFMFPRTAVPTTRSSSELPTDVDRQTTSDVRGRYSISSASLDTSTSEAETKESSGLPTSIRKRAQAVGRRRKVGGAAAQDVFQRQLSTGSSSSNSNQQRFPSAPIQPEEGPQPQPKPQLKIKIKQEQLVATRKSSRTATAIVTAATASSHQQQQLRQTTCRKMANKLEDRMGELVKPKIKIKKEVIEEQKVKELEDLEEILDKELDEEVDSSCSSGSDEDYIAGSQRRITAAPRKSTDTREQRAARRLSRLTINRSAGELELTEVKTSPSKSRTKIQKPSSPTKNKVKQTKAVPPAIDLFFDCSKSERLREMQYTFESLPSGELWNRVFLRQDAGEENYYTYYGSTNYRKLPYEMGPIPMAKTLPAHSCALCREASEVKQDKGEQIKLEDQKPAPKKEVKKEEEVQSSSSSATYKNKKLHLLQRYQQEQEQLQQLEGNSLATAGAKCDSKASTPELLEREFASGSMGDRVQLIERVRSTSSSSCSNSQRSGITCRNKQLARIAELPPRKSPREHASTLALVSCIIRQRQDSQSKTNSEAEEPPPPVAAPKLKTPIKQEPVAPSSPRTTRSQAATPVEELRFATEISETVKRMRRGQNKYDHSPPAPVPTPATSSPVRSRRLTPAARNQSQIYSRRLEFATSQRESSASALLGKRKRRVNPSVAGTVRPTTQNLPGTGAYRGVRKLPSKKGLLEYEMETCALKALDQARQYCNPGFVAWQLDKYLELAGKEYDIEFDQISPEVESEGREERLVNTPQTPPPTDCFTSEFDLCDLIMGSAGSGDDDEDVSRGNPPGSGRRMSNLNLYASYYRKRKSLKSNRTGWPKAQRRRNAGGLGGSRALPDERINFQKMGLAELHPIKQEPMETEEEQTTTTTTTTTTSATRGNLLSKDDEDDEGGGNSPSGGSPADDKQNSREDAVMTPPATDVDEQAEPQADEMESLPDEDETMADSVDQQQDVEAEIEATDADVEEEEEEEDEDEDVFEDAYEEQDMGIQKTEPHEKRARIPSISVTTPPEDSSQGKKLLLTLHNGQRLQATSTPSTGQVQQHQRRTPQLNGSLGSCISPSEKLGDNSDIFTVSSDGLDTDLDLSNTQAGDSHEHCPHQTTPKRKFDISKYAPPNSGKAASSCAAEAATAAVKSLAISQFLKKEVRVTCRRLRAPFRRFRYRR

SEQ ID NO: 28663 - DNA, 11530 bp, DROSOPHILA
tcagctgaagtcgcaactgccgctgactttcgtcaatgctcaaaagacatcgccaccagaggcaggcgagagcgccgacaagcaaaaggaggatcaaaagaaagtacgaagcgccctggagcgaattgttaagctggccgacaaggtgatccaggagaccgattccgaggcactgctctcctactacggtctgaagaacgacactcgtgccgatgcagccaagataaagacgtatgttgtttaattgggttaggcattccagtcagaaatgaattcttttcttctttagcaacatggacaaacagaaaaacactctcattgaggcgctaagcaagaagggcattgctgtggcaaagctggctgtattagacgactgtatcaaggatagcctggctgagatcaacgagctgtataccgagattatcaagttcgtggacgccaacgactccaaggccatccagttcgctctgtggcacgcctatgcccatggccactacggtcgcatgtacaagtatgtggttaagctaatcgaggagaagcgaacccgcgatcacttcgtggagctggccgccatcaacggcgccctgggtcacgagcacatccgtactgtcatcaaccgtatgatgatcactgcctttcccagcagcttccgtttgttctgagcactttccgacagaatacgcaacaaatattcacgcttcgaagcgatcattgttttgtataactaatgtaatccatatgtatatgaataaatgctattaactgaaattcaatattgttagtcatttcattaaaactaaattattaaatttaactaagattaatgatcgattgattttccggtaagaaaaaaggaaatgagaattgaacaattttattaaggagtgaattttaaaatcccgccaaaccgttacgatgttgaacatagcattttccagcactggtgcctggtaattgagccgactccgcgtgacggtcatacttattgcagcaaaaaaacaaaaaacaatgcagacgcacacgagagtgtaaaatgggtaagtttgacagaaaaagagctgtttaaaactggaaaattgtcttattgtgcggctaataatatgaactcgtgggtgacatgtgaaaagtgcaagaataacgacttccaactgcagtttcctgctacgtagttgcgatgaggcttccgcctgcgtgtgcaagtgtgtgtgtgcgtgtatgtattggccgatcgattttattttgcatattcaaggacagcgaagtcctgcgggaaagtgcggccgggattagaggaaacgggaatcggggcggcgccggaaactagagcgagctcccgttcccaagccgaatgactcagtaatcgcccatgaaatccccggaacgatatcagcttacaatctgtgtacatgcatttgttgcttaagttccaccccgcatcccagtcccgctttcactcccactccaacctaccccttgcccacccactgtgtcaactccggagaggacaaacaatggccccttgcagccggatgacaaatgcgggtgcagcgacatcaagaaagaaccttcgaatttggtgacgcgactatcagatactcttactttcttcgtttgcctatgaagttcattatcatttttgtgtcattaaagcgatttataattagatcaatcagactaattcaacgtattgtgacttataaatcagtataacctatgaaagtttttttaaccacccattaatttctggttaggattcaattgaagtggcgcgtctaattagatagacctaatagcacgaaagttgttttctttaatcattaaacttccgaaaacctcaccttcaagaggaggaattggatgagggttgtatacattttatgagagagtgtagggtataaaataaggcaatcggaattctgtgtcaatgtgctcacgtactcctgtgtgagatgatggtggggagggtgcggggacggtggcagaacttttgggtattcaggagatgtgtgtgttttattttatcatattcaaaaaaccatctgcgttggcggatcgatcgttaaagaagttatttattgcatagggtattccctctactcgctcttcacttcaaagataaggtcccccgagatttggtcttgtgcggtcgcttatatagatctgtataatatatacccacgatcttaatgtgtttatttttgtacattcccccgttccagagtatccacaaattgatttatacgaattcctcactgagtccgaactgcagcagtactacaatgccgtcaagtgagtgacccaaaaagcggaagcacttcccccctgtcttcaaccgaactaactcattatactttttactccccgcagaaacgaattgaaaataacgaacgcggcccaatttaagtatgcagcggacgaggatttgcgtttcatcggactctcgcgcccggaaatccggaggctgcgtaagttctacgagaagcattttccccacagctacctcagcaagatcaagcgtctgctgcaggcgcctggcactatggttaagcgggaagaggcgcccggcggcggaagtcaggtggcgctggatggcagtagtgcctctgcatgctcctctctggccgccaagaacggagccagttctccgagcaaggtgcccaacaacaagcacattataccggcggactccattagtgtaaacaaacagttgggaaccggcgaatttgggatcgtccaacagggagtctggtccaatggcaacgaacgggtgagttcagatcagttttgaccaacttcaaaattgttatcgttcatctttggcagatccaagtggctattaagtgcctgtgccgagagcgcatgcagtcaaatcccatggagttccttaaggaagcggccatcatgcattccatcgagcacgagaatatcgtgcgcctatatggcgttgtcctggccactgactcgctcatgctggtcactgagctcgcccatctgagatcactgttggaatgtctcaaggattcgggactgcgagtcagtttcctcaccatacccacgctctgtgagttcgccctacagatctgcaatggaatgcgctatttggaacagaagcgcctcatccacagagaccttgcggcgcgaaatattttagtgttcagcaaggacaaggtcaagatctccgactttggcctgtcgcgggcactgggcgtgggcaaggactactacaagaccaatttcaacgtgaatttaaagctgccgatcgcatggtgtgcgcccgagtgtatcaattatctgcgctttaccaacgcctcagatgtgtgggcctttggagtttgcctgtgggaaatgttctcctacggctttcagccctgggcggcacttaccggcttgcagatactcgaggccattgatgcacccaactaccagcggcttgaacagcccgactgctgtcccagcgagtattatacattaatgatgaagtgctggcaggatgacgctgccaagcgaccgcgcttcggtgaaatctatgaccaactgcccgatatgaagccagagcagcttaaagctgtagtgaattgcacagaacccaaaaaggaccatctactttatcgccagggcgatattattagcgttctagaccgcaatacgggcacacccttctggaaaggagtgcttagcactggcaaaacaggctacttcaacccctccaacactgtggcattcctcgaaggtctgcccagctccactcgtgattcattcagccgggtgagtgaccacagaatcagcaaacgcaagctgcgcactgagatgatatcgaagccacagaacgacttcaagcacaccggccacgtaggtattgacggagcaacatttggagacatcgcattcctgggaagttcgcagaatgtgagtcctttagtccactaatattactaatattgctaatatgtaattgcttattatttgtttcagtacaatcacgtacccaaacagatagtgacgccctataaaccctcggaggacattgaacaaacacctctcctactgccgcccacgcccactagtcctgactctcttcagactgccagcgggtatttcccagagggtgccaacagcggaggcgccatgggcacctccatgaaccccaccttcattccatccgctgaacacacgcccaagctgatagctaccaatggccagagttcattcgactttgccagcgggtctacaaatccgttttttcctaacagaggagacgatgaactggagtttggcttgcacaactatggtgcggatgggaaaagtgtccattcggagacgggctggcgccccacctctcgaagtattgtagatgatcctcatgaataccacgagatatcagatgatgaaatagcggctgacaagctggactttgggccctcgctgctggacgagattaactcgatgtttggatcgataagcgctgctacaggcagtcatcccaagtcacccggatttgatcatgtgaacaataaaaatgagattacggaaatgtccgccaaattgggtcaaaaaagtggtgacaccaatggtaataaacatggccatggactgctgcccacgctctcgaaaaagaaatcgtcgggaactgtgaaacctatttctgtgaaggatgaaaagattctcaaccatgccatcgagatagccaacgaaattagtgctaggtaagttggacaccttaagtatttgttaaataagctgtaattaaaatgtttttttgttttaggtcgatgattgatctggtctctgatcagacacctgtcatccacagtcctaagcgcaaatttagttttaggtttccgcacttgagtaataatggaagcggcgacaagtctggcggattaggaaccagcggctctgcccacacgcccacccatggcaatgcttcgccttttcccaagaaaaagaatttcaccgaggaactgcagagcattccggatatacaggtgagccctttaaagagtgcaatcagtttagttacccagtactgctatgccaccgatctccggttctaaaatggattctaatccttgagttttgtctatactttgctctttctccttcacatacatcgttgccctttcatttcccccttttgcgtttgcgtttggcattttgttttggttgtttttctcgttttgctcctccattgaatcgagcagcgtttccgctcgctgagcgaaatcaaaaacagcaccgatctacgtgtacccatctttgacaaggagagctccgattttctatttcaaaagtcgcgcgagatccttagcaggccattgaatctggaacgtgagtgcggggatgaacagccgccgaagagtattgacgacaatatcatggacattgaaaacacactgaaagcgctcaacttggactttatgcacacctacacagagttagataaaagcgactccaacgacacgatcctcaacgaccagctgccgcacatggccagtctggacgacgggatcagcagtgctaccggaagcctaaagtcagcggtgtacagctacagcaacggtgtgcaaaccatgttcgattttaatgcggcaaccagtcacctggacaagcacctccagtacatgcataaccaggcccagctaagcgccgctgcccccgtcgatcccaagcctatggatgacaaacggtcgagcactccagacacgggattcgcatcgcgcgacactaacatctcgttgtctcgtcgtagcagtcaaaagtccagctatagtcctcaggaaagttttcattttcctttgaagggcgagcccctgtttagcgcaccaccagtggttatgtcaggaggatatgccagcctcaaggatgagctcggttacgagagattcggaaacggagccaccaagcagatgctggccagcgcctcgcccattaagtccggagtgggcttgaatgctagcagtggctctgtttatatgggatccaagggctaccgccagcgttcaacatcattcaatgagagcttccatcccatttcaccggttctctctgaaccgccccagcgggagaggggcgtgatccagcgacaagtgaggttggagcaacagcagcctttgccacgacgctccgcatcgtataagccccgttcgatcagagctcgcactctaaggcgattaagttacaatccaatgaccctggactcgagttcatccagcggcgaggagcctgtcaagccaagcctggcccgttccgagtgcgacatccgtgccagagtggcggccagctcgaattcgtcgttgggcagacggcgccgggcgggaatgaatcgtcaggtgcagtccgcatgccacgacgaacgtgaggttatcatatctcctcgacaaatgtacggatccaattcgagcatcaaatcggcgccgcactataatattggagggcaaagacgcagctttcacagaggaggacctggtgttatgggtggcggctatgagcagttccaatacgacgagcgcatttacgattttggaggtcgtggtccgggcaataactacaacatggcccaagcgagttatttgagctctagtcaaaagcccagttaccttttaaatggatccgaattgcccggatccgggtcgggttcgtcttcagctgcttcgtcggcagtgcaggccacctacaggccaggagcaggaacctctgtacagcgaccaatgagcggtggtgctgctctgcacgagttcgacattagtcgtctgacgggaaagagtcccacttccaccaacttcgtgggaagttcgcccgaagaactgaaacagcgccagctttctgtgggctcccttcagacgccaaataacaaggtagcgaagccccagcgacccacggaattccactggccggagaagatacatgcatcggcggtaaagcagcacgagatgcactggcgacaggtgcaccagcagcagtcgctgcccacagcatcgattatcacagcagcggttggtggagcagtttcagcccgaagatctagtgatagctcttcctcgtcgagcaccgagagcggggatgagttccagtttcggcgcgagtttgtggcgccgcgaattccgcccagtccggctccataactaaggaaaatgctgaaatacgttctcaatttactgtttggcaatgtgatgtccgattaaggcgatggcgatgaggagatggagagatgcgaattgaatacggcaagtcgtggtcacgaatggatgctccgcaaggagcttggcgatgttgtgtttgtgctactgtctgtgtgtgaggaagggagcgtagagtgttggcgtcgaagagtaaattgtagaagtatttacagcgaatagattatatattttttggatttgaattttttgaagcgagatgagagtgtgccttataggaaaacaccgaagacctctcagaacagataataatgatgtgcagatcagctgcataccttccaaacttccattacatcatctatcacatggttcatcatcaccaacggctaaactcttttgtatcaataaaagcggtgttctttttccagttcgataaagtatgtgaaaatatagtggtctgtaattagatttggacttctgaaactaattgtaaaacgccccaattcatcaaattctatctaatttgaaaaagataacaccgcgaaagttttctccgcaatttctcaaacagaaaataaattaatagccttacgtcaatataccaaacgtttcttcaacttttcactacaaactagcatatataacaaagataatggcttccaaacggaatagaaaatgttcaagaattttataaaatgaaacccaacaagagcttggttgtcgaaaacagtattgcaaggcacacgaaaaaaacacataacacctacactttttgaggggaatccaactagacagggtattacctattgccgatgagagctgagtccttagagcccacggtagttataagtcacacacagacactgaaaacaactagacagacagacagtcacccacacaaaactgttgacaatcctcacaacttgtccacatccaaagacattcgtcggagcaagaatcccgtacggattatgtgccatatcctgacgcttgcattttttatgaaaccaaagctaaagcgaaaccaaaagcaaaaaccaaaaacaaaaccaaacaagttagacgataccgaaaccaagagaagcatttacgctcactttaactagagtgtcgaaccctaagtatcttttaagattgaagatattgaagagtcaagtattggcatactaaccaaaatgaaaccgaaagcaaaactaaaataaccttcaattgaattgccgacggctgcaagggtcgaacgtttttgataacctcactaagaatatattatatgaattaaacttactaaaagattttcgcattctatgcatttatgaataacattaaaatgagaatattatatacagattatatatacacctacctaaatctaaatcaacctaattatatgtatacaaatatttagtacgaaaatcgtaatgtaagcattgcgaaacatgatattctaaactatgcgtttgaagcgtttcaacccagagaacattaaactaaaattaaaaaccaaaatttactcgagtattatacaagaaaccccaaaagtaaacttaactacatttaactaagcgacaactatttaaaaaacaaaagagtttgaattctaagaaccaaacaagttaattggtaatcaaaaaacgaaattgttgtgcatatttaaagggattcaataaaaacaaaactaattctgaatttcaatatttctggcgttgggtcttgcgattgcttaggatacatttattccccctatgctttagttattattcttttgtatccctacattatcattttgtacaatttcatttccattcactttattcccaacccgcccaagcagtcgctgatcggcaaggagggactggaggcctacaacagcctgatcgagcgcaaggccctgctggacattggtcccagtccggcggccaccttgctccgccacctggacaccgacgagttcgatcttcaaagccttcaccagtcacagcgcccaatgacattgcccactcggggtgccacccagcgggtgcgcaaggctgaactggccgccggcctgagtcggcacaatgacgagaactcgaattcgctggaggcttgcgagagtcccagctacatgacccacggcagctacaagtttcccgaggcacagccgacagaacagcttccggagccggagtcgccgaatcccatacccttgccgccgcgcgagggcaaaaagcaggtgaagaccagcaccaagcggcatgtgcgcaagtatccgttgataatcccggccaacggtctgcaacgcaccctcagcaagctggcggactttggtgacgaggctgccaaatcaccggagatctccacatcttctcagccacagccaggacgcgccatcgaagtagtggccgctgtccggccgagtggcatgcgacgtccatcgcgaccctcggagcgggaatacgagaacatgccgacagtgggtaaagaatccgcacacacctaccagaacttggataagctgacacctgcggatgctgccggattaacggatacagcttcgttgcagttcgagtccatcatggaagctgacaccagtaaggagggcattctgcagtcgccggatgtaaccgacggattctacaacttttccattcagaaggagcactacaacaagggcaaagacgccgagtttgaggccactcagatatccggcctgtatgtgaacgatgacgaactacgtaacctggacatcgagagcagtcggcgcacagccactccatgcagtagttgcagcgctttggaatcggagcacagccaaccagacgcgttgccgtcaacagagtctgtgtcggaagtgagtcgcttctcaagtgtggacaatgagctggctggaaatgctctattcaaaaaggttcgagcctccgtaaacatggccatgaacaggaagtccgttgccgaaaccagcttaaccagcaaccaaccaggaggagcttcggccaagcctcaaactgaagcagaatactttgcagccaccgccgcccgactggcggattccaattcggtgagctgtgaggacctgctggagttctctgacaagaagcccaagggctgcgaacgaggcgtggactcggacgaagtgcgaatcatggtaaaagtgctcggcaaagatgtgagttcactgtgcactaagaaccaaatatcatataatcaaatatttatttcacagagcactcccaatcgttgcttgggtgccctggagttcatcaactgggacgtgcacaagtctattaagctcatcaagttgcagaacctggttagcgaggcaaatctcagcctggaagcctcctttgaagcgctgcagcagcacgaatgggatctgcacacaacggcccacaaactaaatggccttaaactttaaatactcctttaaggcccccaattctggatcgccatgatttggtttcaacgaccgccgttgccttaacctcataactatcgtttctaatttgtaggctaagcatgggataggcttaagtaatttggaactaacgtaatcactgctcgccattggctcccttcttcattcggatcgatagaatctcagcatgtacttattcacgcatgcttggtctgcatgcaagtaaccagcatcaaaatacacatttatgcacatatgtggacattttcaataaattataaacatttaatatacggccatcagttagtttcatgttaaattatttaacgatttatttaaactttatactactacataatttacacatattttacacaaacaaacgggtacgcaacttaacgctaacgaacgaacacagaacacacaacgtgaaactaaactatcagaatgagtttgggctgacgctatttcctcctgctgcgcttgccgtccgtgctcatggacaaagccactgcccgcgtcacgcgcttcggcgtggacacttgcagctggccgccactgaggttcatctcgagagacattcgcttacgggtcatgactttggaattcatccgctgtgcgcgcgcctcgtttcgcgtggtcacctttggggtgctggagctggggcgggatcgtattagaggtatcgtctttttgagcggctttttaggcggcgttgattctggtttagcgttggactctgactctgtatcggagtccagctcaataacaatcacaggaggtatttggttctccttgaccgatgaggtgctgtctgtgggactgttcgtgtttttggtcatctgctgtcgccgggtactcctgttgtctaggcgttgctgcttccgccgcggcgaaacgcggggcgaagagagagccgttgaatctcttgaccgcagtgatcgggagttggaatttgaaggacttctcctcagcactcgtttgcgtccgtttcttagag

SEQ ID NO: 28664 - DNA, 4104 bp, DROSOPHILA
aaaaaacaatgcagacgcacacgagagtgtaaaatggagtatccacaaattgatttatacgaattcctcactgagtccgaactgcagcagtactacaatgccgtcaaaaacgaattgaaaataacgaacgcggcccaatttaagtatgcagcggacgaggatttgcgtttcatcggactctcgcgcccggaaatccggaggctgcgtaagttctacgagaagcattttccccacagctacctcagcaagatcaagcgtctgctgcaggcgcctggcactatggttaagcgggaagaggcgcccggcggcggaagtcaggtggcgctggatggcagtagtgcctctgcatgctcctctctggccgccaagaacggagccagttctccgagcaaggtgcccaacaacaagcacattataccggcggactccattagtgtaaacaaacagttgggaaccggcgaatttgggatcgtccaacagggagtctggtccaatggcaacgaacggatccaagtggctattaagtgcctgtgccgagagcgcatgcagtcaaatcccatggagttccttaaggaagcggccatcatgcattccatcgagcacgagaatatcgtgcgcctatatggcgttgtcctggccactgactcgctcatgctggtcactgagctcgcccatctgagatcactgttggaatgtctcaaggattcgggactgcgagtcagtttcctcaccatacccacgctctgtgagttcgccctacagatctgcaatggaatgcgctatttggaacagaagcgcctcatccacagagaccttgcggcgcgaaatattttagtgttcagcaaggacaaggtcaagatctccgactttggcctgtcgcgggcactgggcgtgggcaaggactactacaagaccaatttcaacgtgaatttaaagctgccgatcgcatggtgtgcgcccgagtgtatcaattatctgcgctttaccaacgcctcagatgtgtgggcctttggagtttgcctgtgggaaatgttctcctacggctttcagccctgggcggcacttaccggcttgcagatactcgaggccattgatgcacccaactaccagcggcttgaacagcccgactgctgtcccagcgagtattatacattaatgatgaagtgctggcaggatgacgctgccaagcgaccgcgcttcggtgaaatctatgaccaactgcccgatatgaagccagagcagcttaaagctgtagtgaattgcacagaacccaaaaaggaccatctactttatcgccagggcgatattattagcgttctagaccgcaatacgggcacacccttctggaaaggagtgcttagcactggcaaaacaggctacttcaacccctccaacactgtggcattcctcgaaggtctgcccagctccactcgtgattcattcagccgggtgagtgaccacagaatcagcaaacgcaagctgcgcactgagatgatatcgaagccacagaacgacttcaagcacaccggccacgtaggtattgacggagcaacatttggagacatcgcattcctgggaagttcgcagaattacaatcacgtacccaaacagatagtgacgccctataaaccctcggaggacattgaacaaacacctctcctactgccgcccacgcccactagtcctgactctcttcagactgccagcgggtatttcccagagggtgccaacagcggaggcgccatgggcacctccatgaaccccaccttcattccatccgctgaacacacgcccaagctgatagctaccaatggccagagttcattcgactttgccagcgggtctacaaatccgttttttcctaacagaggagacgatgaactggagtttggcttgcacaactatggtgcggatgggaaaagtgtccattcggagacgggctggcgccccacctctcgaagtattgtagatgatcctcatgaataccacgagatatcagatgatgaaatagcggctgacaagctggactttgggccctcgctgctggacgagattaactcgatgtttggatcgataagcgctgctacaggcagtcatcccaagtcacccggatttgatcatgtgaacaataaaaatgagattacggaaatgtccgccaaattgggtcaaaaaagtggtgacaccaatggtaataaacatggccatggactgctgcccacgctctcgaaaaagaaatcgtcgggaactgtgaaacctatttctgtgaaggatgaaaagattctcaaccatgccatcgagatagccaacgaaattagtgctaggtcgatgattgatctggtctctgatcagacacctgtcatccacagtcctaagcgcaaatttagttttaggtttccgcacttgagtaataatggaagcggcgacaagtctggcggattaggaaccagcggctctgcccacacgcccacccatggcaatgcttcgccttttcccaagaaaaagaatttcaccgaggaactgcagagcattccggatatacagtcgctgatcggcaaggagggactggaggcctacaacagcctgatcgagcgcaaggccctgctggacattggtcccagtccggcggccaccttgctccgccacctggacaccgacgagttcgatcttcaaagccttcaccagtcacagcgcccaatgacattgcccactcggggtgccacccagcgggtgcgcaaggctgaactggccgccggcctgagtcggcacaatgacgagaactcgaattcgctggaggcttgcgagagtcccagctacatgacccacggcagctacaagtttcccgaggcacagccgacagaacagcttccggagccggagtcgccgaatcccatacccttgccgccgcgcgagggcaaaaagcaggtgaagaccagcaccaagcggcatgtgcgcaagtatccgttgataatcccggccaacggtctgcaacgcaccctcagcaagctggcggactttggtgacgaggctgccaaatcaccggagatctccacatcttctcagccacagccaggacgcgccatcgaagtagtggccgctgtccggccgagtggcatgcgacgtccatcgcgaccctcggagcgggaatacgagaacatgccgacagtgggtaaagaatccgcacacacctaccagaacttggataagctgacacctgcggatgctgccggattaacggatacagcttcgttgcagttcgagtccatcatggaagctgacaccagtaaggagggcattctgcagtcgccggatgtaaccgacggattctacaacttttccattcagaaggagcactacaacaagggcaaagacgccgagtttgaggccactcagatatccggcctgtatgtgaacgatgacgaactacgtaacctggacatcgagagcagtcggcgcacagccactccatgcagtagttgcagcgctttggaatcggagcacagccaaccagacgcgttgccgtcaacagagtctgtgtcggaagtgagtcgcttctcaagtgtggacaatgagctggctggaaatgctctattcaaaaaggttcgagcctccgtaaacatggccatgaacaggaagtccgttgccgaaaccagcttaaccagcaaccaaccaggaggagcttcggccaagcctcaaactgaagcagaatactttgcagccaccgccgcccgactggcggattccaattcggtgagctgtgaggacctgctggagttctctgacaagaagcccaagggctgcgaacgaggcgtggactcggacgaagtgcgaatcatggtaaaagtgctcggcaaagatgtgagttcactgtgcactaagaaccaaatatcatataatcaaatatttatttcacagagcactcccaatcgttgcttgggtgccctggagttcatcaactgggacgtgcacaagtctattaagctcatcaagttgcagaacctggttagcgaggcaaatctcagcctggaagcctcctttgaagcgctgcagcagcacgaatgggatctgcacacaacggcccacaaactaaatggccttaaactttaa

SEQ ID NO: 28665 - protein, 1356 aa, DROSOPHILA
MEYPQIDLYEFLTESELQQYYNAVKNELKITNAAQFKYAADEDLRFIGLSRPEIRRLRKFYEKHFPHSYLSKIKRLLQAPGTMVKREEAPGGGSQVALDGSSASACSSLAAKNGASSPSKVPNNKHIIPADSISVNKQLGTGEFGIVQQGVWSNGNERIQVAIKCLCRERMQSNPMEFLKEAAIMHSIEHENIVRLYGVVLATDSLMLVTELAHLRSLLECLKDSGLRVSFLTIPTLCEFALQICNGMRYLEQKRLIHRDLAARNILVFSKDKVKISDFGLSRALGVGKDYYKTNFNVNLKLPIAWCAPECINYLRFTNASDVWAFGVCLWEMFSYGFQPWAALTGLQILEAIDAPNYQRLEQPDCCPSEYYTLMMKCWQDDAAKRPRFGEIYDQLPDMKPEQLKAVVNCTEPKKDHLLYRQGDIISVLDRNTGTPFWKGVLSTGKTGYFNPSNTVAFLEGLPSSTRDSFSRVSDHRISKRKLRTEMISKPQNDFKHTGHVGIDGATFGDIAFLGSSQNYNHVPKQIVTPYKPSEDIEQTPLLLPPTPTSPDSLQTASGYFPEGANSGGAMGTSMNPTFIPSAEHTPKLIATNGQSSFDFASGSTNPFFPNRGDDELEFGLHNYGADGKSVHSETGWRPTSRSIVDDPHEYHEISDDEIAADKLDFGPSLLDEINSMFGSISAATGSHPKSPGFDHVNNKNEITEMSAKLGQKSGDTNGNKHGHGLLPTLSKKKSSGTVKPISVKDEKILNHAIEIANEISARSMIDLVSDQTPVIHSPKRKFSFRFPHLSNNGSGDKSGGLGTSGSAHTPTHGNASPFPKKKNFTEELQSIPDIQSLIGKEGLEAYNSLIERKALLDIGPSPAATLLRHLDTDEFDLQSLHQSQRPMTLPTRGATQRVRKAELAAGLSRHNDENSNSLEACESPSYMTHGSYKFPEAQPTEQLPEPESPNPIPLPPREGKKQVKTSTKRHVRKYPLIIPANGLQRTLSKLADFGDEAAKSPEISTSSQPQPGRAIEVVAAVRPSGMRRPSRPSEREYENMPTVGKESAHTYQNLDKLTPADAAGLTDTASLQFESIMEADTSKEGILQSPDVTDGFYNFSIQKEHYNKGKDAEFEATQISGLYVNDDELRNLDIESSRRTATPCSSCSALESEHSQPDALPSTESVSEVSRFSSVDNELAGNALFKKVRASVNMAMNRKSVAETSLTSNQPGGASAKPQTEAEYFAATAARLADSNSVSCEDLLEFSDKKPKGCERGVDSDEVRIMVKVLGKDVSSLCTKNQISYNQIFISQSTPNRCLGALEFINWDVHKSIKLIKLQNLVSEANLSLEASFEALQQHEWDLHTTAHKLNGLKL

SEQ ID NO: 28666 - DNA, 7539 bp, DROSOPHILA
ttggtaagcttcaagtaattactggtatttttccttctcttcccgaggactcaaccttttcgccgcctcgttttcatttcattttcatttgatttccagtaatttttgggcgaggtgcccgcacaatacccacttggcttatgggctccaaggagccggaataatgacccaaagtcccagggtgtgtttgttgtctttgcggttaagtaggagtgggcatgttctatgaagtagatgaatgttgatgaggttccctatctaactcccgctccacggccaattgctgacccagtatttcgctgggaattagtggaagcttcgcttccataaatatttgattgattcaagctgctgctggcaggtgttttgattgatactcctatttgcttatttatttatagtcacggagtgttgttgacaagcaggtgtccactaattagtttctgcatgtagttagtagactatttctgtcaacttatatataattttaatgagctttaagatgaaaaaagtttttttcttatcacagtgccatttaattctgatgacagtttccagtcagatgattaactggtctatcttttatcttaactttatttgcccctaatctcaagagctcaagtagcagacctttagaccacagattgcataatacaaggtcgagtcggaaagaaaccgagctataaatctcgctaatttaaaaaagttaggtaaataattaacacacatctataaatttaaatttctgtttatggtttgcttccttgctgagctgctcggttgatgtctcggcgacatagatcctcgaatgggttcacttctctgctttcgcacaaaattggttcagttgcctgcttaaaagcttgggatcagttggtgtctctgctaaagtatcgttatgaagaatgcccataggatctaaaactcaggtcgactttttagctccagaaagcttcgagcagaaaattgaaataaattttcagttgtctctagctgatcgccgcgatctgatcgtcgttacacttcatttgatagtaaaatcagtgaatttaatttaggattttcgtgcggttgtttgtgttagtgcgactgttaacaaaaggagccatataaacaaaagcatagagaaattaaaacaaaaaaaaaactctcttatatttaaagtgctttgtttatgcccaacttgtgtgtgccacttttctaaaaatttttgggtgccttttacacgctacttgtggatcggccactttctttaactaaaaagtactttttcgcgttgttaggcgagcatcaaaatttgcatctacagaaacccgccttgattaaattcgatgtgaacctgcggccccttaaatgagcacatgaatagataacgaaccgaatccgtcactgttttgagatcgctttttggcctcgtgtgattgacaaattaacgcattcagctcgattagcatctgtatccaaactggaaaagttctattagcgattagcgatcccatagccagacttcggttctcaattgtctctcgattgtggcattttacagaaccgatatagaagcacaattacgcggaaaacgacctttagttgggccatcccagatatattgtatatacaccatatacacctatatagagccgatccgtgacgcaccgcccagcgattctacgtttagtgggtggcggtgacagcataagcaagaaaaacccaataaatttcggcccaaatagcaacacttgtctaaatgcgagatcgtcacttggccaaaatgccgcgtggaggaacgacaacatcgtaagtcccaaaaatcgaactaagaaaaccaccccccagggccagactttagacctaatataagcaaattgcgtgtcgttctcgagtgtatttatttaatttgaacaattgccgcttgtggagaaaagtacttcgatcgtacaagggtacatacatatgttaagtgatagtgtcaggttgttgtagcgcgaattcgattgtatctgcaagatacaatttcaagcacacatgcacatgtacatatgtatgtatgtatgtgtggtggttgagctcggattattggatcgtacccgcactccctttgagagatcgcttcaattaaacaagccgcgacatcgacgtcgtctctaaacaaatgccagacattgtactataaaataaccccccgcagcatcgaatcgtatcagatcggtttggatcagaccatgcatgccgtacgagtacttcgtcataatcaacccgcaggatacgcagaagtgtgttggagtgttcgagtgattttcagccatgcgtgcgacagcaaatgttttaatttgccgcgatccgcagacttttaattgtgcattccgcgtcagctcgttacttgttacatctgatggtttctttaattgaattgtgccctggcttcctgctaccaattctctgccactaggttttcccatatattcatcttttcagcggtagcattgctccacatttattactgccacaagtaaatcaagctataggcataattagcctggttatatagaggcctctggtttgccctatcatctgattagtacacttttttgtagatccactctcagttggacatcccgcagtcatggtcatcataatctccatcacatgaccgagataagatgttctctaattgtatcccactgtagtttctcgagaagagtttgcttatctgctgataagaaatgtaaaaggcttagacttgactaaacgcattttatctgtaaaatataatattattttaaacttgatgctcgcggaaagcaaatccaatttgcatatcttagatagaggagcccgattatatctcatagctgaaaagattttggtttagagatttttttacgcattggccaaagacatttttgggcagaattaaatcccataaattaagacatcaagttttactgttttccattaggcttttccaactacttgcattttataaaattaagaaaatgtactgtatgccaagtcataaataatccctgaatcaatcgtggttttctcgccttatatttgcacaaataatgcattaatttgcatttgctaaatgactgcaggaattggctgattacgctgcaaagccgatgcgctttctctgtttttcctacctcccatttgcagtgggtgccacctccaagtcaatagcctctcatccacgatgacccattagccatgtgtggctgcacctaggccaaaaacccggctcagagagtctggctcagactgaggctgaaactaaggttcaggttcagattcgaatacacaaaacaggtggcggccaagaaacgagttttccataaaacgaaaagccttaagcgaaaatttctcagcgcagcgggcaaatgaaaagtgaaagagatacaaatgtgcagctaaagatacagatacattcgcagacacaccgcacactggtgtgggcttgttttccaacaatctgcggcaagtgaaatgtgtgttaaagcaaacagccactgcacatccccttccccccttccacatcctcacccccttgcaatgtgttgatagctaaatgcctgccccaaccgcactaccaatcccaaacccataaccatacccataccaattcccaagcccaaacccagacgcagctgcagccacatcgacaaccacactcacgtccactgcggcggaggagtgcaacgtgtggcagacactcgttcattgacaccgccatcggatgcacagcaagaaacatgatcaatgatcgtcattaatctattttaaagtcacaaacattcgcctatgaacaaacagaactaatttcttatcttcaattaaaactatctcgatctaatcagtacattaataattcaatcatctttgatcttaaagtgtggaagaatatttgttagcaagctattttaacgctatggttatattgattgtaatcccttgaattggtttttaattataattgaatagtaaagcattgtatcgtattaatttttttattttacttatgaatataaatagcttaacaattcaatatatctaatgcatgacaactcatgtaactgacagcacatataaatcgcctttttatttttatttttgaaaatcttttaagaaaatgacatcaagaaatcaataagttaagtacttaagtactcaagtacaatataaactaagtttagaaggaaaacatttgaacccgaattagaatatcatataatttcctttcagactcaggttataaatatatatttcgtacaagtcccagttgagtccccacaatttttccgagtgcctccgatctttgggcactcagtgccacgccgatctcgctccgccgtgtccgatgcggcaagtccgttgcagttgcacttcgcggatagtgtcgcatgtaaattggagcagcatcgacggtgccccatggcattatcttcacaatgcagtgatgcaagtgtcgtgaaagcgagagcgatggctggtaattcgattcgcttttgctttcattatcacaacagggggctcgcactattaatttaaataatcgctttgtttacactcgattgttgcgccaatggatttcggaatttcgaacgaaaccaaggagctgcacttggcgatgattaggcggttggttggcggccagcaatgcgtctaattgcgctgagtgcacaatatgtatttctactccagtttgcctgcaggccgttaactttcgaaagatcaacagatggctttggtttggcaccccattgtgtttttctgggacttctcccactgcactgcacactgatggatgatggctcatacggatctctgtgctattcggctggatgagatcattgcgcccatcatgagccatcgaaattgtatgtcatacgatcgcacgacaagtgatgaaattgatatgacagacaggccgcaattgggtggaaacaatacacttttgactccattaccctttccccagctgtcaaaatcatgcgataggataaacttttttttcaaatcatctacaccaaatccaaactaaaaattccaggacaagtgaaccagcgcaactctacgcattgaagaaaattggatatttgctaggcaaattagataattgcgatttcgcttaagtccactgtaatcccacttgatccatctatccatctgttgtccatcaattaagccgattagcagcacattcaacccgcaattagcgtaatctcttgagaatctctggtagaatctccataattcgaaggcagaccctcggaatcatcataaattgtgttaaatgagggcaaacctacataccccagattgtagttgcacttgcgtctatcccaagaaatcagaatctgtaaatttgttgtatcctaaaaataaattatatatactgattatggtcttaaatacaaacacatcaaagtatgaaacccattgacggaccctttatagatgaattgaatcgcatgttctttcatcgacccaacttcatgaaaactcggattaaaaagtaattgtttcagtgctatttcatatgctatcatggattgtcctatgctcctatctcgttacaggcgctatgaggaggatccagataatgcctggaattgctgctcctggtgcgaatacttgctgatcgtcatcctgtccacgatcctgctggtgggcgtgctggtgctaaccctcttctgggtgatgttctaccgcgatggcttcgcctggtcggagagtcccaagcagcagttcaatctgcatcccatcctcatgattgctggcttcgtcacgctctccggattttgtaagtccatcccaattgtgcaaatgtaccaatcttaatcttatgtgatatactcgtacctcccccaattagccatcttgatctatcgtctgtgccgctgcgtgaagcaaatctatgtgaagctgatccacatgttcttccacgccgtggccattccgtgcatcgccctgggtttcatatccgtcttcgcttcccacgacgcgttgcataaggtcaacttctatagcctccactcgtggctgggcttcgtgacaatgggcatgttcgtgctccagtttgtgatcggcttcttcaggtgggtctccgcaactcggtgtcctaatccggcatattaatcaaaatcttctttagctttctggtaatgctgtgctgtgagaacaagacctacagctgccgctcggccatggtgcccatccacgccagcttgggactggccaacttctggctggccattgccacatccgtcacgggactgatcgagaaggagcgcgaaaccgtcaacgaggcgggcgtgaggtaagaatagttttaagtactacttttaggcattgatatcaatggttaattcgttcgtaatatctttacagcagtgagaacaagctggtggagcactacatcaccagtgccatcggcgtgaccctgatcttcattggcatcatcgtcaccttcgcggtgcggcgttccaatgcgcccgcctcggcgaaggtctacgtcacggagcgcatttagacggtccgtccggctcgtcagagtctccgccgccggaattggtccacggccaggagggtaagcgagtcgcagcaggtgtacccgaggattccggaactcggtgacttggactggacttggggaaacggaccggcggtgtcctttcgccaggcttagcgcacagagaccacgcttctgcaactctatccgaaccctttgtaaccttttatatgccaaattaaatccacatcatacacttagactactccatatggctataatcaaaacctttgcccactttcaatctctcagtaggtgtgtaggattaggaatctcagcagatgagcagaagaccaagcaagcaaatctaatcaaaattttgacgtgttcagccgaacttactgatgcatccaggcacttgcaagctagattagccagttttttggtactatagtagaattttgatatactcgtaagcccatgtaactagtgtatgtatgatcgtaccacgtaacgcattgaatgtacgcactcggactcaaaactgtcgcatttgatgtttttttgtaatcgtgcaagtatttgtattttcataatgcgctaagcaacctaagctgtaaaccaattttacaaacaaataaatacttttgccctgcctgagggctctcataataatcgcaattgtttatgcactttttaaatatttaaaaaacggtgagaactcggaaaataaacaaatcatattcccttgaaagggaaattaaacagaagtgatggggattgtcttattttctttgtgtgataatagtcgaggttatcagatggacttcagatatatatgtctaataggcattgtctatattcctacttcaaaactacttctactttcaaaatcatttgaaccatgtcatatcacatcatatcgtattatatcatatctttattctacacagtctttgccaaagtaatatccccactaaaagtatcaagatcgttattttgatagtccccaaagtttgtccacg

SEQ ID NO: 28667 - DNA, 837 bp, DROSOPHILA
ccgcgatctgatcgtcgttacacttcatttgatagtaaaatcagtgaatttaatttaggattttcgtgcggttgtttgtgcgctatgaggaggatccagataatgcctggaattgctgctcctggtgcgaatacttgctgatcgtcatcctgtccacgatcctgctggtgggcgtgctggtgctaaccctcttctgggtgatgttctaccgcgatggcttcgcctggtcggagagtcccaagcagcagttcaatctgcatcccatcctcatgattgctggcttcgtcacgctctccggattttccatcttgatctatcgtctgtgccgctgcgtgaagcaaatctatgtgaagctgatccacatgttcttccacgccgtggccattccgtgcatcgccctgggtttcatatccgtcttcgcttcccacgacgcgttgcataaggtcaacttctatagcctccactcgtggctgggcttcgtgacaatgggcatgttcgtgctccagtttgtgatcggcttcttcagctttctggtaatgctgtgctgtgagaacaagacctacagctgccgctcggccatggtgcccatccacgccagcttgggactggccaacttctggctggccattgccacatccgtcacgggactgatcgagaaggagcgcgaaaccgtcaacgaggcgggcgtgagcagtgagaacaagctggtggagcactacatcaccagtgccatcggcgtgaccctgatcttcattggcatcatcgtcaccttcgcggtgcggcgttccaatgcgcccgcctcggcgaaggtctacgtcacggagcgcatttagacgg

SEQ ID NO: 28668 - protein, 210 aa, DROSOPHILA
MFYRDGFAWSESPKQQFNLHPILMIAGFVTLSGFSILIYRLCRCVKQIYVKLIHMFFHAVAIPCIALGFISVFASHDALHKVNFYSLHSWLGFVTMGMFVLQFVIGFFSFLVMLCCENKTYSCRSAMVPIHASLGLANFWLAIATSVTGLIEKERETVNEAGVSSENKLVEHYITSAIGVTLIFIGIIVTFAVRRSNAPASAKVYVTERI

SEQ ID NO: 28669 - DNA, 11933 bp, DROSOPHILA
tacagagatccaggatcccagccgaatctctctgactaaattattcgcacaacattttagtttatatatgatgtattagattaaagttaagagtacccaaaataccatcagttcacgctgcttggttagtcctatataatttgtagtagtcatcccacgtgcaagtcgtgatccttcgaggcggatccactgcacgagcggcatttgtacttgtacttggtagcgcttagttagccacaaaaattccatgttatcctacgaaacaatgacaataatcttaacggatatctaactttcccacataactggggtctgtgacctgcctaaatgtattgcattcgtacttgtcaattgatatttgtatgcgtttgaatgtgtattaagaatcccgtttaaaaagatcatatgtaagttcagatatacatatttgcttgatggcaattgaatatatacatgtttagctgaaaacgcacacaatatatggcatatcgttacttaatgggtcttttgaggttggaagattatacatgatatataagaataataaataaaagatgtttacttactaattttcttagagcaatcgtaattatacctttttaatcattaacatcaaaattttaaaatatgaactctatatttgcattcaatcctgttttaaatggtgtttgaataaatcaattaaattatattgatatttttaaacaaaccaggaaaattagaattgattcattggcaatcctttggggtttcaaaatcgatgtatttaattcaaacactttttcatcaatcaatttattctacatttcatgtaaataactcgttccccttctacacgtatgtgctataaactttgaaaaccgaacgtattttacacgaagccacaagacacgaagctggattatagcaccattatggcatgtcatcggttagttttcccagtgccgcatggctcagttcgttcgcagcattcgtggagttcggacgtgaatgtgttattgactcacagcgtttgtgttccgtgccggtttgtttgcggagtttccatcatccgtcagctcccttgcaggccgcttcatctccgccggaggagggatgcactccgttcgcgttcgggcagatgaattaattgtggaaaattgttaaattccagctcgttgaagcggccgcaaatccaattaagcgcatacaccattcgcgcggagagtttgtgcataatagagtaattaagttttcattgaaaagggtttttgacaccgcaccgtcacacgccacacgaacttggggtaggttcacattttgccgcaaagacagcaaatcgagagtggcaagaacaacaggagcatcgtttccgtttccgctttgctagctggtttctcatataagagtgcataaagcacagatttcgccagacccaaatcggattattaagtccctgccacaaaaggatgtctgttgtgggaagactaggcatcccaggcagcctccatcccaacccattccgtctcccaggccccgatttctgcatcccccccccttccccttgacaatctctctgcacaagtcatagtctgcatatccgggcctcgaaatatttggagcccttcttttgtgagtggatttttggccgctcgctttgtttgtttgcttcatttggcgcagctatgggcagcgtcagcagctgcgggattgcataatgtccagcttcctctccagaaagtagcccacagcgattggggattggtaagtgggtctgccctctggaaacaacaagatctcaaatctaataggaaattcttgattcttttcttgggggacatgtacttaggaggctagaaaagcttttaaagcgccagctaattagttcatattaattaaagaacaaatcacacaaagctattatagaatttcatggtgtgtgagaactcaataattaacaaagaaatcttatttatttattaataataatggaagcaactgctccatatgctacgctaccaaccattaatggttacacaaaatattactttgtatttatattactttgtatttttttagctagaaatacttacaatacatacttgttacaaagcttaaataatcttccgaatattactcaaagtaatcaaattttataattttgagaactttactttgctccccaaaagagtgaatcaaatgactgagggcgagagcctttggtgattccaatcaaaaccgaactgcatgcacccgtaacccgaacatgtctctctctcatttactaataatacccttgagttgggacctgtataatcagcataatccaggcagagggaatgtcaatccccatcgtccagttccgtgggaactggacacatgtgtgagtgtgtggatagggacagtgggctatgcaaacgattcgcaggaatttcggaatgaaggggcggactgcggttgccggttgactggttgactgggcaaaggaagttggcttcggcatcagcaaatgccaggcattgatgtgtccatcaagtgtctctgcatcgagttcaacgaacccccaagaactagaacgtccaataataattgattggtgggaaagcaggaaaagggcgccgaacgaaagaacccacacacactctaagcaggagtatctggagtatctggagtatctggagtatcttcgacatgacgggcgacgtgaatcggaaattggcgctctctgcagaacgcattcggacgtgtgatgagccaatttcacacatggcagaggcggcggaaaaaatacacgaaatccgcaagacaaaaaaaaaaaaacacaaacagagagcgagccaagtgcaatgccctggacttcagttgacgctgcacttttgccaccttgtggagtcgccaaaaataaatgccaaaagccatttccacttcccgccatgaaaagcgacttccccgcttataatgcttgcttctccccattcgaaaggcccatatattgtacagaactatatatacagacttatggcggcgccgccattcatcaacagatgagagctacaccccctattattatgcagagttgcggatgtggaatcagaaactgaatctgaatcggaatcctgctgctgctctgttgttctctctattaaaatgccacatttaaatgcccagcctcataaacgtttctcttctcgcaatgcagccagtcagcggagcagaggcatcaaaattgattgctttcacatggacacgaactcggtgagtccccttccgccgatggaggaggccatggacagggtcagcgagaagtcgcccccgggaactcccaatggcatcgagatgcccccgccgccggatgaaaagtgagttgagccaaaaatagaccgtgaatctgtgtaaagtctgttgctttaaatattaaaacagctcttatgtaggaccaagtgtgatatagatggtcaaagattgcctgccacaaaaaaatcttaagaaaatttaagttaaatgttcatcagttcgaggaaagctaagtgttaaatttattatttttgtaataataggagcaagatttaaaattatagatacaataagcatttcgaatatttacgaagccttagggtttgaagaataattatatttcttatgaagatgctttattgttatgctatttacttttaaatatttttatatttcttcggttatattttaaaaagttctctaccacacgaccaattaatcccccatgcccagctaatcaacacaatttagtcaacagattccccaacacatttgtttatcaatatttaagtaaattgtgtcacttatgcatagcaaattcgaggcgggcacaagaacgtagagaccaatttccccggaggccaatttggagctcttgtctagccgacaattggccttgcccatctccgatgcgatgctcatctgccagttggaagctctaacttgggatgagagatatgtaaaacatgaaaagacttagatacccggctattcgtacgctggctttaatcgattttaatggcaccacgcggcgtatgtgtaatatttacatgaaatagtgcccgagcacgtcaggaattgccccaaagactaattaacaatgacggtgaacgggaaatgtcgacgcctacacaccctttcaggaggtcccggttatttttacgcgccaatttcctaattcacgtatctttgaaagtcgtaaattttattttaatgcgacctcgttgcaaatcacacaaaaagccggacacatccttcctgtaacccgtacaggcccacaaattcaacagttgatcgcgtgcgcccaactcacatagtaactggccgtaaacatttcgcccggaatcctccattctcccacgtcccttggccatgtccttgtccaatttctggcacgaagcttggtaagcttcaagtaattactggtatttttccttctcttcccgaggactcaaccttttcgccgcctcgttttcatttcattttcatttgatttccagtaatttttgggcgaggtgcccgcacaatacccacttggcttatgggctccaaggagccggaataatgacccaaagtcccagggtgtgtttgttgtctttgcggttaagtaggagtgggcatgttctatgaagtagatgaatgttgatgaggttccctatctaactcccgctccacggccaattgctgacccagtatttcgctgggaattagtggaagcttcgcttccataaatatttgattgattcaagctgctgctggcaggtgttttgattgatactcctatttgcttatttatttatagtcacggagtgttgttgacaagcaggtgtccactaattagtttctgcatgtagttagtagactatttctgtcaacttatatataattttaatgagctttaagatgaaaaaagtttttttcttatcacagtgccatttaattctgatgacagtttccagtcagatgattaactggtctatcttttatcttaactttatttgcccctaatctcaagagctcaagtagcagacctttagaccacagattgcataatacaaggtcgagtcggaaagaaaccgagctataaatctcgctaatttaaaaaagttaggtaaataattaacacacatctataaatttaaatttctgtttatggtttgcttccttgctgagctgctcggttgatgtctcggcgacatagatcctcgaatgggttcacttctctgctttcgcacaaaattggttcagttgcctgcttaaaagcttgggatcagttggtgtctctgctaaagtatcgttatgaagaatgcccataggatctaaaactcaggtcgactttttagctccagaaagcttcgagcagaaaattgaaataaattttcagttgtctctagctgatcgccgcgatctgatcgtcgttacacttcatttgatagtaaaatcagtgaatttaatttaggattttcgtgcggttgtttgtgttagtgcgactgttaacaaaaggagccatataaacaaaagcatagagaaattaaaacaaaaaaaaaactctcttatatttaaagtgctttgtttatgcccaacttgtgtgtgccacttttctaaaaatttttgggtgccttttacacgctacttgtggatcggccactttctttaactaaaaagtactttttcgcgttgttaggcgagcatcaaaatttgcatctacagaaacccgccttgattaaattcgatgtgaacctgcggccccttaaatgagcacatgaatagataacgaaccgaatccgtcactgttttgagatcgctttttggcctcgtgtgattgacaaattaacgcattcagctcgattagcatctgtatccaaactggaaaagttctattagcgattagcgatcccatagccagacttcggttctcaattgtctctcgattgtggcattttacagaaccgatatagaagcacaattacgcggaaaacgacctttagttgggccatcccagatatattgtatatacaccatatacacctatatagagccgatccgtgacgcaccgcccagcgattctacgtttagtgggtggcggtgacagcataagcaagaaaaacccaataaatttcggcccaaatagcaacacttgtctaaatgcgagatcgtcacttggccaaaatgccgcgtggaggaacgacaacatcgtaagtcccaaaaatcgaactaagaaaaccaccccccagggccagactttagacctaatataagcaaattgcgtgtcgttctcgagtgtatttatttaatttgaacaattgccgcttgtggagaaaagtacttcgatcgtacaagggtacatacatatgttaagtgatagtgtcaggttgttgtagcgcgaattcgattgtatctgcaagatacaatttcaagcacacatgcacatgtacatatgtatgtatgtatgtgtggtggttgagctcggattattggatcgtacccgcactccctttgagagatcgcttcaattaaacaagccgcgacatcgacgtcgtctctaaacaaatgccagacattgtactataaaataaccccccgcagcatcgaatcgtatcagatcggtttggatcagaccatgcatgccgtacgagtacttcgtcataatcaacccgcaggatacgcagaagtgtgttggagtgttcgagtgattttcagccatgcgtgcgacagcaaatgttttaatttgccgcgatccgcagacttttaattgtgcattccgcgtcagctcgttacttgttacatctgatggtttctttaattgaattgtgccctggcttcctgctaccaattctctgccactaggttttcccatatattcatcttttcagcggtagcattgctccacatttattactgccacaagtaaatcaagctataggcataattagcctggttatatagaggcctctggtttgccctatcatctgattagtacacttttttgtagatccactctcagttggacatcccgcagtcatggtcatcataatctccatcacatgaccgagataagatgttctctaattgtatcccactgtagtttctcgagaagagtttgcttatctgctgataagaaatgtaaaaggcttagacttgactaaacgcattttatctgtaaaatataatattattttaaacttgatgctcgcggaaagcaaatccaatttgcatatcttagatagaggagcccgattatatctcatagctgaaaagattttggtttagagatttttttacgcattggccaaagacatttttgggcagaattaaatcccataaattaagacatcaagttttactgttttccattaggcttttccaactacttgcattttataaaattaagaaaatgtactgtatgccaagtcataaataatccctgaatcaatcgtggttttctcgccttatatttgcacaaataatgcattaatttgcatttgctaaatgactgcaggaattggctgattacgctgcaaagccgatgcgctttctctgtttttcctacctcccatttgcagtgggtgccacctccaagtcaatagcctctcatccacgatgacccattagccatgtgtggctgcacctaggccaaaaacccggctcagagagtctggctcagactgaggctgaaactaaggttcaggttcagattcgaatacacaaaacaggtggcggccaagaaacgagttttccataaaacgaaaagccttaagcgaaaatttctcagcgcagcgggcaaatgaaaagtgaaagagatacaaatgtgcagctaaagatacagatacattcgcagacacaccgcacactggtgtgggcttgttttccaacaatctgcggcaagtgaaatgtgtgttaaagcaaacagccactgcacatccccttccccccttccacatcctcacccccttgcaatgtgttgatagctaaatgcctgccccaaccgcactaccaatcccaaacccataaccatacccataccaattcccaagcccaaacccagacgcagctgcagccacatcgacaaccacactcacgtccactgcggcggaggagtgcaacgtgtggcagacactcgttcattgacaccgccatcggatgcacagcaagaaacatgatcaatgatcgtcattaatctattttaaagtcacaaacattcgcctatgaacaaacagaactaatttcttatcttcaattaaaactatctcgatctaatcagtacattaataattcaatcatctttgatcttaaagtgtggaagaatatttgttagcaagctattttaacgctatggttatattgattgtaatcccttgaattggtttttaattataattgaatagtaaagcattgtatcgtattaatttttttattttacttatgaatataaatagcttaacaattcaatatatctaatgcatgacaactcatgtaactgacagcacatataaatcgcctttttatttttatttttgaaaatcttttaagaaaatgacatcaagaaatcaataagttaagtacttaagtactcaagtacaatataaactaagtttagaaggaaaacatttgaacccgaattagaatatcatataatttcctttcagactcaggttataaatatatatttcgtacaagtcccagttgagtccccacaatttttccgagtgcctccgatctttgggcactcagtgccacgccgatctcgctccgccgtgtccgatgcggcaagtccgttgcagttgcacttcgcggatagtgtcgcatgtaaattggagcagcatcgacggtgccccatggcattatcttcacaatgcagtgatgcaagtgtcgtgaaagcgagagcgatggctggtaattcgattcgcttttgctttcattatcacaacagggggctcgcactattaatttaaataatcgctttgtttacactcgattgttgcgccaatggatttcggaatttcgaacgaaaccaaggagctgcacttggcgatgattaggcggttggttggcggccagcaatgcgtctaattgcgctgagtgcacaatatgtatttctactccagtttgcctgcaggccgttaactttcgaaagatcaacagatggctttggtttggcaccccattgtgtttttctgggacttctcccactgcactgcacactgatggatgatggctcatacggatctctgtgctattcggctggatgagatcattgcgcccatcatgagccatcgaaattgtatgtcatacgatcgcacgacaagtgatgaaattgatatgacagacaggccgcaattgggtggaaacaatacacttttgactccattaccctttccccagctgtcaaaatcatgcgataggataaacttttttttcaaatcatctacaccaaatccaaactaaaaattccaggacaagtgaaccagcgcaactctacgcattgaagaaaattggatatttgctaggcaaattagataattgcgatttcgcttaagtccactgtaatcccacttgatccatctatccatctgttgtccatcaattaagccgattagcagcacattcaacccgcaattagcgtaatctcttgagaatctctggtagaatctccataattcgaaggcagaccctcggaatcatcataaattgtgttaaatgagggcaaacctacataccccagattgtagttgcacttgcgtctatcccaagaaatcagaatctgtaaatttgttgtatcctaaaaataaattatatatactgattatggtcttaaatacaaacacatcaaagtatgaaacccattgacggaccctttatagatgaattgaatcgcatgttctttcatcgacccaacttcatgaaaactcggattaaaaagtaattgtttcagtgctatttcatatgctatcatggattgtcctatgctcctatctcgttacaggcgctatgaggaggatccagataatgcctggaattgctgctcctggtgcgaatacttgctgatcgtcatcctgtccacgatcctgctggtgggcgtgctggtgctaaccctcttctgggtgatgttctaccgcgatggcttcgcctggtcggagagtcccaagcagcagttcaatctgcatcccatcctcatgattgctggcttcgtcacgctctccggattttgtaagtccatcccaattgtgcaaatgtaccaatcttaatcttatgtgatatactcgtacctcccccaattagccatcttgatctatcgtctgtgccgctgcgtgaagcaaatctatgtgaagctgatccacatgttcttccacgccgtggccattccgtgcatcgccctgggtttcatatccgtcttcgcttcccacgacgcgttgcataaggtcaacttctatagcctccactcgtggctgggcttcgtgacaatgggcatgttcgtgctccagtttgtgatcggcttcttcaggtgggtctccgcaactcggtgtcctaatccggcatattaatcaaaatcttctttagctttctggtaatgctgtgctgtgagaacaagacctacagctgccgctcggccatggtgcccatccacgccagcttgggactggccaacttctggctggccattgccacatccgtcacgggactgatcgagaaggagcgcgaaaccgtcaacgaggcgggcgtgaggtaagaatagttttaagtactacttttaggcattgatatcaatggttaattcgttcgtaatatctttacagcagtgagaacaagctggtggagcactacatcaccagtgccatcggcgtgaccctgatcttcattggcatcatcgtcaccttcgcggtgcggcgttccaatgcgcccgcctcggcgaaggtctacgtcacggagcgcatttagacggtccgtccggctcgtcagagtctccgccgccggaattggtccacggccaggagggtaagcgagtcgcagcaggtgtacccgaggattccggaactcggtgacttggactggacttggggaaacggaccggcggtgtcctttcgccaggcttagcgcacagagaccacgcttctgcaactctatccgaaccctttgtaaccttttatatgccaaattaaatccacatcatacacttagactactccatatggctataatcaaaacctttgcccactttcaatctctcagtaggtgtgtaggattaggaatctcagcagatgagcagaagaccaagcaagcaaatctaatcaaaattttgacgtgttcagccgaacttactgatgcatccaggcacttgcaagctagattagccagttttttggtactatagtagaattttgatatactcgtaagcccatgtaactagtgtatgtatgatcgtaccacgtaacgcattgaatgtacgcactcggactcaaaactgtcgcatttgatgtttttttgtaatcgtgcaagtatttgtattttcataatgcgctaagcaacctaagctgtaaaccaattttacaaacaaataaatacttttgccctgcctgagggctctcataataatcgcaattgtttatgcactttttaaatatttaaaaaacggtgagaactcggaaaataaacaaatcatattcccttgaaagggaaattaaacagaagtgatggggattgtcttattttctttgtgtgataatagtcgaggttatcagatggacttcagatatatatgtctaataggcattgtctatattcctacttcaaaactacttctactttcaaaatcatttgaaccatgtcatatcacatcatatcgtattatatcatatctttattctacacagtctttgccaaagtaatatccccactaaaagtatcaagatcgttattttgatagtccccaaagtttgtccacg

SEQ ID NO: 28670 - DNA, 1204 bp, DROSOPHILA
gactcacagcgtttgtgttccgtgccggtttgtttgcggagtttccatcatccgtcagctcccttgcaggccgcttcatctccgccggaggagggatgcactccgttcgcgttcgggcagatgaattaattgtggaaaattgttaaattccagctcgttgaagcggccgcaaatccaattaagcgcatacaccattcgcgcggagagtttgtgcataatagagtaattaagttttcattgaaaagggtttttgacaccgcaccgtcacacgccacacgaacttgggccagtcagcggagcagaggcatcaaaattgattgctttcacatggacacgaactcggtgagtccccttccgccgatggaggaggccatggacagggtcagcgagaagtcgcccccgggaactcccaatggcatcgagatgcccccgccgccggatgaaaagcgctatgaggaggatccagataatgcctggaattgctgctcctggtgcgaatacttgctgatcgtcatcctgtccacgatcctgctggtgggcgtgctggtgctaaccctcttctgggtgatgttctaccgcgatggcttcgcctggtcggagagtcccaagcagcagttcaatctgcatcccatcctcatgattgctggcttcgtcacgctctccggattttccatcttgatctatcgtctgtgccgctgcgtgaagcaaatctatgtgaagctgatccacatgttcttccacgccgtggccattccgtgcatcgccctgggtttcatatccgtcttcgcttcccacgacgcgttgcataaggtcaacttctatagcctccactcgtggctgggcttcgtgacaatgggcatgttcgtgctccagtttgtgatcggcttcttcagctttctggtaatgctgtgctgtgagaacaagacctacagctgccgctcggccatggtgcccatccacgccagcttgggactggccaacttctggctggccattgccacatccgtcacgggactgatcgagaaggagcgcgaaaccgtcaacgaggcgggcgtgagcagtgagaacaagctggtggagcactacatcaccagtgccatcggcgtgaccctgatcttcattggcatcatcgtcaccttcgcggtgcggcgttccaatgcgcccgcctcggcgaaggtctacgtcacggagcgcatttagacgg

SEQ ID NO: 28671 - protein, 290 aa, DROSOPHILA
MDTNSVSPLPPMEEAMDRVSEKSPPGTPNGIEMPPPPDEKRYEEDPDNAWNCCSWCEYLLIVILSTILLVGVLVLTLFWVMFYRDGFAWSESPKQQFNLHPILMIAGFVTLSGFSILIYRLCRCVKQIYVKLIHMFFHAVAIPCIALGFISVFASHDALHKVNFYSLHSWLGFVTMGMFVLQFVIGFFSFLVMLCCENKTYSCRSAMVPIHASLGLANFWLAIATSVTGLIEKERETVNEAGVSSENKLVEHYITSAIGVTLIFIGIIVTFAVRRSNAPASAKVYVTERI

SEQ ID NO: 28672 - DNA, 11515 bp, DROSOPHILA
cccaaattggcattgttttaaatgagtttataaaatatttcataaataaaataaagcaactataattttttgattctgtcgactgaaatgaatcactcatacatacaatatattatgtatgtacgattataaatccttccttctgcgagttccggataacggaagtgataacacgttattttataactgactcacgtgcttacaaaatattttctttttattttttagatacaattttacatttatttcatcgttttttggtcgttttttttcgtgctttttaggttcgcttttgaagtgatgaaacgatttattgaaatttagtcacatgaaagcactattattaatttctaacttttttgtagattttaaatttgtttcaccaattttacgggtttacttaatttttttattttttattcctgttctgtaggttatatataaaattttaaacttccgaaacgtggactaaacagaatttttgcaaaatttgtatattctgtcttgagagtttttctaagactaattgggcggcgctgggcgaatttacattttcacccgcacgataaaattgttgagaactgagcttacttaattcgccctactcaagtcactaagagcgatttttaagagaatttgtttatctcttcccattaccttacacttagttcactcttttaatgtagattaagttaatttgtaatggcaataaaaacacaaataattatttctaagagcccaacaatgcgcggctcttataagatgaactggtttttattaatccacgaataccaaactgtaaacgcctaaaaccatattaaaaactaaatttataagacatgcaaataatttcttaatcgatagaggtaaagagaatgtataaacattgaatatgtgtgcttataacaaagtaagagcaaaatttatttttattatctacatggggagaccacataaaagttggggatccacacccatattaaaacagattactttcttttaggttgcattgcaaaattgtatccttaactgcagcgaacacaaacttaatgttctccgtatctaaaaatgaaataaataacttaattagatgggatttgtaacgtattatttagctttttgttaggctgtacgttactgcatttacattgttttttcaaacgagcaaaatacataatctcccaatataagaacagaacaaatgcattttaagccaaataaatcaagacaatacacttacctgtagcacacgtaaaatgagaatatatctttttatatgtatctaaactaatgctttgaaacatacgtagcacgtattccctggccgcatatgcatcttgttttggacctgttttgtaaagaattaagtattaaatatattgatcaaaatttgtgtgtaaatccatataacttttaacgcctaccatcgtattctggaaaatagtctaccaaatgcgaatacattattttctcctctaacacgtccatcttgttaagaaacagaatgattgaagcatttttaaaccattcaaaggttatgatagtatgaaatagagcctttgattcctccagtcgattctgcaataatcggattttattattgttggcgaataattaataaaatgccttcaagttatacatcgttttcggattccatcatgaactgatcatattccgacagtgctgccaaaaatataatcgatgttacattcgaaaaaaagtgaatccattttcttctctcagttcgctgtcctgctacatccaccatgctgtttataaacgagaaatttgttaatacaataaaattaataaaactgcccctaaaaatttaatatatacctaagtacatagccatccaactcaaaaggataaacggtaatattaaatgtaggctctcgagcacgcagaatgtcctgattagttggcaagtaatcagcctgttcaattcgacctatgtcacccaaaaaactgaaataagaaaatgagaaaaaagcaattttgggtatcgctcctggtgtcccaactcactattcagtggaatcagtcagctgatattccctacgacgatcatagcactcctggatgccagcatcgtgccaaagcgttttgatggcattcaagtatggatcctcgaacgtggtaacggtctcgtaatcgatgctcatcaccagatcggccagttcctgtggatcgtaagatgttgtttaagattcagtgacttcaattagatcaatgtttcacttacactatgctctccctgaccgtaggaaatcttcagcatatccatggccttgatcattgactgcatggccatgaatatgttctgaaaaaccagcttgatgtatccacgcttgtcctcgtccgagtaaccgctgccgtggataatacgcatctgtttgatgaatgtggacttcccggactcgcatgcgcctgtggatatacgcacattgtatccttgatacatcccaatacatcccactccacgtacccaatagcagtagtttgagttcccgtttagatctttttttctcaaggcgcaactgtttgtcaatttcctcattgatacgccttttttccattgcctcggtcgatgaacagcagtgcatattcatctttaaatctttaaattaatttttgatcagtatctaaatgagaatgtatctttttttgtgctcttctgataagtttccgtagttattcattggctaagatgtggtttttcgtatcgtttacttttctttgtggggtccttaaaaccacactttttcttctatgcaacagctcaaaaacacgtcccgtaagccatcgagaatggccgaaaactgatttggatttccaaaattaaaaaattgaattcccgtgccctaaaaatgtttaatgacctcgtgataaaacacatcaaaacacccagagaaatatcgttaaaaacatccctgaggatttctagaactcccaattcccagtgagcgcatatccattatataattcaatccaccacacagctctactgtttagtcagttacaaaattctaaaactaaaatattgattatgtatcgaactctgatatattcgaaatgcgttttccaagaggtagagaatagcatatcgtagtcgcaatatcaaaacacttatgaggtcttttcaatatacttttatttatattatattggttttttcattaatattaaggtgtacatagatacttttaattatctaaaaaatttgtttagttacaattgccacgcatacaatcgccgtttgctccgtcaatatgatttgtatgacaaatgtatagacacccaggaaaaccccgtacgtccaatatcaattcaatcaattcaattcaaatgctacagttatcaatagtcggcccatggacatgttggactgtctctgtctccaaatcggggcaatcggtctgtgtgggattgccttaatcctaggctaagcatgcagtttcagtggatgtttcattagcttccgatttacacgtatgtatgtatatgcttaggtgtgcaatggagaaactagagtcgaatattactatttctccctaatgacgcccgaactcacaactaacatttcttactgcttatcccgatgctgagtttatagagggttttatttcaaaaccgaaaacttcgtctagccattcctattatcgataatgtagttttcctcaacgtcaagggcgattttcattcgggattcttttttaagaatttttttttttcatttttttttgcttttcaagctttcttatgtggaatgtggtcattctttcatttacatacatagttaaagtaaaaactagccaccgaatgccatgcctaaatggttttcaagtatctgaaaatcgtggccatacttatcgagtatccggcccgaaggatcaaattgcatccttcgctttcattccgctctagatttacacaattacataaatttcccatttaaattgttgtcccttttgcttgcagttctgtttgagtttgttgcttagaaaatttctttttttttaaatcttaattccttacaatattctgaaattcctttagcaatcgtcggatttgtgtattatgtactcggcttctctatattggaaatacatatctagtagattcatctgcgttactttggttttatcatgtaattttagttattaatcgtaacaattgtaagtgtaatcaaaattataaattgtatataaaaatacaaaatacatacattaatggtttatatcaaattctcattttattatagttcattttgcgtttaatgtacacttacatacacatgctcgattatgtggtatatctctcgggaggccttttgaatgccctcgcgagtaatttgccaaatatttacatacaactgtctgactatcggtgcgtatcataaaattaaggaaccaatctatcaacccaaagcacaacaatctggccatacacacatgctgataatctgaatgtctcggggcttttaacaggctccattagtggtacaaaaaaaaaaaataaatcaagtttggagtacccatttggagtctgtcctatatataaaatatggggattcattatgctggaaaggcacaaaatgttagggaaatcatatcgaaatcgatcaatttaaagtgtgcgtatgtgtggctgcaaagtcggaacattttatcattgaaaccgccgaaaaactcttgttttaaaggatggaattttcggaagaaacaaatcgcaaatgttaaggatcaaaataaatgggagactttgtctgctcgctgatgctgatgcaattcattggacggaaaactatatatatgtatgtcagtgtgtgaatgtctataatgccgtggatataaaaaatgggccaggccaaaatcggagctaccaaattggatgccagctgtgaatttttgtattcgcatattcgcaagaacctaaaccgattccatatccataccgaacgggccctcaaaactcattggcttttttttctcattgtgttctcggctacatcttttaaaatacacattgacttattgaagctttttaaaagctaatccattggttaatcataaaaatggtttaatttttactttacttttactttcactatatgtggttacgaggattaaagctttatacaacacactgttgaatcgtacttaaactaagatgcgtcttggtttttggttattcgcggtcataggaatatctcaattctccactcccatgagtagtgtcttccgcttggagtcgtggcaaagtgtctactcctctgtggccccgagggaactaaacgccaaatgatggggatgtgggttgagggaatctcgctcggttgaacaaaataagtgtactataaattatgaaaaacattttgcatcatatttattttacatacatgtacgtttcaattgttttccattttatttattttttgtttccacatatgcgtagagtagaattgtttttatttggatttttacataaataatttgttgatggggttttctatttatgtgcgtctcatttagttatccttgtatattaaattaaactaaaattataaaaacaaaaacaaaacactgaacccacttggccagacatcgccgttttggctagccgccaaagcgagtcccttgttgcatacattaagatctataaaataagcaaacaactaacaaagttaatgtaaaaagtacgaaaatcaagctatttttgataacaatgtttcgactgaaattttgatggcaacaaaagtacgtgagagcaaaactttcccttctgatagttgtgtttctcgaccagtggtatatcgcatttgattggatttaacctgatgtctgattaaatatcaataagttgtatggattctgctgttgcatgttgcatgttgcatgggtggttatcgacattttttacaaacacgtatttaatgaatgctccatgtaaatgtttctggcttttctcatacaaatctagctcctatatcgtttttgtattggtttgcatgcgtttcatttcttttcttttcattctcatggtattaatacgaatcgtaatttacaatgaatggagctcgcgcaatgcaaattaatcaatttttaaattgttacatatgcgtttatgaattattatatctgctttcatgtatagttaaatatttcggtaaacaatagtatcaatatttacggtttactgtttagcttaataaaaaatacagtattatctgtgatttcgttttcattcattttatcattttatcagcttatcattttcggtttattatttttacacgcctatatgccctgaaattctaataagaaacttcttgcatatataattctttgaatatatatatatttcgggggatttttacgcaaaagtatgtttttgtttttctgtagttatttagtaaaatgttgctttattatgttatgcttcagtacgacaaagttgtttcagtttgttgttccttatcaagcttttgattaaatttacgtttcatattttgtgtttcggattttattacaaaagttactatagtaataaatttatttaaatattacagagtgacaacaactaattcggacgatattttgtataaaaacttttcaaggaaatcatgtttcttgtgtaggaaggaaaaactaccatcagatttattcaaatctaaccaaaaactctatcgattgggtaccaatcatttctggccactgtctttttgactttcaagagttttcctagtcgaaacaaaaaaaaaaaattcacacaacgttttctgaaaactttgccgctagaaagaatagaagtactgcaatataaataaatgttttacgaatcgtcacattcgtaagagaaactctgccctgattatttgttgtcacactgtatcagattttgtgttatttttctctcaaattaaaatgtatacatctttttcatcattctgctgatgcggttttagcatctcagtttagtattctatttatgctacaattttcggttcctgatgtaacaaacgtaagaaactttctcgggtctaatttatgcctaattttcggccacattcgctcgcttctcaattcttcttttatatttagtaaatatgcgaaaaaggaattatatgaatgtgtatgtgtgtttgtataaaaatcacaaaaatagtttttcgatccaaatccagtttagaccaaattatattccttaaggttcgattgcagaattgtgtccttaacagctgcaaacacaaaccttatattttccgtatctagacaaaagaaaagaaggcgtagttagtttgattttgtcaaataatcctatgatagtaaactgcacacattttccattcacgatatttcacagactatatttagtttttattgagggactttgaaaaacaaatcatatacattataaataaataattcatttgcattgccacttttcctgatatccgcactgcccgccttagcccaaattgaattccttaagtgcattttgcataattgtatctttgacagcgcagaacacaagtttgatgttttcggtatctgtttaccaagagatcgttgttttattagaaatcaattcgtttaggtttgcaaatttgactagcgatacacaactactctctactctagatcagcggcaaaagcaaatatgcaaatgtaaatgtttttcacacaaaagtttaccttttgaccagtcctttttaggctgaaaactaaaatcacatccacacacaatttctgaccaaacacagaactggcagcaaacttacctgtagcacacgtgaaatgagaatagataattttttcggaatctggatttaaatctacaaacattcgcagtataaactctcgggccgttattgcatctcgctgaggacctgtttcgataagaaggcgaatatgaagttacgtctagcgtggttctacgaaaactagcaaataatctacggatgatattggcgatttaaggcaattacatagatcttaagtacataaggtgaaaatccacctgtggccgttgtgaaatgcgaatagcattgacgttcgggatctggattgcaggccaagtactttttcagaacgaactgtttggccgcagcgtgatcctgttttggacctggttcattgccgcataaaatcgtacataattatggccacctttatcatgcggaacacttaccatcgtattcaggaaaatagtctaccaaatgcgaatacattattttctcttccaacaagtccttcttattcaggaaaagaataactgacgaattttgaaaccaagggtatgtaattatagtacgaaataaagctttagattcctccattcgattctgtgaaagcgtacaggtgattatttgtttaaaaaaaatatattcataacttgaaatcatacctcattatcagattcaaacaagatttgatcgtactccgatagcgctaccaaaaatataattgatgtcacattctcaaagcaatgaatccactttcttctctcggatcgctgaccaccgacgtctaccattctgtttattaagaaaaatatattattgtaagaaaagttaaccaacaaattaactacatataaggccaaacatacaagcatttaattctagagcgcaagcaacgaatctattagtaactaaattgtaagaaatcgtcttcactagctttacaatgaccatttacattactagccttgccggtaattaccaattgatatttttaatagatacctaaacacaatgccatccaaatcgaatggatactcaagaatgccagttgtcggcactcgagcacgcagaatatcctgctcggttggcaagtaatcagcctgttcaattcgagctagatcgctcaagtagctaaattagataaattaatacacttttaaaacaatgaacggaaccaaaagcagtggcaaaaatagttttgcaacccgtctcagtccatcaatttcgctgaaggccctaactaagtccctgaattgtttgcttgaagagacatgcgctaaagaaattcttaagtgtgtagttacaaagtacaaaataaattttaaccataaccaaacaagaggtcatgcacatgcaacgaagtaagggtagaaagatggtatgtacctaaatctgatttcttctaaatcaaagggatactcaattatccctgttgtgggcacacgaactcttaaaatgtcttgctcagtgggtaaatatgcaggttgagccacacgatcgagatccttcagataactatacatagacaagataattgatttagtttgcatagtcgtttcggtagtttcagtctcttcagttcgtttttcggtcattttgcggacggatttaaaccgttccctttgcatgccaacggttaacttactatttggctgaatcagtcagctgatattccctacgacgatcatagcactcctggatgccagcatcgtcccaaagcgttttgatggcattcaagtatggatcctcgaacgtggtaacggtctcataatcgatgctcatcaccagatcggccagttcctgtggatcgtaagatgttgtttaagattcagtgacttcaattagatcaatgtttcacttacactatgctctccctggccgtaggaaatcttcagcatatccatggccttgatcattgactgcatggccatgaatatgttctgaaaaaccagcttgatgtacccacgcttgtcctcgtccgagtaaccgctgccgtggataatacgcatctgtttgatgaatgtggacttcccggactcgccagtgcctggggatataggattggaaaatatatatagccataagcggcgggcaaacaatgcaattagcgaggcggcttcaattgcattaagccaggctaagtgcaatcgaaatgggccatgctccacttacccagtagtagcagtttaagctcgcggcgcgcatctctcttgtcccggcgcaactgcttctcgatttcctgattgatgcgcttttgttccttggcctcctccgataaacagcactccatgctaactagatttatagacgctttcgcgtgctgctgccactacgctcgacagaccgttccgtatataaaatgtatgctgtttggatggtgggatggtctcctggactcccttctctggaccctcggacacctagctaattggttgtatggcgggcgttgaattcacccgttccaagttatagattctgttgtagtttcgattggtgcatttgtacttcggctttgctcgctctgcagacctcctccagcgcttacgatccaggctctctttggctattgctattgctaattacgggtctacgctaagttcttgaccagatttcggtgactcggaggctgagagtgatggttactaatgaacaaagaccacatcgaacgatccaagaacatctgcaaggagacaaagctttgatttagtgcttgcataaccgaactgtaggatctatccaactattgctgctacggaccaccacagttgttggcccaacgagagttcgccgcgttgtgtcccgtgctgacaattaacatttcatatttgctagcctgccccactagctggcgacgtcgatgacgacgtcggatatagattgcccatggctacccatgactaccccgggacttcctctgaccatggcattggctttggttctaagttctgggcctgctctctctgcgcagacctgggatcgccctctaccaggtggcaatagattgaggaagcgttccccacaatgcccctcagccaagttcaatgcaagaaagctgattttggaaaatatatggcttcgctggccacaagttagcgagagtgttctcctattgggtggaccaagcagtctatggataagaagaattggcatatcattctaattcggaaataaaaaagtcacataccgaaacttatgatgcaaaaacacagctctatacacaaaactggaatatcattgcataaactttaaaactcttaatgtacttttatcgttaaaagatatgagtccacccgaatccgcggttcattcatgggttcagcatagggcatgcctatagaatatagcctataaccactggtgctatttcctctcttttccaacccctagtttatatatcgagtgatggctaatccaatttcgtttggcgaacacattgacatgggtcgaggtaaggctttcagcatgaccactaccaaatatcgatggaatacctagcaataattttgacaaaagtctgaccaggagaatttggcgggctcaggtgggcgaatatggagatctggataatgatggctagacgcatagtattcgggaggattagtgggctgcactcggaacacattgctcgctgagcaaagccacaaaatcgaattagcagtggcagcaaaattcaggggcaggggcacgcaattggcgcaatgaagcgttttttaacaatagtttgccagatatatcatgccaccaaatcagagggagatttacctaccg

SEQ ID NO: 28673 - DNA, 1427 bp, DROSOPHILA
caactgtggtggtccgtagcagcaatagttggatagatcctacagttcggttatgcaagcactaaatcaaagctttgtctccttgcagatgttcttggatcgttcgatgtggtctttgttcattagtaaccatcactctcagcctccgagtcaccgaaatctggtcaagaacttagcgtagacccgtaattagcaatagcaatagccaaagagagcctggatcgtaagcgctggaggaggtctgcagagcgagcaaagccgaagtacaaatgcaccaatcgaaactacaacagaatctataacttggaacgggtgaattcaacgcccgccatacaaccaattagctaggtgtccgagggtccagagaagggagtccaggagaccatcccaccatccaaacagcatacattttatatacggaacggtctgtcgagcgtagtggcagcagcacgcgaaagcgtctataaatctagttagcatggagtgctgtttatcggaggaggccaaggaacaaaagcgcatcaatcaggaaatcgagaagcagttgcgccgggacaagagagatgcgcgccgcgagcttaaactgctactactgggcactggcgagtccgggaagtccacattcatcaaacagatgcgtattatccacggcagcggttactcggacgaggacaagcgtgggtacatcaagctggtttttcagaacatattcatggccatgcagtcaatgatcaaggccatggatatgctgaagatttcctacggccagggagagcatagtgatccatacttgaatgccatcaaaacgctttgggacgatgctggcatccaggagtgctatgatcgtcgtagggaatatcagctgactgattcagccaaatattatctgaaggatctcgatcgtgtggctcaacctgcatatttacccactgagcaagacattttaagagttcgtgtgcccacaacagggataattgagtatccctttgatttagaagaaatcagatttagaatggtagacgtcggtggtcagcgatccgagagaagaaagtggattcattgctttgagaatgtgacatcaattatatttttggtagcgctatcggagtacgatcaaatcttgtttgaatctgataatgagaatcgactggaggaatcaaaggctctatttcatactatcataacctttgaatggtttaaaaatgcttcaatcattctgtttcttaacaagatggacgtgttagaggagaaaataatgtccaaaacaagatgcatatgcggccagggaatacgtgctacgtatgtttcaaagcattagtttagatacatataaaaagatatattctcattttacgtgtgctacagatacggagaacattaagtttgtgttcgctgcagttaaggatacaattttgcaatgcaaccta

SEQ ID NO: 28674 - protein, 279 aa, DROSOPHILA
MECCLSEEAKEQKRINQEIEKQLRRDKRDARRELKLLLLGTGESGKSTFIKQMRIIHGSGYSDEDKRGYIKLVFQNIFMAMQSMIKAMDMLKISYGQGEHSDPYLNAIKTLWDDAGIQECYDRRREYQLTDSAKYYLKDLDRVAQPAYLPTEQDILRVRVPTTGIIEYPFDLEEIRFRMVDVGGQRSERRKWIHCFENVTSIIFLVALSEYDQILFESDNENRLEESKALFHTIITFEWFKNASIILFLNKMDVLEEKIMSKTRCICGQGIRATYVSKH

SEQ ID NO: 28675 - DNA, 4135 bp, DROSOPHILA
cttgactatagcattaaattcacatagttgtagttccttttacagcttaaaatctagagaaaaaaatcaattacatttttaaacaaagcaaggtcttactccaaacattttgtgtaccgcaataagccatctgtcattttaataaataattaagtaaataatagtatcctttactaagttagtagtaaccgtgctttaaacattttcttacagctcgcgatggcaaatcattagcctcactcgtatttccgtagggcatttggcaaacgctcgtgcataaaaactcatttgaaagagtgcctcgcctgcgctggacgacaacgaagggcagcagagacaagaggcgagggtgctcctccgtggctcccatcgtactcatccaccagttccggggaaggcgcgctcaagtgcacattggctgcaggctggaatgcacgggcacagctgctccttcaacgattcgcgtgtcaacaataagcgcaataacttaagcttcattcaatgcggtgagctgcagcccggggccagtgatgaatgcctctccacgtggaggagaccagccagctaattaagcggcaaatggatttcatctggcgaacactaggcacttgtgcttcgctttctccacttgtaaaacacaatctcaacagtttgctttcacattcacttggccaccatcatctatgcgtcatgcaagattttcctacttttgtgctcatctctcaacagttttaacaattgtctttgggtggcgaaagaagtaacgcacagcttaaattaaatgattaataaatcaggacattagcttaaaaaagtcttgtatatctgcagtggtgtatatacgtgaatcacaaacattttgatctacaactttgattatatatacatataaaatgaactatttaagattatatgctaaactaaacaataaattttaatgcacacatttgaacgtgtttggttgactagatagagcagccgttcttccctacatcagccactatttcaggggattggactttaagtagttagccaggataatcatcgcaaaagaagtggtcaggaatatactgcccggtacggaacgccttacaggtaaattgggatcaagttctcgctgagcaaacagctcaatatcagcctcgtacgtctcgtagttgttccagtgcaggcatttctttaccgcataagcccagcgcttgtagagcagctctcgacctagaaaaagaatatatatctatattattgaatgaagtagtatgaggagaaaacgcacatagctcgtgcttagatttggtaataaaagaagggaacatgttatttcgttgcactgacccaaattctacttacgatttttggtagttgttggcgaaaagacatcagtgggcggggtgtacatttttacggcgtgctccagggacaccactttcatcgtcacgcccgcggttatcataacgcccaatccagcaggtgaggtggtctgtggacgctccaacatatagccaataatatctgctatgaactgcaccaaatgcaagttttcggcgtaatcaccgccgaatgtcagcacgggttgcatgctggatcggtcccagttgggtgtatcgcgcttgaacgcctgtagcacttcaaagatctggaacccggtggcctcgtaagcagcttgggtaatgttttccgctgtagtctggctggtaagtcccaagattatgcccctggcatcgtgtcgccagtagggtgcgtacatgccatgaaatgccggcacaaacgtaatctccgacctcttggctgccagtccacactcggcattcagcatggatgaggaacaagaggacgagatcatcgagttctcgccgatgaatgtattcaaagactccaccacattatcattggaattaatctcagtattgatctgtagcttatcccgcagccatgtaaccgtggaaccggcatttgaaatggctccctcgagtgtgtagttagtggccgctttttcgcccagcttgtgcgctatgcccgttatcagtccgtttgcagagtccagcttctccctgcccgtgttaaggagcacgaaacagctgtcgtccagggtacagacattttgcccggccttcacgcagagttggcccaacaaacttgcgggctgctcacccatcatggccgctatgggagtgccatgcaaaggaccctccagcacatagccgaagatttcggagttggatcgtatgcgtggcagtatgttcaggggcaatcgaaagaactggcagagtttaggatcccactgctctgtggacacgttcataagggaagtgtagtgggcattggtaatgtcagtagagtgcacacccatctcaacgccgccggttaggttccacagaagccaggagtccaaggtgccgaataagcacttgttctcctcaatggcagtggctacggcaggaacgtgatccattagccaacggatctttagggcactgaaacagctgctcaggggcaagccactgcgatacctcacgtagtccacattgtgccggacattatggagcagggtctttaggatgggagtgctacggcaatctgaccatccgatggcattgtgcagtggctgtcccgtctccaaattccataacaccgaggtgccccgctgatttacgataccgatggcaataatatcacgtggattgatctctagtataaccaggttcttataggcggtctgcaaatgtagtcagattagttgccgcatgatgatataacccggcgattaacaacctctatgcactcctgtgtgttcttccatatctccgacggatcgtactccatccagcccgcctggtggacaatctgtcgcagcttcagctcatggtaggccaggacctcggcatttttcgttgagtatatctatgaaaatagaatctgagtcagcggccgttttcggctttaggaccttctcaccagaaagcggcagtgggtgctgctcacgcaggcgacgccgatgagtgctccgaatctcccgtaacgaccgttggacatctttggcctgatgggtgtccacggacacgtgcttaatggtgttaaggctcgctagccgagcaaaataagcaagtcgtgttttgttgttgtcgctttttggaacgccaattgtctagtgatgtaaaaattcattttttcatcgaaaatcgatgctagctatcgatttcttagcgaatacgctaaccacaggttggagtacaattccgatcgagagtaattaatctgaccgtgggcctaggtattacaataaattcgacgcttcaaataccctttattatgtaaaacttgcaatttactaatttaaaaattgatttaaaagagcttatatttaatatggcttattataaatgcctggaatagatgtaatatctttgatgttaaagctttgatttatctattaatttatgaataaagacatttgtcacacttcaggcaactctaagaacaccctgtaagactggcatttttggctttgcacaatctggtcacacctatacttttccgggcccttctctccagaaagcaaaatagaaacaaattttccatatttcatgctaaattggcacagatccgtactactatgctcatgagtcgagcgctttgccggagctggctaccccaggtggcgtaagtaagcaggcggtgacggagttccgtatccggagtaaccccacgtaaacttacagccgcagatgtcatgctaatgtgaatgtgccaatcctgcggataaactctggtcatccggcggcgaggtcatgtcggcagattcacagcaaccgaaaacagagcagcaacctgaagccgacgactggggagcctgcggcagcggagcagaacaccccggtgccggtgaacaatgtgatcaaggcggtggccttcacgggagcagtaagatttaatcatgaccagcacttgtacggggatctcatatagtccctgattcacgcttgtagtttacggtcggctgctttgcgggtgccaccatcctggagtacgagaacacacgtagcctaatcctagaaaaggctcgccaggcgagattcggttggtggcagagtcgttcgctggcggacagggattactggacacagatcaaacaaga

SEQ ID NO: 28676 - DNA, 1947 bp, DROSOPHILA
ttccaaaaagcgacaacaacaaaacacgacttgcttattttgctcggctagcgagccttaacaccattaagcacgtgtccgtggacacccatcaggccaaagatgtccaacggtcgttacgggagattcggagcactcatcggcgtcgcctgcgtgagcagcacccactgccgctttctggtgagaaggtcctaaagccgaaaacggccgctgactcagattctattttcatagatatactcaacgaaaaatgccgaggtcctggcctaccatgagctgaagctgcgacagattgtccaccaggcgggctggatggagtacgatccgtcggagatatggaagaacacacaggagtgcatagagaccgcctataagaacctggttatactagagatcaatccacgtgatattattgccatcggtatcgtaaatcagcggggcacctcggtgttatggaatttggagacgggacagccactgcacaatgccatcggatggtcagattgccgtagcactcccatcctaaagaccctgctccataatgtccggcacaatgtggactacgtgaggtatcgcagtggcttgcccctgagcagctgtttcagtgccctaaagatccgttggctaatggatcacgttcctgccgtagccactgccattgaggagaacaagtgcttattcggcaccttggactcctggcttctgtggaacctaaccggcggcgttgagatgggtgtgcactctactgacattaccaatgcccactacacttcccttatgaacgtgtccacagagcagtgggatcctaaactctgccagttctttcgattgcccctgaacatactgccacgcatacgatccaactccgaaatcttcggctatgtgctggagggtcctttgcatggcactcccatagcggccatgatgggtgagcagcccgcaagtttgttgggccaactctgcgtgaaggccgggcaaaatgtctgtaccctggacgacagctgtttcgtgctccttaacacgggcagggagaagctggactctgcaaacggactgataacgggcatagcgcacaagctgggcgaaaaagcggccactaactacacactcgagggagccatttcaaatgccggttccacggttacatggctgcgggataagctacagatcaatactgagattaattccaatgataatgtggtggagtctttgaatacattcatcggcgagaactcgatgatctcgtcctcttgttcctcatccatgctgaatgccgagtgtggactggcagccaagaggtcggagattacgtttgtgccggcatttcatggcatgtacgcaccctactggcgacacgatgccaggggcataatcttgggacttaccagccagactacagcggaaaacattacccaagctgcttacgaggccaccgggttccagatctttgaagtgctacaggcgttcaagcgcgatacacccaactgggaccgatccagcatgcaacccgtgctgacattcggcggtgattacgccgaaaacttgcatttggtgcagttcatagcagatattattggctatatgttggagcgtccacagaccacctcacctgctggattgggcgttatgataaccgcgggcgtgacgatgaaagtggtgtccctggagcacgccgtaaaaatgtacaccccgcccactgatgtcttttcgccaacaactaccaaaaatcgtcgagagctgctctacaagcgctgggcttatgcggtaaagaaatgcctgcactggaacaactacgagacgtacgaggctgatattgagctgtttgctcagcgagaacttgatcccaatttacctgtaaggcgttccgtaccgggcagtatattcctgaccacttcttttgcgatgattatcctggctaactacttaaagtccaatcccctgaaatag

SEQ ID NO: 28677 - protein, 544 aa, DROSOPHILA
MEYDPSEIWKNTQECIETAYKNLVILEINPRDIIAIGIVNQRGTSVLWNLETGQPLHNAIGWSDCRSTPILKTLLHNVRHNVDYVRYRSGLPLSSCFSALKIRWLMDHVPAVATAIEENKCLFGTLDSWLLWNLTGGVEMGVHSTDITNAHYTSLMNVSTEQWDPKLCQFFRLPLNILPRIRSNSEIFGYVLEGPLHGTPIAAMMGEQPASLLGQLCVKAGQNVCTLDDSCFVLLNTGREKLDSANGLITGIAHKLGEKAATNYTLEGAISNAGSTVTWLRDKLQINTEINSNDNVVESLNTFIGENSMISSSCSSSMLNAECGLAAKRSEITFVPAFHGMYAPYWRHDARGIILGLTSQTTAENITQAAYEATGFQIFEVLQAFKRDTPNWDRSSMQPVLTFGGDYAENLHLVQFIADIIGYMLERPQTTSPAGLGVMITAGVTMKVVSLEHAVKMYTPPTDVFSPTTTKNRRELLYKRWAYAVKKCLHWNNYETYEADIELFAQRELDPNLPVRRSVPGSIFLTTSFAMIILANYLKSNPLK

SEQ ID NO: 28678 - DNA, 4530 bp, DROSOPHILA
tgcacacggcttccctcggcaggcacaagctcatctagaaacccgatcccaatccaaccaaaactaattgttaatcgaagtagcttaatcctcgaccgatcctaaccggcggttaaacccaaaaaacaggcggacatgtgcaaaattacagtaggcaatataattttaaccagctcccaagtggaaagtttcttattatgtagtagcagtagtatgtacttacattctatatcttgtataagtagggcttggctatcaacatttagtattgagagaatcaataattaagagtttttgtatgtacgatgattttattagcacaatttacaaatgtgaatacacgaatattttcacctacttaaatgcgttatttatttaaaaaattcgatcccggcctgctataaatgtgatgtaactacaatttcatggcatcggttggcatatcagaagctattacctggcaactcattttcaaagaatttgtagcagtagttcttcaaattgcttcgccgtatctggaaagcatgccaatatttacgacctccattgtaggcacgagcctggcacatattttatgacgccacagtgataaggtattcaaatgaaaagcacgttagcgtgtttcagctgcgcttttagtaagttcaaagaattacttaatagctataatttggatataattaaaaaaaaggccgttaataggataataaatatatcatcagagctggacaaaagaatctgatcaatctgcagttgataaaaaaaactcaacgagggagatagagcgatagagcggtgaagtaagcccgagataaacctgagagcggaactctcgcctacgcgatcgtgctgaccgccaaatgcaatatccgccgctccacctggtggcgctctcaattctcaattctgcggtcttcttgctctcgccaaatctgccccaatgttctctcagcgagtcgatttgcgatggcaatgccagaggctcgaaacagttccgtcgcaggtttccaacggtacagaggtgcaatcgcttaattctcgcaaaaaacaatcagtacccaattataaaatagttgctaacaaggtgagtttgcaacggacgcgaaaaaaaagaagatcaagggctagtaatcgagaatattgggtgaaggttaagctgaagttgaagttacttgagttaattgtaattgttaattgttcataatttattggtttgcttacattttagaacctgatttagatatattacccacaattgcgtgttaccaaaaagaaaccagttaccgcaaaaacggagtttacttcactgatttttgattctctcattcactgtccgctcacccttgagtgggttaaggtaaccagttattaatccagaaaaatgagtgggcaaaaatgcagcacagaccagacacaaaatattgtacatatccattacaatccacacattccacggcttaaaacttcaataaacatttaaattcccaatcgtgaacagttggttgaacaagtgtttacgatattctatcttttcatatatgtaaaattatggcttgttcttatctcaaaactgcatagcttcggcgtttaaattagacgcgaagtctctgtgtgtgaaatcaagtaatcttggctgtattgtttgcaaattcacgaagagagccctgcgatcaaattgttcagataagcatcttcattagcatatcgtttcacggtaaaactcaaactgagttattattttcaaatcaatcatatttaatcagcaagcaagagccctaataaaccttatttgatggacaagcagtggctattagttgcaatttgtgacccatttcgtgacagtttgaaccagaataagtaaatacctggcaaaaaacagattaaaatacttatacgtaatgacaatggcatttttagttccgaaattcagtcgctctacgagcgtgagaatcgtaaattatgggaccgattccaagtgcagataaggatacgtgtgtagagcaggtactgaccgcgtttgaagatcgtttcagaactcgagcgtgcaagatcgccagcatatcgcagacacattgataagaccgtaaggaaaccggacccataaacaaatattgccccgataaagtgtgacacccatccatttcatttgtggaactttggaagcgaagtgcgtacgaaaaagagattgttgattgaccttcccgcagccgcacttaaccctgtgaaaaaggctgtttgcatttagtttcgtttgggtatcgctcattattcacacacataaataataatacccgttcgcacatcatatatgacccacaaatcgtttcataaattgaggctaggcgcttcaattccgcacacaactgtccgtttaaatggaatcaagagaatgtacacctgatgacgtccaagccagagatgagctggaattcaagtgccagagatgagttggcatcacggaatttgagattacaagacataaaccctcctagcatttcccaaaactgaaagtatttggttccaaatcatttaaagctttactataaagcattatataaatagttttggaagatgtttttaatattgagtccatatcaattatcgaaatttcaggattatcatttagttcatttttagctatgtccagtagatcatccctggtgggattttctctgcttgtgccactcaatttaaaattatttatttatagacatttaaacatttctaacatttgctatccgagtcgtacacgtgtctaatttaactatgatttccttgcagttcaaaatgatgcaatatcttgttgttagcctggcactctgtgccacaatttgctctgctgcgcagacggtaagatatataatctcgttaatttgaaaatccacttataattaggacactgaacttactttgcagcgcaatatgcccattcaagccattgcctatctgattggacccgtgcaatcggataatacccaggtcaagggcaacgtgacctttacgcagaacgactgtggccagaatgtccatgtgcgcgtccagctggagggattgaaggagggcaagcacggcttccacattcacgagaagggagatctgaccaatggatgcatcagcatgggtgctcactataaccccgataaggtagatgcgggattctttataggattaggtgtctaaatcactaatataacttttatgtctcaggttgatcacggtggccccgatcacgaggtgcgtcatgttggcgatctgggcaacctggaggccaactccacgggcattatcgacgttacatacacggatcaggtgatcaccttaactggcaagctggggatcattggcaggggagttgttgtccacgaattggaggatgatctcggtctgggcaaccacacggattccaagaagaccggcaatgcaggcggccgcattggtaagtagtcagtgtaaaataataaaataataataataataaaatatttgttttaaaccttctttcagcctgtggtgttattggcatcaagtaaatatcccttccaacgtgtcagccaaatcaatatgctgctcgaatactttatgtgtagttgtgtaactccaggcgtagtaactaatgaaatgttttcccaattttcccaattcccccacccacaatcacactcacccttacatgtttggcttacacatttccctcaattaattgtctcagttcactgactcactcgatttgccgtgtgtgtgtttgtgtgtaataaaatcaacaaaaattaaccgaaatctaagctaaacattagcatactctgtaccacttgtgttctaccacctcatattcatggcctaaacaaactttcgcgctttgctggggttgcttttccgagtgggtaggtatgacagagagcctttttacctatcatttttactaacatcattagcattagtcggtcggtcggtcggtcggtcggtcggtcggcgaagagaaggggatattggaataacaactgccgctggaatcggaactttactgatccaaccagggttcaatcaaaaaactcacattgtatgttttccagtggcccatctgtacctgcacctgcaccaccaacaccacgccatcagccactgtactatgtgccccatggggagccacaagatcatgttgtctatccactccagcactatcctttgccatacccacacccatatccatatccgcacccatacccctatccgtatccgttgtcgcaccaattgtatctgtgagatcgcgagactacaccgttcgcctgttccaccttctaattgcagctcggatgtggacgagtggccatgtcgcgatggtggcgccggcgccctgcgctactccttctccatcctgaccgtcatcgtggccctcatcatggcccgcagccttgactaatccgaaacatgcacccggatcggatcgaatgcacgcatgtggcatgggattgttggccatcgtagtgatctgcatacctacttacacactaaccacacaaccatgagtcgcac

SEQ ID NO: 28679 - DNA, 780 bp, DROSOPHILA
caggtttccaacggtacagaggtgcaatcgcttaattctcgcaaaaaacaatcagtacccaattataaaatagttgctaacaagatcgtttcagaactcgagcgtgcaagatcgccagcatatcgcagacacattgataagaccgtaaggaaaccggacccataaacaaatattgccccgataaagtgtgacacccatccatttcatttgtggaactttggaagcgaattcaaaatgatgcaatatcttgttgttagcctggcactctgtgccacaatttgctctgctgcgcagacgcgcaatatgcccattcaagccattgcctatctgattggacccgtgcaatcggataatacccaggtcaagggcaacgtgacctttacgcagaacgactgtggccagaatgtccatgtgcgcgtccagctggagggattgaaggagggcaagcacggcttccacattcacgagaagggagatctgaccaatggatgcatcagcatgggtgctcactataaccccgataaggttgatcacggtggccccgatcacgaggtgcgtcatgttggcgatctgggcaacctggaggccaactccacgggcattatcgacgttacatacacggatcaggtgatcaccttaactggcaagctggggatcattggcaggggagttgttgtccacgaattggaggatgatctcggtctgggcaaccacacggattccaagaagaccggcaatgcaggcggccgcattgcctgtggtgttattggcatcaagtaa

SEQ ID NO: 28680 - protein, 181 aa, DROSOPHILA
MMQYLVVSLALCATICSAAQTRNMPIQAIAYLIGPVQSDNTQVKGNVTFTQNDCGQNVHVRVQLEGLKEGKHGFHIHEKGDLTNGCISMGAHYNPDKVDHGGPDHEVRHVGDLGNLEANSTGIIDVTYTDQVITLTGKLGIIGRGVVVHELEDDLGLGNHTDSKKTGNAGGRIACGVIGIK

SEQ ID NO: 28681 - DNA, 3591 bp, DROSOPHILA
tttcgaagcacgggcaacactcgactctcggccgcagtaggcactactcgcacgcacacatcggcggtgcacacgcatgcacacacacacacacaacagcaacagaacggcacacacacacacacgctcagtcgtacgcacacaaaggcagcgacacagagacaagcgcaacgagctctctcagtcgccgttgtcccactttccgtgtattggtttcgattcgtacacttttccacgcacttttaacgattcaaattcgatggtacagaaggcagggcgacacgagagtgcattggaaactggcgcaaacctcaaaaaaatatatccaacacgctggccgcacgcacgactcgtatgcagactggttctcggcgcgcgtcgaacgttcttatgcattcattattgaacggaatgctctgtttcgcctgtctgcttatgtttttttcttttcgattccgaggtactcgtcacgacaaatgaaaatcagtgtggccgttttgcggctgtcagctagatacccggctggcggggaatgtgctaagaaataccacaaaatcgacggggatagccgggatacaaaccagtcggtgcacttgactaccgctaaatgcgtctttactaaattgcatttttagcttttagcatgcaaattatgaactataacctaattaaaatacccattatggttattacttttgatcaatgtaatcatcggtcattcgcaatcacgcgctcacgtccattcattatttctttgcaatgtcatcctttttcaaagatatcaagcctattttcttcaaaattgtagacttttgcattttgcaccaacaaagcatgcgcaagcagttgtatttggcaaatcatgtttgatttcattcagactttgtgttttcgtacggcgggaagtttctctgaaaatttaaatttatgtacatatttacatcgacgctggaaaacaaatagcgcgcttgcgtttcaccaatttccagcggcatttgcgcggttctggccacactgttcggcacacaacataatcctggttgtcgccacttgttttcgatcattttagacttaaaccaatgcaaaaggaatttcctgctaacgttatcgataatcgcaatagacgccaaatcgccagttttacctcttcctttttcgcaggccccgttccgttcagcgaattctcgcccgagctaagtctattgcaagcgtccggctatagaaatcgacgacaaatcgctagttccacctcttccttttcgcaggccccattccgttcagcgaactctcgcccgatctaagcgtccggcgataggaatccacctcttccttttcgcaggtcccgttccgttcagcgagttctcgccgacactaagtgcattgcaagcgtccggcgacagttcttacccagatcttgtcaagttaacacgatgagtgctcaaccgagtccgcatatgaatcctcagcagcagcagcagcagcaacagcagcagcagcagaccgagcaggagaaggtaagccgatgtcggcaagaacgcgtgctagctttaacttatcgcccgccaggtgtaccagtggatcaatgagctggcccatccggacacgcgtgaaaccgctctgctcgagctaagcaagaagcgtgagacggacctggcccccatgctgtggaacagcttcgggaccgcctgcgccctgttgcaggagattgttaacatctacccatcgataacgccgcccactttgacggcccaccagtcgaaccgcgtgtgcaacgccctggcgctgctgcagtgcgtcgcctcgcacccggagactcgcacggccttcctgcaggcccagataccgctgtacttgtaccctttcttgtcgaccacgtccaagaccaggcccttcgagtacttgcgcctgaccagtttgggcgtgattggtgctctggtcaaggtaggttaagccgaaggccagtggtcatctaatgcactaatgcacttgttgtcttcttattactgctatcgacagaccgacgaacaggaggtgatcacctttctgctgaccaccgagatcgtgcccctttgtctgagcatcatggacagcggatcggagctgagcaagactgtggccactttcatcatccagaagatcctgctcgatgagtcgggtctgtcgtacatctgccagacctacgaacgcttttcgcacgtggccatcaccctggtgagtgtccgtttcccgaagccttatgcattgtctaagggtctttatcgatttcagggcaaaatggtcatccagctggcgaaggatccatgcgcccggctgttgaagcatgtggtgcgctgctatctgcgtctttcggacaatacacggtaagtcttggcgggcgagtaaattatcgctcggcttttcagtctagccttgactctttcagcgctcgcaaggccctgggacagtgtctgcccgatcagctgcgtgacggcacctttgcgctgtgcctgcaagaggacaagtcgaccaagcagtggctgcagatgctgctcaagaacctggaactcggcgccactccgcagcagatcggcatgtcgccactgggctcctagggagtggaagcgacagcacacccagcactatattatcaattctaacgtccaaccatcgatgatgaataatccacgctgttaattacatagctgctcgaccgaatatacataaacatgcatacatacatacatacatatttcataagcgtgcacgagattgcctgtgtcgacttaagcggagctgtaatatacctacataaattacaaataaattaatgttaatactaagattgtcactgacacccaataaagaacctcgagcagacgatacgatataaatatttatgcgtgtttgtttttttttttaatatcaatattctaacagaggatattaacaatcccgcaaaagttcataatcatcttttcgctgcatacttttgggctactgtccggatttgctatatttgctatttgctgtgtatatttgatagtagggggtgtccccgaacgaatcttataggttctatatacatatgtaagttctgaccatcacaatcaatcactctactgaatgcaaatggctcatcctgcgaggtgtgtaaacaaaagtcgagaaaattgcgcagaaagcgcatctgctgctatccccgtcccgctcctggccacgcagctggcatgctgctgtcccgctctaggtcgcgtggtgtgcaccaagagcacccagtgctccagaccagcccagcccaacccaggaaaaaaaggtagtgcagcgggtgcagtaacggcaaaacacacattcaaatgcatataatatggacactcatatacagcgcttgcaatagcttcaattacaacaggtttaaatatagacacatggaataaacactaacagccgcagcacaaattgacgcctcaagtcctgggcacacctccgaagttgtactgtttggatttccacaaattgttttgcaggtaaagtcccggcacacagatataaatacagatccacccagtacacttggcacggccagtgcagcgaagtggcgagcggatcaaataa

SEQ ID NO: 28682 - DNA, 1277 bp, DROSOPHILA
cggttctggccacactgttcggcacacaacataatcctggttgtcgccacttgttttcgatcattttagacttaaaccaatgcaaaaggaatttcctgctaacgttatcgataatcgcaatagacgccaaatcgccagttttacctcttcctttttcgcaggccccgttccgttcagcgaattctcgcccgagctaagccccattccgttcagcgaactctcgcccgatctaagcgtccggcgataggaatccacctcttccttttcgcaggtcccgttccgttcagcgagttctcgccgacactaagtgcattgcaagcgtccggcgacagttcttacccagatcttgtcaagttaacacgatgagtgctcaaccgagtccgcatatgaatcctcagcagcagcagcagcagcaacagcagcagcagcagaccgagcaggagaaggtgtaccagtggatcaatgagctggcccatccggacacgcgtgaaaccgctctgctcgagctaagcaagaagcgtgagacggacctggcccccatgctgtggaacagcttcgggaccgcctgcgccctgttgcaggagattgttaacatctacccatcgataacgccgcccactttgacggcccaccagtcgaaccgcgtgtgcaacgccctggcgctgctgcagtgcgtcgcctcgcacccggagactcgcacggccttcctgcaggcccagataccgctgtacttgtaccctttcttgtcgaccacgtccaagaccaggcccttcgagtacttgcgcctgaccagtttgggcgtgattggtgctctggtcaagaccgacgaacaggaggtgatcacctttctgctgaccaccgagatcgtgcccctttgtctgagcatcatggacagcggatcggagctgagcaagactgtggccactttcatcatccagaagatcctgctcgatgagtcgggtctgtcgtacatctgccagacctacgaacgcttttcgcacgtggccatcaccctgggcaaaatggtcatccagctggcgaaggatccatgcgcccggctgttgaagcatgtggtgcgctgctatctgcgtctttcggacaatacacgcgctcgcaaggccctgggacagtgtctgcccgatcagctgcgtgacggcacctttgcgctgtgcctgcaagaggacaagtcgaccaagcagtggctgcagatgctgctcaagaacctggaactcggcgccactccgcagcagatcggcatgtcgccactgggctcctag

SEQ ID NO: 28683 - protein, 304 aa, DROSOPHILA
MSAQPSPHMNPQQQQQQQQQQQQTEQEKVYQWINELAHPDTRETALLELSKKRETDLAPMLWNSFGTACALLQEIVNIYPSITPPTLTAHQSNRVCNALALLQCVASHPETRTAFLQAQIPLYLYPFLSTTSKTRPFEYLRLTSLGVIGALVKTDEQEVITFLLTTEIVPLCLSIMDSGSELSKTVATFIIQKILLDESGLSYICQTYERFSHVAITLGKMVIQLAKDPCARLLKHVVRCYLRLSDNTRARKALGQCLPDQLRDGTFALCLQEDKSTKQWLQMLLKNLELGATPQQIGMSPLGS

SEQ ID NO: 28684 - DNA, 7111 bp, DROSOPHILA
tggtgcagcggcgcatctgttgcacaggcggaggaggcggtggcggcggcgtagggcaggacgcggatggcgatgatgccgccatgcacagtccgggcaagaaagtgttcggccagaagcgcaacgccagcaaggcgccagccaccaattatcggctatgagcagacagacaggagctgtcaggaaacttacgcttaatttaaccactcaccccgccgggttgaccttcagattcaatgcattccagtccgcggaggggcaggagcttcagaccgaaaggcaacccatccacccaatgttgatggctgtagagagtggattgcctcgttgtggttgatattctaagggaactatgcttcacagcgagctaactatgagctagcttctatgtcaagaataggatctccatttttacttgctatgctttaatattatcttactaagttattattttgttatgttaccgtatcgaatatatgcggtatgaaatactcttataacaatcgtatataagctttaccataaccaagtgtcttgcttgaggaaagcaagctttaggtgtctaatgtactacgcataaggcaatcagaatgtaatcactacattttttccttatatattgcataatttcggagtgccttaagtgtgtttatctgatgtgaaagctgggaacaaacgaataaatatgaataccgcacgtgtttgtttacaaagtatgtttatattttaacaattggtttaatgtacaatagtaaaatgatataaatacgcttaccccggattaaaataatatgcatgtaggtataacacttcttctggctgcgatcgacactccgatcctggttaagactaaggcaaactctaggcgctactcactaacaggacaagcgtatggtagatcgagtgcttaactataacgctccacgtgggcttaatgtgaagacgtgtggaaacgagtggagttgattatcacgagcagcaccaggccggtggccacagatcacttcttcttgtagccgtacgagttgatggtgtcgaactcggtgtcgcacttgagcagcagctggtaccactggtcgctgtcgatgcggctggcctcccggaatcctccgtaggcggctggcaggcacttgggcgacatgtatttgtgcagggactcgcgatcggtgccatggaagatgatcctgctgcgcagcttctccttgaggaagggcttgaacagggcaaagaccacctggaaaatcttcggctggttcacgatgtgaatggccttgatccggagcggcaccgagtcctgaagccagtccacaatgcgcttggcgaacggaggcgtaaactgccacgtttgctggagactgaggccatccatgtcgaagatcacaacggctccgcagatctgtgtttctggctccagcatggccgcctccaggaagagcacagctcccttgaacacctcatcgagggtgacctgcttgtgcttccagcgctctgtaatcggggattacgaaagattaatacaggatctgctcaatgcttggagcaactatgaaacttcaaatgataggaaaacctgcatcttaactaaaataaactttactctgaagatcgagatctttgcactcaaaagctaatatattgaagtatccttctttcagtgtacttactgcccagttcgaggaccaaaatgcgacgacccagttgatctcggttggggaagacggtaaggatgttgtgcttgaagatgttggcctcgttcgatggcttcaggtcggtgtacacatccgcgtgcttcaccttgaaggcgtagtaccgcttaatctgttccatattcagaatatatacaattagtaacacagctggaaactgggttgccacactagactcaccagatcacgggcactttccgggtaatacttgcagggccgcaggtatctgatcagccactcctcgtttcccttggggtacagcaagtccgtctccgctggaagcatatcgcaaatattaatcgacctcaccttcaatagtcttaattctaaaaagtcactaaaccactggcattaagtttatccagcaattaaaaggcaatcgtaatttgtaacaatagttacgaatcttatgcaacgaaatcctctcgagggcgcgctgcttttagccccaacttgttattagtgacacgaagtcgccaactaatgatatagaactattcgttcgaacttggtgtacaaatggattttcaattcccaacaatcgggtaaattattagatgcaggctaagtacgaagtttatggcttaagttttattaactcaagtttttatcagcttttggagatccctcggatataaattatgaaaatagcttagcaaaatgcatattgtatgatctcagttcagatatatgtatatactttaaacagatgtaatgcagtttcaatgactttcatcatgtgagttttaactcatgtagttaatgtataattatattgattcaaagtaaaactccatttctgatcacgactcaccttctagaagacgggccagctccttggaggcctccttctggcgctcgggtgtttcgcgcagctccttgatggccacctccttgccctgggcagtcggctcgcccaactcgaactggagcgtgtagtcgcccacctggagcgtgggcagttggtcgatgtccgacagcatggtgggtactcctggaagggaagcagttggggttcggttagcgacagcttctgtactttgagctggggctgcgggtttcacactgagagcactgggaactttggccaactaaataacttgagctaactgacatcgattgccaattagttgtcatacttcacaattactacttactcattttgcaattgttgctgctctggctgaactgaaattattctgcgattatattaagctatgtgctttttctaagcggttcgccgctgtatattttcagtttgccaaatgtaaaattgtgccctctatttataagaagaaaaaagcgtagagatttcaatttattagcgagacacaagtgactcggaaccggctcaactgcatcgagtttctagactttcccgccagtcaatgcgatgatcgtctaaacatatccatatatgtattcatttatttattaatcacctggccgaccttcaccttgacattcgcaaattgcttaaaacggaagaagaggccagagattcgcgaagataatgcaattcttcagagatcagaaaataacgttaggagccttgaactaaattctggagacacttgacgcgttctacttgagcgtaatttccagttaggcaggtttcgaattgcgagatgaggagccagggtctgtgagcttatatagtggggcagttggatatcagaaattagcacactagatttcccatcaaatcggaaattagcgctgaagatttcccatcaaatcgaaaattagcgttagtgctggctcgaaacaaaagactaggagattagcatccgaagcgctgacattgaaaattgctaccaatttcggctagatgggccaggtgatttgcttagggtatcgtctgtttttgcattcatgaatgatacacaagagtctactgaatcgctgatgttgtgtctgggaaaatacgagatcttaaatagtacacacggatcacaacacaacacaagacaacacaacacgaccgaaactagtttggcccaaacttaaaggctataatggtataatggctaacagtattccgcaaagacggcccaaaaaaccagctgcgagtgacgcgtgcaacggagctgaaagcccagatgaaactgttgcggccaaaagcgcgagtcgagattttatgccaggccaagaattaaaactggaattgtgagcggagcggcatgagagtgggtgtcgccgatcgagacgccagtgctgccaagtgggtttgtttcccgacagtaactacttctgctataagggggtcttttaactatagttgtttaatgctttaatgcaccaaaatgaagtagtttcaacataataagcttctactgaaacatatattttcttgcttgcttgcactagtgatggggaataactatataatgctattatatgaaacaagttgtgcacccattaagtgatcatcaccagctgaatctgaacttgagcatgacattcacgtgcctcgcaagagcgtggagttgctagatggagagacacatggagtttgcccagggagagcgagcaagctttactgggtctggggtgcatcgtcattgggaaatgatgccaccgccacctcaagccggtttcagtttcgctttcaacttggacttgcctaatttattcgggttttcttcgggtaatcgcccacagtactattgggctcttgaaaatcccttggcataggcatttcccatcgcgaccctgaagccccgtgcccgtgcatagccatccggtttcaatgctgcccagctacacgccaattagtgcttacacctgttcggcgtacctacacctggggtcaccccactagcaatttgttggagaccacaaacattggacacttgaaagcatcttcaactatttatagatcatagttatagatcataagatcgcatctaatgacaccgcatcaccatgtcatatcatatgtccctattttctcagccccatgtgttaagccaggcatatttggtataattaacacgtcccaaagccgagcaccctctgcgttgtggacagcaaatggttcccgcccggttttggacaaatcggttcaatcgcacgatcgcacgtgcgaagacttcggccattcatggatacggatttacgttgcgatgatactctcgatttcattacggccagtttcggtcatttggtcaatttttattggccatctcgaagcggatgctgacgaaaactgggtggtacaaagctgcgagtatatggaaaaaacttgaagcgagtaatatgagtaattctggggttacgacccattgcaatgtcaaccttcgcccttcggttttttctttgcaaaaagcgtgttaaaaaccctgcatgagaaacctgcttttgaagaacgtgacaatggcggttcaaaagcaaaagtgctttgaccttactcaagagatggaaaaagtacaagtcggtagatattactgacatcgaacaaatggattgttacatgaatactcgcttgatgtccaaacaatttagatggcatatcaaaaggcattgcaaaaagtgttgttttttttaaattatttatattttgaataccttttaaatactctttctcgaactaatcgtgactttcaattaccagcacaactgtatataagtttttaacaaactggtgtatagtttttcgagcaactgtagccacgcgccttatataaatacatacgtacgtatatagaaaataattctatttgagggagataattctaagaaaatgcatatagtacttgcaataaatatacgataaaaaatggggttcggcagatttcgctattgctcaccaagtgggaattcagagggcaggcacctcatcgcagatgcagtggtcagcatggtcatggcgatgcagatcgaatgaatacacacacaagttactttacaactaactaaaccggtatgcacatgcaaatgctagcgtatgtaaataaattaatatttctttattcaggctgatcgagtcgggagcatcggcggtggctaaatgggtcaatgtcgtcggcgagttactgaactttgtctgaaattctcgagcgacgagtgcgaaaggggggaatgcatgcaacagtaatgagcaaaaggcaatgcaaaaaacacggacagacagtgatgcctcgtaaataagggctgagcgtagctacatagtgatagtgatggtgatctggctaagatatttttatggtccctagcgctacacactcagaaatgcactcttaaaaagaaaagcactctatatgtatatatatatacaaatgtatatatgagatccaattactcaccttgtttgaattgaaaatcggctaatccacaaatagttggctggtacagtggaaatccttcggaactcccgttcgactccgatatatgtacctagtgagcttgggtcgcgtttgaagactgaaaatacaaagctgcttgtcaaatcgttttatagccgccccttttatgcactgcgtgcattgcacatatgtattgtacgacaaagttatagttatcaagatatatacataggtcggtcggaatagtcgggcactcgtaaggccagcgcgacttaataggtcattataagcgaccgattcgagttaagagctctaaagatcacgtcgcgaatcgccgcatgggatcttcttttttttttttggcttgttttgcataagttcacctgaaaatggttcactgagctcagcattaattttatgttatttccattgtttttagtacgttaaagtgccaagacaagtgcggtatttctcacggtgcagcgcactcaatcgattttccacagcaattaacattattaaatataatgttgcagaaggtacactgaaagtaagtgagtactacaaaattcaagaactttcttcactttgtgtgcacttttagaaatgttcttgacttaaaacaatatagttattattattattattgaaaaaatccgtactttctatcaggaaatccactttgctatattttgtaactatatacactttgtaacttgtactgtttagcactttcgagaaattctcatctgccacttgcgaaaagtccacttcctatatttgttctagaatgtaaacgaaggaatattttcatttctcgtcgcaaaatacgaaatttttaagttagctatatagcatcggggcactttcgcaatcgcggcacagctttatatatgtatatatatttatattaagtgcgtgttctgagcgtttcgcacagtgtatcgtggttaatcttctgatggttacgcgacttggatgcaattagacttgaacttttgaacgctccgtacacgagtagtttaaagactaatcgccttcgccactgtgactgagtgaaaaacgagtttgtaatccctcttacggatcgtaagtgtg

SEQ ID NO: 28685 - DNA, 1015 bp, DROSOPHILA
tcactaggtacatatatcggagtcgaacgggagttccgaaggatttccactgtaccagccaactatttgtggattagccgattttcaattcaaacaaggagtacccaccatgctgtcggacatcgaccaactgcccacgctccaggtgggcgactacacgctccagttcgagttgggcgagccgactgcccagggcaaggaggtggccatcaaggagctgcgcgaaacacccgagcgccagaaggaggcctccaaggagctggcccgtcttctagaagcggagacggacttgctgtaccccaagggaaacgaggagtggctgatcagatacctgcggccctgcaagtattacccggaaagtgcccgtgatctgattaagcggtactacgccttcaaggtgaagcacgcggatgtgtacaccgacctgaagccatcgaacgaggccaacatcttcaagcacaacatccttaccgtcttccccaaccgagatcaactgggtcgtcgcattttggtcctcgaactgggcaagcgctggaagcacaagcaggtcaccctcgatgaggtgttcaagggagctgtgctcttcctggaggcggccatgctggagccagaaacacagatctgcggagccgttgtgatcttcgacatggatggcctcagtctccagcaaacgtggcagtttacgcctccgttcgccaagcgcattgtggactggcttcaggactcggtgccgctccggatcaaggccattcacatcgtgaaccagccgaagattttccaggtggtctttgccctgttcaagcccttcctcaaggagaagctgcgcagcaggatcatcttccatggcaccgatcgcgagtccctgcacaaatacatgtcgcccaagtgcctgccagccgcctacggaggattccgggaggccagccgcatcgacagcgaccagtggtaccagctgctgctcaagtgcgacaccgagttcgacaccatcaactcgtacggctacaagaagaagtga

SEQ ID NO: 28686 - protein, 301 aa, DROSOPHILA
MLSDIDQLPTLQVGDYTLQFELGEPTAQGKEVAIKELRETPERQKEASKELARLLEAETDLLYPKGNEEWLIRYLRPCKYYPESARDLIKRYYAFKVKHADVYTDLKPSNEANIFKHNILTVFPNRDQLGRRILVLELGKRWKHKQVTLDEVFKGAVLFLEAAMLEPETQICGAVVIFDMDGLSLQQTWQFTPPFAKRIVDWLQDSVPLRIKAIHIVNQPKIFQVVFALFKPFLKEKLRSRIIFHGTDRESLHKYMSPKCLPAAYGGFREASRIDSDQWYQLLLKCDTEFDTINSYGYKKK

SEQ ID NO: 28687 - DNA, 6693 bp, DROSOPHILA
tctttttagtagtacatttaatgatcacctaacaggcaacaaaaatcctaaaaggcactcactaatagattcccttctcgccaacagggatgaccgccttcgtactgtgcattctggccatgtcctcgggactggctgcacttttctccagccgcatcaagaagctaatcacaccattgctgaacaagacgttccacaacttcctgggattcgcgtgctttgtgatcgcactggtgacccagtactatggctaccagacgggctactttaagagccgaagtgagacggatttccaaatcctgatgaagtgcctcaccctcatatcgttggtcctgtcgagctacggaccgatgaaggcactctatcagaaatgcaaaaatatatcgcaacagttttagataggatgaaaagaatcactcgaatgtatgtagataaataaatgtaattttttctaaaaccccattttatcgacctatccaactataccaacaacgattcaaaattttatacctgtttattggtacaacgtgtgatccataaacatgactaagtatttttacaatgcctcattagggaaaacccggttaaccagcggtcagactttcatcgtccggtactcccccctgtaaaagttatataaccacccttttgattgatttgatttgataaggtctgaaaaagtaatgaattgactattagatacactgcaatttgcatttaagtttaaccgctcactcaaaaagccagcatttgaattaatcaatcaaaattatgatcatttataatttaagttatactattattcattttcctataacagcattgggtagcatgcatcattttaaaatccaaaacatgaccgggttttttatctgatcggtttgtgacacttggaggccgcataattgatagtaactgtcccaaataagtccaaacttttgaagccccgtaaaaagaagatcttgacttccggcaccttaaattaaaaaaccgtgtattttgcatggtgcagtttcgtatgtttatttagaaaatccatatcatttcttcttaaatctctcgcaataaataatacttggcgcgtgtgtcgcgttgtgtgtgtgatacgtatatcagttagcagtaataataaatagctagcgttaggtattaaaattcatagtcaattgggtaatacaaggctgtctggctttaaaaccccctttctgggtaacttttggtaagagaaagtcaagatctctatatagaatcgggtgaacagatctttagcatgcggtaggtaaataggagttatcagctatcgactaaagcccagttaagaattgtgtgttgggcaaggcatattcgaaattcgactttctatatcttttcatagtttccatagttcgctccgctcacagcttgttgctgcgtcgaatggcgaaggacattagcgcgtgctccagccgcatgtggtagggtagcttgcgctccagaatgactggctcctggccatctggacagcaccggttgcggcagcactcgcactggccgtcgtcatcgtcgtattcctgctgcagttcctgctccagttcgtaggccttcttggcagcccgctgctcgaagcgcaaatagaaggccaggcagacaaacagcataaataccagggcacacatggctccactggcaatgctcgccttctccaacatcggacgcggcctcttgggcaggtaagtattgtcgatctccttgtattcgcatcgctgtcccataaagccaatcgcgcactcgcagctgtaaaccggtagatcggctatcttcaccgcaaagcaatgggcatcgttcaaacagtaccaggcatcgaaggtttccggacatttgtatgtggggaatgtaatattgggcctgggcgtggtcgtcgtggtggtgcgcattgtggtgctactagtgactggagcctgggtcggcggcaatgccgtgccggacatggacgaggagatcgaagagcgcggcttgggcaccgtacggctggagcaggcctcgacgtgccacggatgtgccagacagccgatcagtaccagggcaaccagcccatgttgtacactcattgtggaatgcattacaatttgtagctttttagcgtagcgtatcggcttgttcgttttttggcgtgcaacgtttggttgtttaaaagcttaagaatattaaaactagtgactatcacataaataaattagaatattcgttgtccgctgctagggcgtcgtcaaatctctttggaatcgggtttctctacataggtatgctgctggtggaacgtaaacgttgagttaggggtgatgtgtgtatctgtggggaagatggaaagacattagtggccagtagtctccaagcaccatcgatggtttttaactctaaaactgtgtactcaacagaagggggaaaatcaaactgcgtaaaatcataattatatatgtatgtatttataaaagtataaactataatagatcgctttgaatagtagttatgttacaatcagcaaattttactcctttcttcacatccaattcactttcggtttaaaatttcatttacgttgtctcccgttgattatcctagctcatcaaagctggctgtgatatgcgttgggtatccatatcacaaccacttgatgaggcttagataatcaacatcgtacaggtaaggaacagtttccttaactttatgaattagtaacatggttagtaacaatattgcaccgcatgtgtgtaagtcagttcgatagggccccctaagtctgaggtgccagtccaccagttgagccatttttcggtgctgtggcatgcatctgtcccccgttgttccgaattcagatctctgttagccgcgtttattttccgattgcatttcactacaaatattatacagatttgaggcggacatagtgtgttttatttatgatgggcgtgtgaattatgtggcgggaggtattattatgatttgatgtacgatacattacgctaagctcatcaaagctggctgtgatatgccgcgcaaagcggaaatgcatttcacaaccactttgagagcccagcatgaatgcgccaatatagttttattgattgaggtttcgggatacttgactgcgggagttcagaattttcaattttggttttcatgctcatgtaatgatataaacaaaatcagacacttgttaccgtttttatactttttgtgttcaattatgctttttttttggaattttcaaattgttttttgattgattttttttttgccttgagcatcgcgtcgctcctcaaagctggctgtgatatgaataggcataaaaaggcaaacatttcacaaccactttgaagaatgacacaattctcctgtttcgattcgatgagagccgaggtgcagattcagattcagattcttctaggggtctttttgcaacgttctcacggccgtcggctttgagccttgtacttttttgcagccacggcacaataaacaaatatgaaaaaagtacgtaaataaataaatgcgacgacgagactacaacacgatgataatgacgatcatgacgacgacgacgataatgatgattatgatgatgagactactggtactggtgatagataatacgcaaatgttgattgcaatgaatggcgacagagcgagcgcaagtgaatgggacaatttcgtacatatctacgctatagactggccattgtttcaacaacaacaacaaaattcaacagacacaaacgcacacaacaccgaagaacaacactgaaagagggcaaaaagcaatgcaccccaaataattataataaaaatgtaaacataattttggcgccagcctttggcaatttgacgccaaatttgtttttagatgatttctgagttcaagttcgggaattcaaactgataagaaatgcaaacgatgaataacaaaacggaagaaccgaattcagttgatcctccagaagatcatttaaataatcgattttatcgaaaaattttaaatgcattactgacgaagttcaatcactttaaaatgtgagcaaaacaaaaactttttatatgaaaagacgaatgctgttcaccatttcgagcgcccactgtggtgcaatgcaaaaacagttatacgttgggtgtggagacttatttatgtattagaatgcttttacggttaacaattgctgcactctctaccctctctttctcgctcacgcgcggcaagcgggcagcttattaaaatttccgttataaaaattaaatccaccgccgctgcttttatgttcataaatacatgtgatacgtcgcatgcatgtacacatgcacaaatgtatgtatatacacatgtatgtgcgtttgtgtgcgagaggaagtcgaagtaaggtaatgagcgtaaagtcaagttgaatagccatataaaatgcgctgaacttgcgagcgtgtaggtcaagatcagcggcggccgtttataatattttgttggttttcgcaaatagcaattgacgaaagttcgatgatcttgtagtacatttcaataatgggggaatgagccaactagcacgatagcaacaacagcaatatatacaagcatcacaataattacaacagcaacaacaacaacgatcaactatattagagtgtggacggcaaaaagtgtgcatacatacatgacaacaaaaacacccgctaataaaaaatactgttgtggctgcttcttcttctgctcttgcgtcttttacaacttcttcggcaagccagttgttgttgctgtaattttcatgttgccttgctctctttcattcttgggcgtcgctgcgagttcgttggctcttctcgtttctgtatgtgtgtgtgtttagaaaactgtaaggaaagcaaagtgtgtgaaaaatatggttaaggtaaaaaatgccaatacaggaacaacaacacagctcgctctcttttctctgcctgcagtttcgaaaaaaaatttaccggtttttatgttttcgcaaaaaagctcaagaaacaagtcctacaagttttaaatcgagagaggagagagcagaaaaggcgtgagagcccaaagaatgcgcatttagcagagacaacaaccttttgaggtgtgttgcgtatacgtgcatattcgcacacacacaccaccaacgcttcagctctcgctctctttttctcgcttcgccatctcactcttactccatgcctttcaggggataaattatgtatgtatatatgtaccatgcgtgtgtgtgtgcgcgggaatgttgtgaggaattctaagaattttgcacaagcgacaaatgaaacggggcgcggaccacacatacatatatgtatattccaaaaccaaacaaaagttttaatagttcaaaaagaaaattgattatgcgtcggtatgcgagaagcgccaacagccgaatgcgaaatatatcacaccaacacaaatacagtgaaagcagaaaagacgcagaagatgggaaaattcgaagacaccgcgtgtaggcgttaaaacctattttttttgcccaacaccaagctaaatgaaacactgctcactaaaacaccaattcactatgctttatcttcacaaattaccaactgtttgcatttaaacttggacaacattagggggcagaacgccgacaacgcacaccgcgcacacgaaaaaacacaaccgcaccgccaaagattcgaaaaccgaatgccgaacaacaacaaaattggttctgaagatggaggtgtttttcagcagagcgagattccctggctcacgctgagcgggagagaacgagagcgacaaagtctctcctctaaaaatgcggcataataacaacaaagtggcgagcggctttcgagctcatgctgtatgttgttgtatacccgttacttggagagttaattgggtatacggtgatgggctcttaggcaaagaatttttccaaaatacactttgcataattactcaaataaattgcctcagaagctactttactcgtttaaatcttaaattaatattattccattaatgtcaagccacacaatacaaaattcaataggaatcactcacctatagctgtcattgcaaacaaatgatattacctattggactaaagggtatatctgagtagttacgcttcgtaaaaagggctctctcttgttttggtttttgttttggtgttgccagaagatttcgcacgatgtaggatcaacatgttattgacacgacgtcgccgacgccgccacttttaagcttggcggagcaaaaggcacacaaacaagaagcgacgcagagcggcggtgcaaaagcacaaaaaaaaagaggaaaaatgcgctcgagagcggagggcgtggcggtgcgcaggggcggggcaggtagccggacaaacaggacgaacaggatgaaacccagacgagttcggccccactgcagatttcatggaactggccgaaggttgaggatgcggatgcgatgcgcaggcgcgcaagtaaacaacattccattcctcgggaaatttcttctggccgctcgagaagcgcgccaaaaataaagctccgaccgatgtcgttgccataaatattgctattttgactttccagattctcgcgattcaacgccccttgaaatgggagcaacttgctggagattcgcgtatcagggctggaagagggtttctccaataactgcac

SEQ ID NO: 28688 - DNA, 1420 bp, DROSOPHILA
tttggcggtgcggttgtgttttttcgtgtgcgcggtgtgcgttgtcggcgttctgccccctaatgttgtccaagtttaaatgcaaacagttgatacacacatcacccctaactcaacgtttacgttccaccagcagcatacctatgtagagaaacccgattccaaagagatttgacgacgccctagcagcggacaacgaatattctaatttatttatgtgatagtcactagttttaatattcttaagcttttaaacaaccaaacgttgcacgccaaaaaacgaacaagccgatacgctacgctaaaaagctacaaattgtaatgcattccacaatgagtgtacaacatgggctggttgccctggtactgatcggctgtctggcacatccgtggcacgtcgaggcctgctccagccgtacggtgcccaagccgcgctcttcgatctcctcgtccatgtccggcacggcattgccgccgacccaggctccagtcactagtagcaccacaatgcgcaccaccacgacgaccacgcccaggcccaatattacattccccacatacaaatgtccggaaaccttcgatgcctggtactgtttgaacgatgcccattgctttgcggtgaagatagccgatctaccggtttacagctgcgagtgcgcgattggctttatgggacagcgatgcgaatacaaggagatcgacaatacttacctgcccaagaggccgcgtccgatgttggagaaggcgagcattgccagtggagccatgtgtgccctggtatttatgctgtttgtctgcctggccttctatttgcgcttcgagcagcgggctgccaagaaggcctacgaactggagcaggaactgcagcaggaatacgacgatgacgacggccagtgcgagtgctgccgcaaccggtgctgtccagatggccaggagccagtcattctggagcgcaagctaccctaccacatgcggctggagcacgcgctaatgtccttcgccattcgacgcagcaacaagctgtgagcggagcgaactatggaaactatgaaaagatatagaaagtcgaatttcgaatatgccttgcccaacacacaattcttaactgggctttagtcgatagctgataactcctatttacctaccgcatgctaaagatctgttcacccgattctatatagagatcttgactttctcttaccaaaagttacccagaaagggggttttaaagccagacagccttgtattacccaattgactatgaattttaatacctaacgctagctatttattattactgctaactgatatacgtatcacacacacaacgcgacacacgcgccaagtattatttattgcgagagatttaagaagaaatgatatggattttctaaataaacatacgaaactgcaccatgca

SEQ ID NO: 28689 - protein, 230 aa, DROSOPHILA
MSVQHGLVALVLIGCLAHPWHVEACSSRTVPKPRSSISSSMSGTALPPTQAPVTSSTTMRTTTTTTPRPNITFPTYKCPETFDAWYCLNDAHCFAVKIADLPVYSCECAIGFMGQRCEYKEIDNTYLPKRPRPMLEKASIASGAMCALVFMLFVCLAFYLRFEQRAAKKAYELEQELQQEYDDDDGQCECCRNRCCPDGQEPVILERKLPYHMRLEHALMSFAIRRSNKL

SEQ ID NO: 28690 - DNA, 8031 bp, DROSOPHILA
acatgtgaaaaacaaatcgaaaagaaatttactcaataaatgatttttcgtatataagaagtgcattttgaatcaagttttgcgattatccttttcaacaacgttttaaaattaagaatatgatattttcgaaaaacatttttcagaataacttggccaaaaaaggtggctcagctaaaacgatgactgttttgtgttgcttattaacattgctaacaatctgtaacactttcaaaccgagtttcaggaataatttttttgaccaatttaagcaatttttcattaggggtaccatcatcaaaattcgacaaattaccgattttctcattttcgataaccaaatttgcaaaaaatggccaaaaattaaagttgccagacttaaatacagttcgatgaggaatttggaacgatttcaacgaggtatgagatattccaattttggacaaacctttgatttaatataaaaagaaaacttttgtttttgtaaaaaaaagagcaattaaaaaaccgcgttaaatgcaatacattcaaactagtttttatcatagtttggcaaaaggaggtcgtacaggtcgttgttaatttcccaaagaagcgtgcagattaattgtaatgaatccattattaaaacataaaatagtctttaacttttgtgtaattcagaactcgcaataatataatatataatataaaataatataacataatgggaaagtcgatgtaaaaatatttttaaggtattaaaaaatatcgatattgatgcttcaatccccgcttgccttaattttataataaaacgtaatatactggttttaattacatcaaaaatagccatatttatttatactagcaaaagttaccgacaaaaatatcacgaataaaaaccgaaatctagctgaatatcgatagatcgccgaataaataccagttaaagcaactatcgatatgcggtatttttgcagctttcatccccaagtcactgggccctcgagacccccaccactttacgaatttcattcgccaagtgagcacgcggcttcgtctgattctgcaaaagaagtttttattctgtgacttttgtgagaagttatcaactgaaggtattgtgctattttctatatctattacatttgcgaggctcttttgcttaacaagaaaagagacggtgtgccccgtacctgccattgatttttttttacccattaattcacgtcaccttgcgctagattctgtagttatgtaatgtgctaatttttttattgtgtcggtgttggtttaaactaacgtttttttttgtatgttcgacaagcagttccggtttaactgcatcgaaaagaaatcccgaaatgggacttgaaaatacccgaaaagtgcttacataacccttgcgaaaaataattgtgccgaaattgtgtttgccatcaattaaacacgtaataaattgggcgtattagcaaacttttcggtattttatacccccaatccaaagttcatttagaatacccagaaagaaaatggaagaagccacgctggatctttttcccatctatttccttccaatttgcaaccacgctggaactgccaacttatgcaatagcaacgagttggcaggccggctcgtctgtacgaaaaaatgttgcacatgaattgcgattatatttcaaagagaattgcacttctctagaatcaaattggcctgcatttgcacaaatatattattatatacaccaaatgcaggctattctatagtaaaacgcgtggcaattgattgttctaccgcccagtcgcacatgagtgtgtatgaacacacagttgcgaataaattccatgtgccactaacgccctctcgctcactcccatgccagacaccagctgcgcgtgcaagtacttatcgggtgtgtgtgtgtgaagaagagagagagagttggttttatttcttaagagtaatgtaactatttctctttggttgcctccctttcttttctgacctgctttcttttattaaagataaaaattcatgcgaaaaaaacgggtttccccagtgttctcatttcttctattattattccattcccataccccttaaaccctttctgacgtcaatcgttaatgtacgtatagtattcatgtgatttattgtttattgtagccctttgtgtggccttttagtgcgattttgcacttggttgagattagtgtttattattacatatccctggcgaatcacatttccaattctcgcccagtcggcggaaattttcagtgtgattttcaagccgatccacgccctgtcctaaaaccccgattcatcgcacactgagccataaaaattataacttcgctgccgtttaattttggcaattaagcatttttgcagtaactttgcaactgcattttttacgctctcttttttgatgggcaactagctctcttttattttttatgtaatttttgtgataacgggaccttgaaaaagtgtcgtagacagttatataaattaactgtattagcagaagtgtttatctaatcgcttcacgcattttttttcgagcgccgcccctcttccgcctgcgtgaaagagacgaagcgtgagagagagggagagagcggcaggtggacgtcagaaagcaaagtcacatgctagcagtgctgccaaccctatctttagaaataaagccaaatgttattaatagcttagcaattaaatagctacaaacaattaataaaacctttcaactcttttcaacttttatttttataaaaattgataatagttttggtttttgtatttgaataaattgttcactgctgtatattgaagttttctaagccagtccaagtagttcttaaaactgaatatcaaagataccccaattttgttgaataaggaagacatgtatttgggtgtaatagaagtacactattcaatcttctagaaatctagctaacaactagctaaacgggactatccgtctgcttcgcagctgacttgtcggctatttgccaaatgtaaatgttgtgcgtacattcattttggcaagcgtttagaaagcgccgtcgaaaacctcgaaaggggtaaatgaaaaacaattggccatatatgcatttttggtcatggccaaaacgaaacaaaaagtgttttctaatgagtacaagtgtgtggtacaatacttcctcttatgcaacgaatggcgacattgaattcttgaattctcagcactgataagcggcgatctctcgccctctctcgctcgcacacgtgctgttgccaaccgctagttttttttcggctctctccgaatttcgcatactctgcatatgcatatagagagagaacgctctccccctctctcgctcacgctcatctgttgctgaacttgacgatggcggcgactgcgacgccgacgtaggcagagcaggctagctggcagatttcggcgaaaggaactttcacaagcaattcagttgccgtccggttcagacttctgacttccgaggaataaggataaatttttttcggttttgtgctgtgatatagaaacacaaatacaaattgtacgtatggcaaacaaattggatatcaattatcgaatcgaattgagccatagcccatttaacaaaatacgcgtgtggttcctaatgcttttattattattttttttttttaaatcaaatccaacctgagcattgaaagaaaatctgcctggttatgtaaaacaacaaaagagttgaacttgaatcattcattgaacaattttttttctggtgtgtggtggtggtcttatgcaatcaataacaatgaattaagaataaacttaacactggattgtggatactactacgactgctcagccttcggtggaagctttccacgtgcaactgtagaatttttccagctgaggctattacatcacgagccttttagctctcggctctctgtggctgtggccgaagaaaaagcttcactctctttccagccaatcaaaagtctaacacgattagataacggttgttatttcaaagaaagagaacagaagagaaacgaaacaatggcaaagcacagttctctttgccaagtgtgttacataaaacccttgtcaatgaaatgctgatttaatttcgctaaaatataatttaaaccacacggctaacgcagagcggcggctgctcttgaaagtctaaaattaacaaaacgcgcttcaatggcgaatgccaactgccaaaaaaaaaaaccgtggcctctatagccatcttgctcacacccactcaaatgcccatatatattggctttttccattgaactttttcaattcaattcttttctttttttttgtgtggtgtggcaattatgcaatcccccaatctttactcaatgaaaaccagtagactgccgctctatccaactagaactgcaattgatttatgtcatattctctagataacataaattagataagcacttatgtatttatgtatgccacgtaatgccatgtattttacttagttttcaaagctaactggttagaacttaattttccaacagtacttattttatatcgatttaaaccaccacgtggcaaccagccggccaataaaacttttcaccttttttgcacaaaaccagttttaccggcaactgccaacacgcatactaacacaaacaacaaataattgtaaccaaaacgctgatgtttccataaaccattcaatattaaccccctttagcattaagtttaagttgccatttatactaactgtgcatgtttttatttgtttcatttgtcgctaaaacctttttacttcacccgcaaaaatgttttgtaaccatttgtagtgctgttcaaaaaaaaaagtgcatgtttttcggtttcggtttataactgttcaaaaaaataaaaaaaaagtgcatgtttttcggtttcggtttataatttaatacattgaaaattttcacattttcatttggctttgggctattcttctattgtgcctttttttgcacccgtgtaaacaaagtgaatcgtacatccactatacaaaaataccgtaaacgtatatcgtaaccattatgcaacgcaccatcacccgcatgccatggggaatatatcagcatccataacatcacaaaggtatatcatcatcggtatcaccaagtatcaccatcagcgatgacggaactgtcgagattaatcagagttttggccaattgcacgatgtgtttacagcaaaatgggcaaggatttcgatgctgttggattcgtcaaggatttcgctgccggaggcatctccgcagctgtctccaagactgccgtcgcccccattgagcgtgtgaaactgctcctgcaggttcagcacatctcgaaacaaatcagccccgacaagcagtacaagggcatggttgattgctttatccgcattccaaaggagcagggattctcgtccttctggcgcggcaacttggccaacgtcatcagatacttcccaacccaggctctgaactttgccttcaaggacaagtacaagcaggtgagactttgcagtctgcatgttagcaatgcgagcggaaaacactaacgccccggttgctattatgtgtgtaacttaggtcttcctgggtggcgtggacaagaacacccagttctggcgctacttcgccggcaacttggcctccggtggtgccgctggtgctacctctctgtgctttgtctaccccttggactttgcccgtactcggtatgttggtatatttgcgaaaaacaaaaaaaaaatgtccaataaactaacgtaatgctttcgctacgaatttacagcttggctgctgatactggcaagggtggtcagcgtgaattcaccggtctgggcaactgcttgaccaagatcttcaagagcgacggcatcgttggattgtaccgtggtttcggagtgtccgtgcagggcatcatcatctaccgtgccgcctacttcggcttctacgataccgctcgcggtatgctgcccgaccccaagaacacacccatctacatcagctgggccatcgcccaggttgtgacaaccgtcgctggcatcgtgtcctatcccttcgataccgtgcgtcgtcgcatgatgatgcagtctggtcgcaaggccaccgaggtcatctacaagaacacactgcactgctgggccaccatcgccaagcaggagggcaccggtgccttcttcaagggcgccttctccaacattctcagaggaactggtggcgctttcgtgcttgtgttgtacgatgagatcaagaaggtcttgtaaattaaattattaaattattcaaaacaagcaaaatacaacaacatacaacaacaaaacaaaacaaaagaagtaaaactaaacactaccagctaattatgttagataactgaatgagaaaagctaaaacaacagcaatagcaacagcaaaggcataagctaagtttgatctgcaaccaacacctcttaccacgaacaacggcaagcaataacagcaagaacccttccttcctcaccccgatataattatgaaattatattatttataaaaactgggaactaatttacggaacgatggccagcgtcaatagaacaacaatactacagcaaacagcaatgctcggggcagagagaggatgcgactcagcacatgagactagacccactacactgaaagacgaacgaacatagcgacgatatcgattagtattgttaagtttgggttaggctatatactatagatccagtcatgttgctgggtcgtcccacatctccccagccaaatcagtgttatcgatcggatgcaaagaatcgaaccgaagacctgtagattctttcgcctccgaaacgacaaaccaacaaacaaactcaacttcggttggtttaaaaatatataaaaattgataaaaatagtacaatgttgtgtttttctttctgcgcacgtacatatgtatgtatgtatatcgatctttcatatttcgacttgaacccaattattgcaatgaaagtacatatgtatttgtaattcaaaaattatattagcatacttacacagaccatttgtgcagtcaaccaattggtcgtctcaatttaatcttcggcagttcgaagctaaattattataattattttctgttgttaaaagaggaaaaaaacgtacgctcatcgcttctaaaattgttggtcaaagtaggccacgataaatacatcgaatgtcatttcgaccgactggcacacaacctcgttagccaatctcagttcagatctcaacgttgtaacatcaaaattaaaaattgtaaaaagtgaaagtccgtttttatccttttttaccaaccaactttgaagctaaactaaatcgttttaaaatcattaaacagtaaactaacatgggcgatgaaggcggtggcggtggtcatggcaagggagaccttaagtctttcctcatggacttcatgatgggcggcgtttcagctgccatagccaaaacggcagtggctcctatcgagcgcgtgaagctcattctgcaggtgcaggaggtttccaagcagatcgcggcagatcagcgctacaagggcatagtcgattgcttcattcgcattcccaaggagcagggcttctcgtcgttctggcgcggcaacttggccaacgtaatccgatacttcccaactcaagcccttaactttgccttcaaggatgtgtacaaatcggttagttgtttggacaatccttataataatcatttcacatacgcctataacatataaaacataaaacatactacaggtattcctcgggggcgtggacaagcacaagcagttctggcgccactttgcaggaaacttggcctctggcggtgcagcaggtgccacatctctgtgcttcgtttatccactggactttgccagaacccggtaagttgattcattatatacacattcaattggttttttcatttatacacatatacattaaaaattgataattttgagtaattgaggaaaacaattcgaacctttacatacttactat

SEQ ID NO: 28691 - DNA, 1750 bp, DROSOPHILA
cactttacgaatttcattcgccaagtgagcacgcggcttcgtctgattctgcaaaagaagtttttattctgtgacttttgtgagaagttatcaactgaagcaaaatgggcaaggatttcgatgctgttggattcgtcaaggatttcgctgccggaggcatctccgcagctgtctccaagactgccgtcgcccccattgagcgtgtgaaactgctcctgcaggttcagcacatctcgaaacaaatcagccccgacaagcagtacaagggcatggttgattgctttatccgcattccaaaggagcagggattctcgtccttctggcgcggcaacttggccaacgtcatcagatacttcccaacccaggctctgaactttgccttcaaggacaagtacaagcaggtcttcctgggtggcgtggacaagaacacccagttctggcgctacttcgccggcaacttggcctccggtggtgccgctggtgctacctctctgtgctttgtctaccccttggactttgcccgtactcgcttggctgctgatactggcaagggtggtcagcgtgaattcaccggtctgggcaactgcttgaccaagatcttcaagagcgacggcatcgttggattgtaccgtggtttcggagtgtccgtgcagggcatcatcatctaccgtgccgcctacttcggcttctacgataccgctcgcggtatgctgcccgaccccaagaacacacccatctacatcagctgggccatcgcccaggttgtgacaaccgtcgctggcatcgtgtcctatcccttcgataccgtgcgtcgtcgcatgatgatgcagtctggtcgcaaggccaccgaggtcatctacaagaacacactgcactgctgggccaccatcgccaagcaggagggcaccggtgccttcttcaagggcgccttctccaacattctcagaggaactggtggcgctttcgtgcttgtgttgtacgatgagatcaagaaggtcttgtaaattaaattattaaattattcaaaacaagcaaaatacaacaacatacaacaacaaaacaaaacaaaagaagtaaaactaaacactaccagctaattatgttagataactgaatgagaaaagctaaaacaacagcaatagcaacagcaaaggcataagctaagtttgatctgcaaccaacacctcttaccacgaacaacggcaagcaataacagcaagaacccttccttcctcaccccgatataattatgaaattatattatttataaaaactgggaactaatttacggaacgatggccagcgtcaatagaacaacaatactacagcaaacagcaatgctcggggcagagagaggatgcgactcagcacatgagactagacccactacactgaaagacgaacgaacatagcgacgatatcgattagtattgttaagtttgggttaggctatatactatagatccagtcatgttgctgggtcgtcccacatctccccagccaaatcagtgttatcgatcggatgcaaagaatcgaaccgaagacctgtagattctttcgcctccgaaacgacaaaccaacaaacaaactcaacttcggttggtttaaaaatatataaaaattgataaaaatagtacaatgttgtgtttttctttctgcgcacgtacatatgtatgtatgtatatcgatctttcatatttcgacttgaacccaattattgcaatgaaagtacatatgtatttgtaattca

SEQ ID NO: 28692 - protein, 299 aa, DROSOPHILA; identical to SEQ ID NO: 25038

SEQ ID NO: 28693 - DNA, 2480 bp, DROSOPHILA
attgacgattgaactatttcagcaacccaactatgacaatgcattccaaaccgattacaatgtgggtcccagaggcagcggcttcgacaacagaccttttcccagttccccggatttccgtggcagaggcattcgaccaattcctgactccccattccgcaatcaaaacttaggaacctttgtatctcgaccggtaatcttgtgcaatcgttttcctaactaaaaaactaatacaccttctccaggtacctatgccatccagtggttccattatcccccttatcgccggtggttccagtattccgactggtagaagtggtccccttggttccgggggctcttctaacaacttttaccggagcgaatcctatagctacacatcggatggaagaggacctccccaaatcgagcgggatgtgttcgactcgcgggatggatttggatcatcttatcgcaacttttaacacctttcctaagagaagctgatgaatgaaagttccgagttctcaaaaacaactagttaaggctgctagagattatactgacttgtctgtgtgtaatgtaaagattcttggcattacaaataatcagttattttactttccgcacggtttatttatcagactaaataacaattgtattgaatagaaagtcagtaaaactttcaaagctattgaaacctgacagcttacaaatctaaaaaaggtatattaaggtattcaatacctttgtaaaatgaattccacatttcttacgtcatacctgcactaagtagtaaacacttactagcgtatttattatatgctcattgattgttaaatcagctgcaatatgtaatcaaattttagcttccggcgagcgtgctaatacaaaacatgaactctggactactggttttgatatttgcaaggcagtttctggaaataatatatacgttcggactatgtatctgtagttatttggtttaaacttaaatgtacttgaaacatgatatgtttattcaaatgaaatcagagttggttaacttgtccagcttctcatagacatccttttcgttcttaaagtcattaaactgcttgaccatcgccgcgttcctggccaaccgactgtcggaccatgtgctcatgtatttctccaccttctgctctacgattttcagagtagtttccaagtttctttccaggatctgctccaggtcctcaactccgtgctgtatgaatagctgaacgacaacctcgtcagcttccgattcgaattctttgctgcctgcaatcgaaatgatgctttccagttcctcaagagcatcctccagtctgttcagctcgaatgaatcatcgaagtccagggtgtccaaggccgcgacgaagtccttaagctccctgagaatgtgtcccttggagtttggtggtaaaatgagttcggcctcgtcgatgaccaattgaaagacatgtcgtagctgttccatggcgtctgttaccatttgaaagagttcattggacacttcgaattgtaactgccatttgttaatgagaggcgctgcaagctgaaagttaaaggtttctgttgattccaaaaggatataagcaaatctaaggatcttaccgaaagctggagggcagctacagcgactagaaaagtccaagttagtctgctggccatgatttgaaactgtatctagtctctatcgaactgattccttttatattccctctcttaaattcacaatttttatacaaaatgggagaacgcctcctctgtaatgaatacccactgatcgtgagacaacgtatagactgtaatcagacttcagaaatcggtgagcgtgataagaacgagtgctgccccttcgtatattaattagtgggtagtggaaaccatgcattttgttattacaaagtcgtatatagttccaagtcacgataatatctttattgctttaaagtatcagttctcgatatctacacatgttgatcagacagtcggaaattttccggaagttaaacggcatttttcaggaataaagtcctcgtataaatagattccgaatattgttctttgaagtacatttctcattttattacaaacactttctaattctatgatattgtttaaatatttagctattaatcttaagccttcgtccatataccactggccaccccctgcaccaaagcctgagccaatttggtgtagtccattagctggagctcaggaagttggctcttcaggttctggggaaactccaagaaggttgtgatcagactgtccttggtttcggtggccaactgggtgacgttggaaaccaattccgacctgtcctgtcgactgagtcgcagatacttggtaagatgcggcttgaccttggcgaagaatctgcggatggcgatcttctcgccgggaagaacctcgacgagcaacttatcgggagtcttatggtacatgaggtcgctgtttatccaggcgaagatatagaatgcagt

SEQ ID NO: 28694 - DNA, 480 bp, DROSOPHILA
atggtaacagacgccatggaacagctacgacatgtctttcaattggtcatcgacgaggccgaactcattttaccaccaaactccaagggacacattctcagggagcttaaggacttcgtcgcggccttggacaccctggacttcgatgattcattcgagctgaacagactggaggatgctcttgaggaactggaaagcatcatttcgattgcaggcagcaaagaattcgaatcggaagctgacgaggttgtcgttcagctattcatacagcacggagttgaggacctggagcagatcctggaaagaaacttggaaactactctgaaaatcgtagagcagaaggtggagaaatacatgagcacatggtccgacagtcggttggccaggaacgcggcgatggtcaagcagtttaatgactttaagaacgaaaaggatgtctatgagaagctggacaagttaaccaactctgatttcatttga

SEQ ID NO: 28695 - protein, 159 aa, DROSOPHILA
MVTDAMEQLRHVFQLVIDEAELILPPNSKGHILRELKDFVAALDTLDFDDSFELNRLEDALEELESIISIAGSKEFESEADEVVVQLFIQHGVEDLEQILERNLETTLKIVEQKVEKYMSTWSDSRLARNAAMVKQFNDFKNEKDVYEKLDKLTNSDFI

SEQ ID NO: 28696 - DNA, 2481 bp, DROSOPHILA
acttaagtgcaactgatgacaatttcgactcaacggcagctcttatacgggaagattgcacactcgacgcttctgtgcggtaaatatgtttttttatcgtagtttttgacggtaatatttccgttccatatttacagtgatatatattactattctaatttcgtacagctttacttttttgtcattatagaagtattcaaagcttaaagttgtgtccactactgtccgcggaattatatatttcgatcttggcatgtctgcctgttcgttctactatcactttcaaacaagtaccgcaccgaaatcgagaaaccaccgacaggtctaaatgtactgctactaaactatccggttgatcgccaatgttccattatcgccaatgttccattatgacaaacaggaatttaatgttttaccgtctgatgaatatggaaaatattgaacaacctctgtgttcaattttaaagtccagacggttgaagagtgaaataagcttgtgtgggcgtatgtatgtttaaaacgctggacaggataagtatatcccctaagagggaataataataggcctatgcaccacttcagtttgacaccttttcaagaacacgaatcgaaaatcaagtttaagtgcttcattagtcctgaataacacatttaagcccatgggagggtgtccttttcacttggcaggtggtggatctggtcaaattgtggcttacatcagcgatgttagataagttttctgctacaattagacgcactgaactttgttttgccgcctatcattacagattgatccaaaatttatattattaaagacttcgaagctgtgtttttagtggtcctatggatagaagattattgagagcttccaggatttctgatttcttttagctcaatccgacgactggagatgattttctattatgaatatttcccttgatagtaaataatgggtttaaaaacgccactcgttaggcataccaaataaaaatcgaaatttaattgctccaaagtactttattcacgccatgacattggtgacagggtatccttctgacttggcaagtggtgggattggtcggaggcgtggtcagcgacgtcagccgttctatcggccataccaaccacctccgcgacctccccaacctcctcgaccgccccatcctccaccccatcctccacggccaccccatccaccacggccgccccatcctccacggccgccccatcctccacgaccaccccatccaccgccccatcctccgagctggcgggcctctcgggctccatcgttggcatggttcgctccctgatcggcgacgtccaggagtccaaccacctgatcgttgttttcagaatcatccaaggcgtaggcacatgccaggcacaggacaccgatgagggccagaagtgttagacgcatcttgctttctgcttgattcaatgggttgctgatacagactcgacagactcgtgcaactgatgatttgttcgtctcaatcgcgggccttatatgcgaagatctcgccacttgacgttcctgttctcatacgcatcgatgagtcgggtctctccacagcacccccctccaatagctccaccaccacctcttgccatagtcgtactatactgtgtatgtactatatacctacttggcctctaggtgcgattgtttaggggcttttttaaccgggttctggtttgtatcgctatatatttcaccacacaaatattacactcttttttattctgtgtaccatttttttcttgtttttttttttttgttttggctgtcattactgaatcattccaaatttttaatgtctcatttgcgaaagttgtcgggatgctactcctaagtggtttcatacatagatcattcgattaggattcgttgactgccaacaattgagacctgttttgttttatgggtttttactaaagtgcatcggcagctaagtgacaggtcgattgccatatttaattaattattaatcaacaaagccaaatatacagaacagaaacctttccatttacatgtaggtttaaattgtttaagtttcatataaacaaatctttgacttaaatctggactgtaacagacatgttgatgtcaggtcaatcctaataacattttgttgaatactgagtagagcgttaaacatgaggcaaccctttattcgatatcctcgactatcagatacccgtttcttagctagtactaatagaagtgcatgttgaaccaaataatacaaagaatcttttgatacatgagcgctgccctagatggtcagacatagcgatcctgatcaaaaatatatatactttatatgatcagaaacgcatacttcaacctgttacatacataattttaaacgagtctagtataacctctattcatcgcatatcgtgtgtaataatataatatttaatacaaatctgctaatcattaatcccaattaacatagtactcattcacaa

SEQ ID NO: 28697 - DNA, 481 bp, DROSOPHILA
aattgctccaaagtactttattcacgccatgacattggtgacagggtatccttctgacttggcaagtggtgggattggtcggaggcgtggtcagcgacgtcagccgttctatcggccataccaaccacctccgcgacctccccaacctcctcgaccgccccatcctccaccccatcctccacggccaccccatccaccacggccgccccatcctccacggccgccccatcctccacgaccaccccatccaccgccccatcctccgagctggcgggcctctcgggctccatcgttggcatggttcgctccctgatcggcgacgtccaggagtccaaccacctgatcgttgttttcagaatcatccaaggcgtaggcacatgccaggcacaggacaccgatgagggccagaagtgttagacgcatcttgctttctgcttgattcaatgggttgctgatacagactcgacagactcgtgcaact

SEQ ID NO: 28698 - protein, 94 aa, DROSOPHILA
MTLVTGYPSDLASGGIGRRRGQRRQPFYRPYQPPPRPPQPPRPPHPPPHPPRPPHPPRPPHPPRPPHPPRPPHPPPHPPSWRASRAPSLAWFAP

SEQ ID NO: 28699 - DNA, 5309 bp, DROSOPHILA
ggtagagcattatgctctccttgatgtcggggaaggtctcgcacagggtgccaaagttttgggcccgcaagaagagcgttttatccaatggcagatactgaatggaatgcagcatatcgatgatatcacattgcgcgggatccctcaggttggtcagatgctgatcatagaactggagtagcttctggcagagcagttccctacgcttatccggattaggttcttcacttccgcaggaggagaaacatccgttttgaaagcgaaacatttgatagcattgtctaagtattgctctataaatcctgtcggagatctcggcaccccgataatcggccacctccacgccctcctttaagcgcacctccttgggaacattcaggaccagtactaaccaataccctggctcgggttggtagaagagttgtgtggttttctgggtatgcaaggcctggcaatcatcttcagatgtaaaagttctgcaagtacagcaaactctgtattattacccacttccctctatgtaaaaagttccataaatacccagtgaaccttatgatggcctcacttagtcccacatctttgattttcgtatttaattcaatgtcatttggatggtaaaacaaaaccttcttgtgttcctgaaaaaaattactcattaggggcgtttcttagccttaaaattgatttgccaacctcgccttcaacttggccaaaagtcgagttaaaaatgtaaaagctgcgtaacgtaatttctacgcgttgcaataatttagccatttctttccgcacagaattaaaagtatttattttggccaaaggtaaataatgaaaaggtactaacgcgtccgtgtttgccaaccagggttacattttaccaaatgtagtgtgctagtatataccaaacgtttccagtaccaaattaaaaaaaataccacacaattaataagcgaatttaaagctttttcatttattttggaatttaatagatttaataaaatttatgtcatggcgtttactgaaatttagaatttttctgatgtcttcccttttgacaatgcagaaaggaaagtggccatccataatctcctcatatttatttagagtgaagtgcgtgctaaattgtgtttatttggaaatgtatttagtttaagcctggattcctccacggagacggagcaccaagtgaagggtcgattccttctggatgttgtaatcggacagggtgcgtccatcctcaagctgcttgccggcgaagatcagacgctgctgatctgggggaattccctccttgtcttggatcttagccttaacattctcaatggtgtccgagggctctacctcgagggtgatggtctttccggtcaaagtcttcacgaagatctgcataccaccacggagacgaaggaccaagtgaagggtggactccttctggatgttgtaatcggacagggtgcgtccatcctcaagctgcttgccggcgaagatcagacgctgctgatgctgggggaattccctccttgtcttggatcttagccttaacattctcaatggtgtccgaaggctctacctcgagggtgatggtctttccggtcaaagtcttcacgaagatctgcataccaccacggagacgaaggaccaagtgaagggtggactccttctggatgttgtaatcggacagggtgcgtccatcctcaagctgcttgccggcgaagatcagacgctgctgatctgggggaattccctccttgtcttggatcttagccttaacattctcaattgtgtccgatggctctacctcgagggtgatggtctttccggtcaaagtcttcacgaagatctgcataccaccacgaagacgaaggaccaagtgaagggtggactccttctggatgttgtaatcggacagggtgcgtccatcctcaagctgcttgccggcgaagatcagactgctgctgatctgggggaattccctccttgtcttggatcttagccttaacattctcaatggtgtccgaaggctctacctcgagggtgatggtctttccggtcaaagtcttcacgaagatctgcataccaccacggagacgaaggaccaagtgaagggtggactccttctggatgttgtaatcggacagggtgcgtccatcctcaagctgcttgccggcgaagatcagacgctgctgatctggggggattccctccttatcttgaatcttggccttcacattctcaatggtgtccgatggctctacctcgagggtgatggtctttccggtcaaagtcttcacgaagatctgcataccaccacggagacgaaggaccaagtgaagggtggactccttctggatgttgtaatcggacagggtgcgtccatcctcaagctgcttgccggcgaagatcagacgctgctgatctgggggaattccctccttgtcttggatcttagccttaacattctcaattgtgtccgatggctctacctcgagggtgatggtctttccggtcaaagtcttcacgaagatctgcataccaccacgaagacgaaggaccaagtgaagggtggactccttctgaatgttgtaatcggacagggtgcgtccatcctcaagctgcttgccggcgaagatcagacgctgctgatctgggggaattccctccttgtcttggatcttagccttaacattctcaatggtgtccgaaggctctacctcgagggtgatggtctttccggtcaaagtcttcacgaagatctgcataccaccacggagacgaaggaccaagtgaagggtggactccttctggatgttgtaatcggacagggtgcgtccatcctcaagctgcttgccggcgaagatcagacgctgctgatctgggggaattccctccttgtcttggatcttagccttaacattctcaattgtgtccgatggctctacctcgagggtgatggtctttccggtcaaagtcttcacgaagatctgcataccaccacggagacgaaggaccaagtgaagggtggactccttctggatgttgtaatcggacagggtgcgtccatcctcaagctgcttgccagcgaagatcagacgctgctgatctggggggattccctccttatcctgaatcttggccttcacattctcaatggtgtccgatggctctacctcgagggtgatggtctttccggtcaaagtcttcacgaagatctgcataccaccacggagacgaaggaccaagtgaagggtggactccttctgaatgttgtaatcggacagggtgcgtccgtcttccagttgcttgccggcgaagatcagacgctgctgatctgggggaattccttccttgtcttggatcttagccttaacattctcaatggtgtccgagggctctacctcgagggtgatggtctttccggtcaaagtcttcacaaagatctgcattttggattattctgcgggaagaaaatagagatgtggaaaattagtacgaaatcagacgagtttcgttgaaattacaaaactattgaaactaactttctggctggggaataaaaatgggaaacttatttatcgacgccaactttgttgagaaacccctattaaccctctacgaatattggaacaaaggaaagcgaagaaacagggaacaaagggtagttgagaaacctttgttccgttgcttcgtcatcgttttcgtgttgcgagtgtgtgcatgtatgtatacacagctgaaatgcatgcatacacattattttgtgtgtatatggtgacgtcacaactacaagcaataagaaattttcagacgtggctttgtttaagcaacctactctatttcagctaaaaataagtggatttcgttggtaaaatacttcaattaactaaacaactaactaataacatgcacacaaatgctcgagtgcgtatgtgatttctcgaattttcaaatacgtcactgcgaatttcacaatttgccaataaatcttggcgaaaatcaacacgtaagttttatttatagatttgtttgcgttttgatgccaattcattgggaaaacgagatgcgtggctgccaatttcttattttgtaattacgtagagcgttgaataaaaaaaaatggccgaacaaagaccttgaaatgcagtttttcttgaaattactcaacgtcttgttgctcttattactaattggtaacagcgagttaaaaacttacgtttcttgtgactttcgagaatgttcttttaattgtactttaatcaccaacaattaagtataaatttttcgctgattgcgctttactttctgcttgtacttgctgctgcaaatgtcaattggttttgaaggcgaccgttcgcgaacgctgtttatataccttcggtgtccgttgaaaatcactaaaaaataccgtagtgttcgtaacactttagtacagagaaaaaaaattgtgccgaaatgtttttgatacgtacgaataccttgtattaaaattttttatgatttctatgtatcactttttttttgtgtttttcgtttaaactcaccacagtacaaaacaataaaatatttttaagacaatttcaaattgagacctttctcgtactgacttgaccggctgaatgaggatttctacctagacgacctacttcttaccatgacattgaatgcaatgccacctttgatctaaacttacaaaagtccaaggcttgttaggattggtgttttggaatttaagacccttgttagtttgcttttgaaatagcactgtcttctctaccggctataattttgaaactcgcagcttgactggaaatttaaaaagtaattctgtgtaggtaaagggtgttttaaaagtgtgatgtgttgagcgttgcggcaacgactgctatttatgtatatattttcaaaacttattgtttttgaagtgttttaaatggagctatctggcaacgctgcgcataatcttacacaagcttttcttaatccatttttaagtaaaatttgtttatactctttcggcaaataattgttaaatcgctttaagtgggcttacatctggataagtaatgaaaacctggataatatattaatacatataatccactgtgctttccccgtgtgtggccatatacctaaaaaagtttattttcgcagagccccgcacggtcacactacggttcggcgattttcgattttggacagtactgattgcaagcgcaccgaaagcaaaatggagctggagattttgaacgcgaagaacagcaagccgtacggcaaggtgaaggtgccctccggcgccacgcccatcggcgatctgc

SEQ ID NO: 28700 - DNA, 2419 bp, DROSOPHILA
caagtacaagcagaaagtaaagcgcaatcagcgaaaaatttatacttaattgttggtgattaaagtacaattaaaagaacattctcgaaagtcacaagaaacaataatccaaaatgcagatctttgtgaagactttgaccggaaagaccatcaccctcgaggtagagccctcggacaccattgagaatgttaaggctaagatccaagacaaggaaggaattcccccagatcagcagcgtctgatcttcgccggcaagcaactggaagacggacgcaccctgtccgattacaacattcagaaggagtccacccttcacttggtccttcgtctccgtggtggtatgcagatcttcgtgaagactttgaccggaaagaccatcaccctcgaggtagagccatcggacaccattgagaatgtgaaggccaagattcaggataaggagggaatccccccagatcagcagcgtctgatcttcgctggcaagcagcttgaggatggacgcaccctgtccgattacaacatccagaaggagtccacccttcacttggtccttcgtctccgtggtggtatgcagatcttcgtgaagactttgaccggaaagaccatcaccctcgaggtagagccatcggacacaattgagaatgttaaggctaagatccaagacaaggagggaattcccccagatcagcagcgtctgatcttcgccggcaagcagcttgaggatggacgcaccctgtccgattacaacatccagaaggagtccacccttcacttggtccttcgtctccgtggtggtatgcagatcttcgtgaagactttgaccggaaagaccatcaccctcgaggtagagccttcggacaccattgagaatgttaaggctaagatccaagacaaggagggaattcccccagatcagcagcgtctgatcttcgccggcaagcagcttgaggatggacgcaccctgtccgattacaacattcagaaggagtccacccttcacttggtccttcgtcttcgtggtggtatgcagatcttcgtgaagactttgaccggaaagaccatcaccctcgaggtagagccatcggacacaattgagaatgttaaggctaagatccaagacaaggagggaattcccccagatcagcagcgtctgatcttcgccggcaagcagcttgaggatggacgcaccctgtccgattacaacatccagaaggagtccacccttcacttggtccttcgtctccgtggtggtatgcagatcttcgtgaagactttgaccggaaagaccatcaccctcgaggtagagccatcggacaccattgagaatgtgaaggccaagattcaagataaggagggaatccccccagatcagcagcgtctgatcttcgccggcaagcagcttgaggatggacgcaccctgtccgattacaacatccagaaggagtccacccttcacttggtccttcgtctccgtggtggtatgcagatcttcgtgaagactttgaccggaaagaccatcaccctcgagatcagcagcagtctgatcttcgccggcaagcagcttgaggatggacgcaccctgtccgattacaacatccagaaggagtccacccttcacttggtccttcgtcttcgtggtggtatgcagatcttcgtgaagactttgaccggaaagaccatcaccctcgaggtagagccatcggacacaattgagaatgttaaggctaagatccaagacaaggagggaattcccccagatcagcagcgtctgatcttcgccggcaagcagcttgaggatggacgcaccctgtccgattacaacatccagaaggagtccacccttcacttggtccttcgtctccgtggtggtatgcagatcttcgtgaagactttgaccggaaagaccatcaccctcgagcatcagcagcgtctgatcttcgccggcaagcagcttgaggatggacgcaccctgtccgattacaacatccagaaggagtccacccttcacttggtccttcgtctccgtggtggtatgcagatcttcgtgaagactttgaccggaaagaccatcaccctcgaggtagagccctcggacaccattgagaatgttaaggctaagatccaagacaaggagggaattcccccagatcagcagcgtctgatcttcgccggcaagcagcttgaggatggacgcaccctgtccgattacaacatccagaaggaatcgacccttcacttggtgctccgtctccgtggaggaatccaggcttaaactaaatacatttccaaataaacacaatttagcacgcacttcactctaaataaatatgaggagattatggatggccactttcctttctgcattgtcaaaagggaagacatcagaaaaattctaaatttcagtaaacgccatgacat

SEQ ID NO: 28701 - protein, 719 aa, DROSOPHILA; identical to SEQ ID NO: 24321

SEQ ID NO: 28702 - DNA, 5774 bp, DROSOPHILA
ggtagagcattatgctctccttgatgtcggggaaggtctcgcacagggtgccaaagttttgggcccgcaagaagagcgttttatccaatggcagatactgaatggaatgcagcatatcgatgatatcacattgcgcgggatccctcaggttggtcagatgctgatcatagaactggagtagcttctggcagagcagttccctacgcttatccggattaggttcttcacttccgcaggaggagaaacatccgttttgaaagcgaaacatttgatagcattgtctaagtattgctctataaatcctgtcggagatctcggcaccccgataatcggccacctccacgccctcctttaagcgcacctccttgggaacattcaggaccagtactaaccaataccctggctcgggttggtagaagagttgtgtggttttctgggtatgcaaggcctggcaatcatcttcagatgtaaaagttctgcaagtacagcaaactctgtattattacccacttccctctatgtaaaaagttccataaatacccagtgaaccttatgatggcctcacttagtcccacatctttgattttcgtatttaattcaatgtcatttggatggtaaaacaaaaccttcttgtgttcctgaaaaaaattactcattaggggcgtttcttagccttaaaattgatttgccaacctcgccttcaacttggccaaaagtcgagttaaaaatgtaaaagctgcgtaacgtaatttctacgcgttgcaataatttagccatttctttccgcacagaattaaaagtatttattttggccaaaggtaaataatgaaaaggtactaacgcgtccgtgtttgccaaccagggttacattttaccaaatgtagtgtgctagtatataccaaacgtttccagtaccaaattaaaaaaaataccacacaattaataagcgaatttaaagctttttcatttattttggaatttaatagatttaataaaatttatgtcatggcgtttactgaaatttagaatttttctgatgtcttcccttttgacaatgcagaaaggaaagtggccatccataatctcctcatatttatttagagtgaagtgcgtgctaaattgtgtttatttggaaatgtatttagtttaagcctggattcctccacggagacggagcaccaagtgaagggtcgattccttctggatgttgtaatcggacagggtgcgtccatcctcaagctgcttgccggcgaagatcagacgctgctgatctgggggaattccctccttgtcttggatcttagccttaacattctcaatggtgtccgagggctctacctcgagggtgatggtctttccggtcaaagtcttcacgaagatctgcataccaccacggagacgaaggaccaagtgaagggtggactccttctggatgttgtaatcggacagggtgcgtccatcctcaagctgcttgccggcgaagatcagacgctgctgatgctgggggaattccctccttgtcttggatcttagccttaacattctcaatggtgtccgaaggctctacctcgagggtgatggtctttccggtcaaagtcttcacgaagatctgcataccaccacggagacgaaggaccaagtgaagggtggactccttctggatgttgtaatcggacagggtgcgtccatcctcaagctgcttgccggcgaagatcagacgctgctgatctgggggaattccctccttgtcttggatcttagccttaacattctcaattgtgtccgatggctctacctcgagggtgatggtctttccggtcaaagtcttcacgaagatctgcataccaccacgaagacgaaggaccaagtgaagggtggactccttctggatgttgtaatcggacagggtgcgtccatcctcaagctgcttgccggcgaagatcagactgctgctgatctgggggaattccctccttgtcttggatcttagccttaacattctcaatggtgtccgaaggctctacctcgagggtgatggtctttccggtcaaagtcttcacgaagatctgcataccaccacggagacgaaggaccaagtgaagggtggactccttctggatgttgtaatcggacagggtgcgtccatcctcaagctgcttgccggcgaagatcagacgctgctgatctggggggattccctccttatcttgaatcttggccttcacattctcaatggtgtccgatggctctacctcgagggtgatggtctttccggtcaaagtcttcacgaagatctgcataccaccacggagacgaaggaccaagtgaagggtggactccttctggatgttgtaatcggacagggtgcgtccatcctcaagctgcttgccggcgaagatcagacgctgctgatctgggggaattccctccttgtcttggatcttagccttaacattctcaattgtgtccgatggctctacctcgagggtgatggtctttccggtcaaagtcttcacgaagatctgcataccaccacgaagacgaaggaccaagtgaagggtggactccttctgaatgttgtaatcggacagggtgcgtccatcctcaagctgcttgccggcgaagatcagacgctgctgatctgggggaattccctccttgtcttggatcttagccttaacattctcaatggtgtccgaaggctctacctcgagggtgatggtctttccggtcaaagtcttcacgaagatctgcataccaccacggagacgaaggaccaagtgaagggtggactccttctggatgttgtaatcggacagggtgcgtccatcctcaagctgcttgccggcgaagatcagacgctgctgatctgggggaattccctccttgtcttggatcttagccttaacattctcaattgtgtccgatggctctacctcgagggtgatggtctttccggtcaaagtcttcacgaagatctgcataccaccacggagacgaaggaccaagtgaagggtggactccttctggatgttgtaatcggacagggtgcgtccatcctcaagctgcttgccagcgaagatcagacgctgctgatctggggggattccctccttatcctgaatcttggccttcacattctcaatggtgtccgatggctctacctcgagggtgatggtctttccggtcaaagtcttcacgaagatctgcataccaccacggagacgaaggaccaagtgaagggtggactccttctgaatgttgtaatcggacagggtgcgtccgtcttccagttgcttgccggcgaagatcagacgctgctgatctgggggaattccttccttgtcttggatcttagccttaacattctcaatggtgtccgagggctctacctcgagggtgatggtctttccggtcaaagtcttcacaaagatctgcattttggattattctgcgggaagaaaatagagatgtggaaaattagtacgaaatcagacgagtttcgttgaaattacaaaactattgaaactaactttctggctggggaataaaaatgggaaacttatttatcgacgccaactttgttgagaaacccctattaaccctctacgaatattggaacaaaggaaagcgaagaaacagggaacaaagggtagttgagaaacctttgttccgttgcttcgtcatcgttttcgtgttgcgagtgtgtgcatgtatgtatacacagctgaaatgcatgcatacacattattttgtgtgtatatggtgacgtcacaactacaagcaataagaaattttcagacgtggctttgtttaagcaacctactctatttcagctaaaaataagtggatttcgttggtaaaatacttcaattaactaaacaactaactaataacatgcacacaaatgctcgagtgcgtatgtgatttctcgaattttcaaatacgtcactgcgaatttcacaatttgccaataaatcttggcgaaaatcaacacgtaagttttatttatagatttgtttgcgttttgatgccaattcattgggaaaacgagatgcgtggctgccaatttcttattttgtaattacgtagagcgttgaataaaaaaaaatggccgaacaaagaccttgaaatgcagtttttcttgaaattactcaacgtcttgttgctcttattactaattggtaacagcgagttaaaaacttacgtttcttgtgactttcgagaatgttcttttaattgtactttaatcaccaacaattaagtataaatttttcgctgattgcgctttactttctgcttgtacttgctgctgcaaatgtcaattggttttgaaggcgaccgttcgcgaacgctgtttatataccttcggtgtccgttgaaaatcactaaaaaataccgtagtgttcgtaacactttagtacagagaaaaaaaattgtgccgaaatgtttttgatacgtacgaataccttgtattaaaattttttatgatttctatgtatcactttttttttgtgtttttcgtttaaactcaccacagtacaaaacaataaaatatttttaagacaatttcaaattgagacctttctcgtactgacttgaccggctgaatgaggatttctacctagacgacctacttcttaccatgacattgaatgcaatgccacctttgatctaaacttacaaaagtccaaggcttgttaggattggtgttttggaatttaagacccttgttagtttgcttttgaaatagcactgtcttctctaccggctataattttgaaactcgcagcttgactggaaatttaaaaagtaattctgtgtaggtaaagggtgttttaaaagtgtgatgtgttgagcgttgcggcaacgactgctatttatgtatatattttcaaaacttattgtttttgaagtgttttaaatggagctatctggcaacgctgcgcataatcttacacaagcttttcttaatccatttttaagtaaaatttgtttatactctttcggcaaataattgttaaatcgctttaagtgggcttacatctggataagtaatgaaaacctggataatatattaatacatataatccactgtgctttccccgtgtgtggccatatacctaaaaaagtttattttcgcagagccccgcacggtcacactacggttcggcgattttcgattttggacagtactgattgcaagcgcaccgaaagcaaaatggagctggagattttgaacgcgaagaacagcaagccgtacggcaaggtgaaggtgccctccggcgccacgcccatcggcgatctgcgcgccctaattcacaagaccctgaagcagaccccacacgcgaatcgccagtcgcttcgtctggaactgaagggcaaaagcctaaaggatacggacacattggaatccctgtcgctgcgttccggcgacaagatctatgtgaaggatctgggtccccagattggctggaagaccgttttcctggccgagtacgccggcccactgattgtatacttgattttctacttccgaccggagttggtgtacggcaaagctgccagtctgccgatttccctaaccacccagtgagtttgtagaaagtagtctctgaagtctttcgattgtcgacctaatcgacctcgtcgcttatgcaaactaaaacgcaacggctctgcataattatccccgaactttggatggtggttcacccagtaacccgctttcttttctcttttgccccagcattgccgccggctgctatacggtc

SEQ ID NO: 28703 - DNA, 943 bp, DROSOPHILA
tagccggtagagaagacagtgctatttcaaaagcaaactaacaagggtcttaaattccaaaacaccaatcctaacaagccttggacttttaataatccaaaatgcagatctttgtgaagactttgaccggaaagaccatcaccctcgaggtagagccctcggacaccattgagaatgttaaggctaagatccaagacaaggaaggaattcccccagatcagcagcgtctgatcttcgccggcaagcaacttgaggatggacgcaccctgtccgattacaacatccagaaggagtccacccttcacttggtccttcgtctccgtggtggtatgcagatcttcgtgaagactttgaccggaaagaccatcaccctcgaggtagagccttcggacaccattgagaatgttaaggctaagatccaagacaaggagggaattcccccacatcagcagcgtctgatcttcgccggcaagcagcttgaggatggacgcaccctgtccgattacaacatccagaaggagtccacccttcacttggtccttcgtctccgtggtggtatgcagatcttcgtgaagactttgaccggaaagaccatcaccctcgaggtagagccctcggacaccattgagaatgttaaggctaagatccaagacaaggagggaattcccccagatcagcagcgtctgatcttcgccggcaagcagcttgaggatggacgcaccctgtccgattacaacatccagaaggaatcgacccttcacttggtgctccgtctccgtggaggaatccaggcttaaactaaatacatttccaaataaacacaatttagcacgcacttcactctaaataaatatgaggagattatggatggccactttcctttctgcattgtcaaaagggaagacatcagaaaaattctaaatttcagtaaacgccatgacat

SEQ ID NO: 28704 - protein, 231 aa, DROSOPHILA
MQIFVKTLTGKTITLEVEPSDTIENVKAKIQDKEGIPPDQQRLIFAGKQLEDGRTLSDYNIQKESTLHLVLRLRGGMQIFVKTLTGKTITLEVEPSDTIENVKAKIQDKEGIPPHQQRLIFAGKQLEDGRTLSDYNIQKESTLHLVLRLRGGMQIFVKTLTGKTITLEVEPSDTIENVKAKIQDKEGIPPDQQRLIFAGKQLEDGRTLSDYNIQKESTLHLVLRLRGGIQA

SEQ ID NO: 28705 - DNA, 3158 bp, DROSOPHILA
ctcctttgcctgtgaaggtcctgtgatcacctcggccggatccatcagcaagactaagctgactagttgccatactccaagcgacatgtcttcagcgtatttcacacacgttctgagaagtctacactgatttgcagtcccatttatagtccgtctgattccgatttaattcgtaattctaataatttacgaaaatttgcatttactgcaattacgcttaagtagctcacagcgccacatgggactgcagcgcatcttgtggtcgcccaggcctcaccagatggaacatctctgctctccggaatacaaaggccggctagaaaccgaaagtctcagtttggacgcgttatgatcaacaaagtgtctagtcgtcatgtctgaacaatcagctgaagagctcggttggggaaccccccagaacgcgactcgaatgcctggtaattcgcaattctattgcatcgtataatccatacatttccgtttaaaaccctggttaagcaaagtatattgtgtgacgcttagtattattgttttgggttaaataattctgaacagattcatggggtgcagcagaaatgttacacaaaacaatctaaagctaatgaaaagtgttctcactgttaaaattcgaccttcatccttcgaactcgcttcttgtaccattgaaccttcgaaatcactaaattagatggcactaagacctagatggcacattaacagggggaaattatagagaacttttctaaagtttctgcagaacaaagttttttccgaaactggaatacaaagagtagtttttgagccgtgctcgtagatggcgccacataatggtttgggaatttgcttagaatgtctgtcaaaattttagttgcatcaaaagttgtccttataccattcctgcataggagtagctatttatacttcacttaataagcttaacatttttctattaactataatattttttgtgaactacatttacagtatttatagtatgagactaaaagctcttcctggactgacacctatcaaaagccagctcgatgggttttacgcacagcctttccgccacttctttgtacttggtcaaaagactattcggataggctaaagcccgcaaatcttccacgtagttcatgtgcatcctctccagttcgccaggtagccggatgggctctgaatcgtccgccggctggctattctggatgcgaccacaaaagtcatcgaaacgttccataaagttgggcaagaaaaattctggatcgagagcaataaatacttgacccaagttcgatggttggttctggtccatggttatatgagtggcatattgggcaccagagagcactccacatagaatatctatcacggctgacaggcaatagcctttgtgaccaccagcaggaaatagtaatggtgtccttaaggccaagctgggaaaacaggtggataagccaccctcgttggccgcccagccatgcggtatatactcatcgttggcccaagcccattccacggctccaatatccttcacgctggtcgccatgtctagaacaaaatggtactcctcaccctttacgcagaaggcaaagcagttggagccaatgctggcagactttgagttgggacccatcatcgttggagccgaattggacatcacgattccggctaatcccttgccggcagcgcgaaatgtaaaccagctggccatgccaatgtcgtgagattgctgggccactacgaaaccgatgccagagtcttcagctttcttcaccgccaaatccatacaaaagtttcccacaaacacacccaaggcggaattgccatttacatgggcggtggacaccgtttcactgattattgaaggctctgcgcccaccttggcatgcccgctctgcagatcactgagatagtaatccaggcgattcagcccgcttccgtagtttcctcgatagtccgccacaaccaggaactcgctgatgcagcgcaccttggagggggaaactccaacccgtagcaggcagtcctggataaagcggcgggcctcatccaccagaaccaaggacgtgtcgccccgctgctgcgtagaggcggcatgcatgtgatagccacgaaggcagcttcccagccacagtgctggccggaggagcgccaacattgtgtacagctgattttcatccaatagaacggtgtagctggggttgctatgagtatatatatttagtaagctttatcggaaatggggaacagatttaaaaattactttcacaaaatcatgctatccacagaaattgaaatatttttaaaataaactctacaagtttaaagtatttcattttaaatcttgaaattacattttgtaaaattctaatgttttttgaatgaaaagagtacgaatatagctttagattaaacttttagataccttaggtaaaggctttgaaggaataatttggactaaaatatgggatataatggatatcttgtgcttaacacttagttcaaggccgtggaggtcaaaactgccacgcctctttcgtagaagctatgcgattcctgcccagccgcaacggccaagtcaacagtgaagagtagttctgtacgcgtggagttcaagtaaaccggcaatgtcaacttgctgatgcgtggctccgaggaaatcctattaaaaagtaaagcattagtaaagaattatgcagttaactataagagtggacttactttatccacttgagaatggtgacaggtagatccatcatgatagtggaagccaggagcaattcattgttcttgcactgggcgccctgtaatttgagtccagtgaccccgaagcaacaatccttttgatcgttctttagcccagcatccgtaattgtcacatccagggcgagctcctctagcgaccaactattcgcctgggcaacacactgcctggtggccgtgatgtaggcctccggattgagcaaaccaccgagccagacggggaagccctgcagctccttggcgccagcctgcgaaacaagttgcgacaccttctgcagttgctggacacggttgctgaagtccgtgatccattggatcactgtgcatcctgcaggaactgtataccgcttccaacccttcggaattattccgcgaactagctccgacaacatgga

SEQ ID NO: 28706 - DNA, 1158 bp, DROSOPHILA
atgttggcgctcctccggccagcactgtggctgggaagctgccttcgtggctatcacatgcatgccgcctctacgcagcagcggggcgacacgtccttggttctggtggatgaggcccgccgctttatccaggactgcctgctacgggttggagtttccccctccaaggtgcgctgcatcagcgagttcctggttgtggcggactatcgaggaaactacggaagcgggctgaatcgcctggattactatctcagtgatctgcagagcgggcatgccaaggtgggcgcagagccttcaataatcagtgaaacggtgtccaccgcccatgtaaatggcaattccgccttgggtgtgtttgtgggaaacttttgtatggatttggcggtgaagaaagctgaagactctggcatcggtttcgtagtggcccagcaatctcacgacattggcatggccagctggtttacatttcgcgctgccggcaagggattagccggaatcgtgatgtccaattcggctccaacgatgatgggtcccaactcaaagtctgccagcattggctccaactgctttgccttctgcgtaaagggtgaggagtaccattttgttctagacatggcgaccagcgtgaaggatattggagccgtggaatgggcttgggccaacgatgagtatataccgcatggctgggcggccaacgagggtggcttatccacctgttttcccagcttggccttaaggacaccattactatttcctgctggtggtcacaaaggctattgcctgtcagccgtgatagatattctatgtggagtgctctctggtgcccaatatgccactcatataaccatggaccagaaccaaccatcgaacttgggtcaagtatttattgctctcgatccagaatttttcttgcccaactttatggaacgtttcgatgacttttgtggtcgcatccagaatagccagccggcggacgattcagagcccatccggctacctggcgaactggagaggatgcacatgaactacgtggaagatttgcgggctttagcctatccgaatagtcttttgaccaagtacaaagaagtggcggaaaggctgtgcgtaaaacccatcgagctggcttttgataggtgtcagtccaggaagagcttttag

SEQ ID NO: 28707 - protein, 385 aa, DROSOPHILA
MLALLRPALWLGSCLRGYHMHAASTQQRGDTSLVLVDEARRFIQDCLLRVGVSPSKVRCISEFLVVADYRGNYGSGLNRLDYYLSDLQSGHAKVGAEPSIISETVSTAHVNGNSALGVFVGNFCMDLAVKKAEDSGIGFVVAQQSHDIGMASWFTFRAAGKGLAGIVMSNSAPTMMGPNSKSASIGSNCFAFCVKGEEYHFVLDMATSVKDIGAVEWAWANDEYIPHGWAANEGGLSTCFPSLALRTPLLFPAGGHKGYCLSAVIDILCGVLSGAQYATHITMDQNQPSNLGQVFIALDPEFFLPNFMERFDDFCGRIQNSQPADDSEPIRLPGELERMHMNYVEDLRALAYPNSLLTKYKEVAERLCVKPIELAFDRCQSRKSF

SEQ ID NO: 28708 - DNA, 2762 bp, DROSOPHILA
tcacatatcaaaattttaaaaattttaggtttccaaaatttgtaaattttataccccgattagctagatttttattccctaagatgcggatgctttgcgacagactctccgccctgacggctggtgccatggtcggcgtttggtacgcccagaacttcccctgcgaaaatcctacggatggaggcgacaaagataaggccaaggacaaggccaaaagcacggataagggaaaagagaaggagaaggataaggggaaggggaaggatggtggccaggacaagggcaaggagaaaggcaaggaatagggataagaaaatagctaaaaaggggtggaaaaatcacaccatttagacgatacaatacgatacgtatgtgcaagtcctcttaaacgaatttctcctctagttagtccaaaacgtactagtagacatgagcaaaactccaacgtcgacgatgcaattggcttgaaaaggaaaagtttgaagtaaatggccgctgataacgcttccgaaagagctatgtttatatggttttattatcacatgctctgaagcagatgttaacgattttgcatttaaataattatacgagaatgcgtattgtatcatcttaaacatcgtatctttaatttttggggataaatgtcaaatgacaatggcttaaagctcgctgcgtaaattcgtatttacttattttggttgtgcccccaactgatttgaatttcgcacagtgctgcatgcgacaaaagtacgcagcgatttcaataaaagttgctcaccgaggtggtgtaatggtactctaatttcgcattttcacagcccagggacacacgtaatcccacctaattaaattgtcctttgaaatcgttcggttaattaagtgcgcgccaaccccaataatttatattgtgtagaaagtgcttcaaagcaggctgtgagatttgggttaatgggctttgaaacttcgtgccgacacttttcagttatccgttttggccacagcagcaaacttccatgaatctggaaaaattcaaaattgttgaaatttaaaaaatcatttgttgttctgaggacaccgacgtcttcctttggttatcatctagcaacaccatgcatttgatgtgcgagcgattgtctgcggtttttgcgggcgtcctagtgggtttgtggtacggtaagaccttttccgaggacgaaaagcccaaggagaagggcaaggacaagaagaagtagaccgaccgatcactcgcaagactggcagaaatcaatacgatcttcttaggtgcgtatctattgtgcgaaaatgagccataagccgcaagattatgtctttgatctagtagtcgagtcggcaaacttcgagccacttcaacgtcctgtcaacgcggcagctctgacatagctcagtgtttatttggctttacaatcagtatatcagactttcgacgtacacaaaatttataacgtgtttggttttaatttaacatccatcagacagcgattccagttttggtctaaattgtggcaaatcctgtcgagcttttgcagccatgccctgttgtaagcgtaccgaggtccgcagggtgtgccggccgatgccgtcgctccttgccaggctcaactgtacgccgtgcaaccgcgtcctgttcttcgtcatcggggtgggactgggcgtgctcttcgtgcgcaacaaggacgacaagtcgggcggcaaaaagaaggacgaaggcaaggccaagaagtaggactgaccgatctgccatgcccggcggtaatatcaatcatccaagcctggcactagctaattgaacctggactcatcatcacccatgaagttacccaaccgtttgcagcgttagccagggaagacaaaatgccattcgataagtttgtccgccgatgaatggaatggagaggaaatttctcagtcgataaatttatctaaagagcaatttgtcaatcgaacaattaactgccacatttaatacaggtttattcgattgatctattctctattatatattcctctgttgaaaatgctataaaattggtgctgtacaagacttactgtgtttttaatatgggctcattattcaaatctgtgggagcaattgttcgctaaatgtttgtaaatagtactttagtgacatgatttgattatttcattaatcgtcctgtaacaaaatttgcagagcacctgatcgacttccttattgatcttgatcaagaaacgcgttctaattctttttcttttaaacgaaactacgagtaacgagttatgaaaatgaacatcgaatttaccgataactaagtgcctattacaattaaaaattgcaatcttatgctttgtataataattaaagtctgattgaccaaccacaaatattctcaaatttttgttgaataactttagataaatttactaattttgggtccttgcagagggcaatacatttggtgtgtattcattgtacaatttttaatagaatatcaacgtattagaaagccttagcggtaagaacatagatcatgatcatatctcaaaatcatcacgaacccaaaatgtaaatttcaattttcgggtgatgtataattttaagcctgatatggttatccaaatttcgcaaaggcatttcctctctccagttaaatatcccatccgatcttgttacttgatctggaattataagggtggacactagatagtaaataaagaagccttccatcaacgcggcaatggactgaccaatagttatcgttagg

SEQ ID NO: 28709 - DNA, 550 bp, DROSOPHILA
gcagcaaacttccatgaatctggaaaaattcaaaattgttgaaatttaaaaaatcatttgttgttctgaggacaccgacgtcttcctttggttatcatctagcaacaccatgcatttgatgtgcgagcgattgtctgcggtttttgcgggcgtcctagtgggtttgtggtacggtaagaccttttccgaggacgaaaagcccaaggagaagggcaaggacaagaagaagtagaccgaccgatcactcgcaagactggcagaaatcaatacgatcttcttagacagcgattccagttttggtctaaattgtggcaaatcctgtcgagcttttgcagccatgccctgttgtaagcgtaccgaggtccgcagggtgtgccggccgatgccgtcgctccttgccaggctcaactgtacgccgtgcaaccgcgtcctgttcttcgtcatcggggtgggactgggcgtgctcttcgtgcgcaacaaggacgacaagtcgggcggcaaaaagaaggacgaaggcaaggccaagaagtaggactgaccgatctgccat

SEQ ID NO: 28710 - protein, 64 aa, DROSOPHILA
MPCCKRTEVRRVCRPMPSLLARLNCTPCNRVLFFVIGVGLGVLFVRNKDDKSGGKKKDEGKAKK

SEQ ID NO: 28711 - DNA, 12943 bp, DROSOPHILA
atactgctgcaaactatattgtgtgcttatcttcactcaaacggcattaatataccaattccattgaaattggctagctggttgtacctggtatacgcctttgcatctatattgctgagcaaagaatcaagactggatttgcgtctcgcccagattggctttaatttgggatctctctacgcaacactatgtacgtcctatgaggctgtgttcgttcaattgctgactatagagctgaatatctcgttgagggctcaaagtgcgcgggcagagagatcagttctccgtctggccttcaccctgctattgtacaccttcttttcgctctttggatccggaaacatagcgtcaatcagctcctttgatccgaacatcgctcgctgctacctcagtcattttgctccctttgtaatcatgggtctggtgctactgaaactactcgttcctgtggtgcttatcatgtcggtgatctatgccaacagcgagtttgtacgccagcacgaggagcagatcttcatctgtctgctgctcatttgcgatgtaatgggcctgaacttcctattcctggtacggaaccagggctcctggctggacatcggtacgtccatatcacacttcgttatcatggaggtaaccacgctggtgatgctcgtgatcttctataccgcaaagcagctgctgcgagtgattccttgggaggaaatagacttcaaaatgttgccgctgcgtttaatccactgggatgtgatcagcgccaaacatcactagtcctataaccgatttgacaaacattcgagctaagcttaaacatttatgttcgataatatttacaacactaattaagaattagtaacatacacatgtaaattatagaatctaatgctaggaatgtgtctgcgtgtaggtgagggtcagggtggatcgatttcatggacatccaaatctgaacttataaggaagacaaatacttatttgaaaacaagacaattttttactgattctgtactgtactgacgcatttaagaatgtattagaaacaccagtattgttactattttaaacatgaatatattaagaaatttaaaacacttttgatagttaaaaataaattgtaaactaatcatattaaagaaccctaatagatctttaaaaaaatcaaagacagaaattatatttcttaaaaaaaaatgtatcaagtgtatctttttgggattactccaaaaaatcgacccacccaattgtggatggtgttgtgtaggatgtgtattcgtgtggttttgtgtgtgtcatggcacgacgacatctaatgagttgtagaagcagcagcacggctatagaaacgtttatcccgattaatctttcagatatcgctccaccggattcacaccttgaaactttggactggcggtctcatctgaaatgtatcttggattagcattagggctaagtgattttaaaaacggagaacccacttgactgtgccggcttggccgtggtggcactttcccgcggagttgcttgcaggcaattgagccactcggccagcgagatctttttgtcaccattgacgtcgcagtagcgcggcatcttcttgccgcatctgcgcaagtggctgttgaatagaatagagttcataggccattaagaatgggatgtggtgtgatggctcacctggcactggtaaccagatcgcgaaagttcttccactctcgacgatcccacgacttattcttgttcttgtccagataaacaaagctcagagtggcgattcgctcatcgtctgttttccacatgctagaattcgaactgcaatatatatagagcatatattcttttaaatgtactaatctaatctgctgataatactcctagtacattatataattattattctaagaagatctaaaaaaagttgaatatatataatgactaagcttgctaaactgaatatgtgagctcttaaagtgatgatcaatcctacccggtggtgctgctgggcagaagagaggtgttgaggtaagcctttagctctttgaggaactgcgtcttgcgcggctcggtgcatcccttcatgggtcgcacggccacgctctcgtcacactgaggccgcttgttcttcaccgatgtgcccgggatgctctttcccgtgtcctcgttgacgcaccagcagtacgaagtggacgtggaggagtagcactgaatgcgctgatagcgaccatccggaaggcactgcggcacaaataggacgctctttccaccgtgctatgggattggagtaacatacagaggtttcctttgcgaatgatatttgatgacttacgccttgctcctccagcgtgaccgactgatccatccagcagttggagtcattttccaagtcctggctcgccgtctctggctttgagttgagcactaaaatatttttgataattaacaaatattttaatacagaacacagaaattaaatgagtgtaaattatgattaatcggataattttagcatgacaacttggtgattaaatattagttgataaagaatatattctacttcttatatcgtgatttagtttatgccaatgcactttgaatttggttagtagcacaattctacgtactatataatgatgggatatgcgttcgtgaactgggcagatctgctccttgcgagtcgtcctcttcacctccgtagcccgttgcactgtcctcgtagttgtcctcgtgctcctcactgccactcgcatcctcggaatatgagtgtggattaactccagtgccaatggtattggtgtgacctcggtggtggccattgacgttggtgttgtggatgctgtagtgggtggagtgtggtggtgcggtggctgcactgctcgccagaagatttacgacagcactacctggatttagatgacacacagatgtgagatgaattaaggacaaatggctcatgaatggatcttcaatgtttttttttatgattttgagactcacatgaactataattaattaagtatatttaatgaaatgcagctaattggaaggcaattaattatcaatgaattaataattctaaagattttgatactgcaaattaaagttcatgagatgctgctacaatatcctgtgttacataatccaacttgtactcacggttgtgaaactccttggtaaagcagacgctccattccaaccaattgagattggcatccttggttacatcacagtatttaccaaaggtccgtccacaacgacgaggtttaacgttctaattgaaatcattgttagcagaacacagttttccagagtaaaaactatagttacttacccgcctgagtaccttcttcagctcccgaatctcctgacgatcgagcaacttgttgccattcgtgtccagcttggagaactgccactccaggatgtgggaatccgagagagatggctggcggaaaaagctctgagcctcgttccggaacatcctcatcaggttggtgttgaattgcgaccgatcggacttgctgcaagtccggtgggctgttgatcctgcctccgaactgcctttggacgcagatgtatccggattgtagccaatctgatgcgatgccaggcggcgtcggtcacgtcgattggccctgcagcgcagctttccctttcgccggaattgcttgttatcatccgcgatgggcctgccctgactgtcgctgcaccagcatccgttgttcccgtagcactgcatagccgcaaagttgccatccttcctgcatcggggcacaaagtatccgggatctcgctcctgctgacgacgggcaaatttcaccgcctccaggcaggctaaaatgatagtacatattgtatgataatagtatattgtatagaatttgtcataaatgtcacaactagattaactaactaatcaaagaactacgtggcatagaagactataaaaggtctgaagacctttaactatgtaagaaatttaatgaattttatgatcaccgcaagtgtttgaactaaagagataaccaatcgaaaacatattatttaaagacacgagcaattaaaagtccgtaaagcattttagtgctatatctcccgacttatgtacaagtaatgtatgtgatacattgacacttaccattgcaggagccgctgtacttgaggctcacctggtggccaccgcactgcgcccgcagcagatgacacctggtgggataggtttggccatcggtgccgcagacgggaccctcgttatcatcgcactctccctgtttggcggcgcaggcggggagcttcatctgcgggtagagatcgagaggagaagtggtggaggtggtggtgtcagtgcaagtctcaactgtatggtagctccagggagtgggtgagttacccgtaccgctcccccttgggcaaatacgcgtaaaatgatttactgcacttatggccaagtctgcgagtcgccaagcgtctgggcctttgccgctgactggaatacgaatgtggccaatggtcgacaggggcggccgcctaaggggggtggctgtggtgtgcagaaggggaagggggctttttgggggtggcctacctgttagccggctaatgtgaaaaatcaaagttgtcaggcccataactcgaaagccccgaaatccgcaccaaaattatggctgcctgctgctctcgaccaacttggctgctgagtgcgcaaattcttgtttagcccacaaaatcacattcgagtatacgcaaatatctgtatctatatatctttctacacacatacacagatggggcggccaagtactttgggatttgccagtgcagcgccttttgtcgccaatttgctccggccgacccacggatatatgtatatgtatgtacatatttgtcgtgtcactcggacattaattagatttcgctgttattgaaaagtgaaatgcggcaagccatctaaatgtcccataactgaaacatgtttgggataagatatgagcatactacttgaggtgctaatggtagttaaagtgtgtgagttgtatacttctctatcatttctgtatcattttgaatactttcaatgaataaagcccaaaaacccatacatccaacgggaatcaaatgaacaagaagggattatggctatcaacattttataatccggcttagtaaattaaatgcgtttatgtggacacccaaaatgaaaccccgaatgcaccccgaagatactaaacaccagaagctcgacaagaaatgttatacaattatgagaagcacaaatattacctgtcccagtgttatcttgttgccccaacatacatatatgtaggtatacaaataatgtagaatgtctgtaaacaattcgaattcttttttgtgagcaacgaagcacgcgctgcttggaaatcggagtgcgcaggtgattttcgactcccgactgggcacagacagatatcggacaaaagtatgtacataggtacatatgtacatatatgtataaccagagcatacatatgtacataggtatattgctgcaataggcagatcggatggctgttctcagaagtggagagtgtggcatctggttaaaagttgaacatgaataccccattagctaattatcaatttcggatattggcgagcaaatgcctataaagcttgttaagttccatacaatacttgttgtacatgcaaaagtgtgttaaatgtttataatttatatgttattataaaaatcccctcgaatttcacgtttgcaatgcccctgctatggggaatgtctgattgggaatgcaaatgacacttttgctggtgattatctaagtttttgaaatagggcgttatcccgaaaacgtgcctggattgaaaattcccacttggagcaccctgttgcctcccgcccccctcacattgtctcaccctcttagccacaaattataaacagagacagctcaaggattgttaccaagataacgacaaaattattgactgacagttctcacgctcgaagaacgaggcggcgaagaggaggctgcaatgggcggagaagaatcagaagaacaagctccacactttaaatacttcttcacactttgtcatcatcaggcagcttagtgacattggcaaaatgactaaaaaaggtatttaaatgagaatgagaaaggattgctagccttttaggtcgaatctggaatacgctttagtagtagcacgaaagatacgactgcatataaatgcctgaaatgcgaattcttcagttctattatgcctgttttatgtcaaataggaataagaacgaaatcggtaacttctcttcttaaatcaaatgcgaattcctacgctttgtggacacaaccaattgtaagcgaaattttgatttaattttaaagggtatagaaataaagaggagcaagcgcgcaggaaagaatcgcttttgacttgtgatcattttgtgttctcctttttgcagctcctcgcgctctttttcttttttctgcaggaataagaaacacgttcgttcgtcggtcagatgaaacaaaaacaaaaatcaaggtgtgggattgaagacaggccaaggaggaggcgatcagaagaggagacaagagaagaaacaaaaaaaaaggaggagagagaagaagaagaaggagccggcgactctcttttcggagtttggcagacagcgcggcggcgaacaagctggagaaagacagggagaagaagaacgagcgcagcttctttgttggctgacttttggtacctttgatacctggaatattggagtgttttctcgggatttacgaagtaatcgcttgtagccttggcagaaagtttggcaggctccgcttacaagcacttgtacaaattgtacaaaagactaaatgcaacttcaaatgattgccgtcatcatcatataacttcatatatgaattggattactagatacatctacctatgtatgtaaaaagttctgagaggtaagaacttctagagaggaatatgttcgccggctgaataatctgaataatgatattaatttaacaccttctattcaaaatgtaatattgtaacttaaatatgagtaactgtataaattcagcaaacattttactgcacatgattaacccaattcactttggtttgttcggggaatattttgttaacaatttttcgaaagtaaacttaccaactgatcgtcactttttccagtcgcaatgaaaaccgccagccaagtgacgaacaaaacacatctcgccaacatttcacttagcagttcgaattcgtcaattaactgttactgtgcttcggaggatgggggattggtttgatacgcgtgtttattgcatcaagtacgattctctcattataatcaaagtttttcgtttatttcaccatctttttcgcaaagtcgcaattagattttcttcctagaacttttactttgccgctctccgatttatttatttaccgattaccgtggtctatttatagtgagagaggtgtgtgcgtgtgcattaaggtgttgtggatcttctgtttatataatgcgtcttaatgtgtgcgatttttggttcgtttcgattggaaaaccgtccgaaaatgttcaggaagcgaggagcgaggagcacggatcacaacgaatctgcagagcgcacttcaatagtcaaccgatcgcagccgagttccacacacgactggccatttgccttggagtggagtggcccaaaacgcaagagagaggccccaggtgagagtgggcgaagaatcggattcggaatcggaatcggaatcgagctgagagatcggcggagagagcgagggacatcgccgccgccagagtgtctggcgtgtcgcttccaatatcttatctttgccacactccgacttgtggaggctggacggacagcacagtggagcctctctcagttaaaccataggtcaacggtaccgaacgaagatattgtgactgtaattccaaacgtgtgcttgaacgactaattaactatcactaccccattattagtacactaaaactaaaccagcattaaaacagcattttatgtatgaatttataacttagggatgttctactgtagcagcataaaaacgatcacattcacacaccagcagacagagagcagcacttgtgtatgcgtgtgaaatttatctttccttgtgcatctcaagaggttgcctcaccaacaaaagcaacaaaaaacctctaaaacaaagcggccaacagttgcaccagctgctcagccagcgggggaggggccaggggcaaggggcgcagggacgtcggggtaggggcaggcggtcaggggaaaacgtgagccgtcgagggccccgctcctgtgatttatagagccgctggccaaggagttcgcctggagaggattttaggtggatggaggaggcggaggcggagacgaagtggagttgccggtctccgtcttcgattcggtgtgaaacctgccagacagtctgacggcggcgataactgccccctcttgcccactacttgatataccccaacaccccgaacacccccgttcctgccgtcactttgttttcggctgtgccacactccgttttgtggtcttcttcgatgatcgagcatgcactggggaaaatatacctgtacttgtaaatagtaccttcgtccagaagtagcaactctagctaactccaaatcttctacaatattgagggatctatagatttggattttgggatgtacatatgcagttctgatgcgtacacctatctataagcctttacatattacaaaaaaatcctcatgtattgatattaaagactctctgtggaaacgcaaaagattcgatattttctcctcgtgtgaagatgggcatgcgggcaacactctagactgtagacggttgtaaggggcggggtagaaactcaagtggagtggactggcagacagtatgacgccaaaatgcaagacaagacaacctggtcgataacaaaggtaaacaggcaacggccagccaaggagcagggcaactgaaaaagcctcggtcgtgggattcgatcgggattgtcggctcagcgcgactgggctgagaaccagatgcagatgccgatacagatatagatacacgtacgcgcagatacggattcagatacaagtacacccgcccctgccgctgtatgcccaactaatcattgtgtgattcttgtttgtttatttgcccggcattatgaagagacttttcggtagaaattatttattgtcgcatgtgtttatgtatccgtaaccgagtatctcagttgcttgagccaactgtgtagctgtgtagctgtgagtatagcccttaaagtggcacccaatcggtcagttagctagaaattcagatgattaaatatggattcccctacatcagctaatttcaacagtttgggagtaataaaatcgaaattggatgctactaaagggcacatatttacttaggcttttatcaacgttgcatatatacaaatatcctgcatatttcgcaaaccaaagattctttctcaagtaaggcctaaacaatttgaaatggttaatttcgtagatgttgctttttacaattaacttgtcatgtggaatatactttactgcctaaaatttaaggcagttaaaatccctagaaatgcaaataacttattgcagaaacgggctctgtcggctgtattttgctcttatctatgaaatattgtcaatattttccaggcaaagcacatgaaataatgatctagacaacggtttctcccatttgcagtgaacttaaaaattaaaaacccccgagacgtgtcttcctgcacagaaaaagagacaatgggaaggtaagtcaccgggtgggagtccctgggccgaatcgatcagcccgtcgcattgctatataagctcggcgaaaccacaatctgcaacaacagtatctctccagttgtattccaagatgaagttcttcgttctcgtggctatcgcttttgctctgcttgcttgcgtggcgcaggctcagccagtttccgatgtggatccaattccagaggatcatgtcctggtgcatgaggatgcccaccaggaggtgctgcagcatagccgccagaagcgagccacatgcgacctactctccaagtggaactggaaccacaccgcctgcgccggccactgcattgccaaggggttcaaaggcggctactgcaacgacaaggccgtctgcgtttgccgcaattgatttcgtttcgctctgtgtacaccaaaaattttcgttttttaagtgtcacacataaaacaaaacgttgaaaaattctatatataaatggatccttttaatcgacagatatttaaatattataatgatttgtaattattactaattactttttatggaaataattggtaagaaggaactgggactgtaaaaatttcttaatagttaagctactattttaataataaatattgatcacagaaaattttcaaaatattttatatttctttggctttataactttcaaagtcatagaagaacgacttaattattccttgtgtatgttccttagtcttagtctgtgaaaataatctgcgtttatcattaccaattcgtacaacaaaatatcggtcattagcgttagcgacttaccatataagttaactaaacctaatcgagctaaaaaaaaaattgaggtcccgaggagcacgatctatatataccaaatatatacgtatatatttactttgtttaaaaaagctcttaacgggagcagttattggtcttcatggcgattcaaggcagattttaataaagaaatattaagctcagtaaactttacttaaaaaagcaatacaaatttgaaattctttttaaatttgtataatttctcccatcgattgtttgcgttgtactttaatataatttggttacataaagcttttgctgtagtttccaaacatacaatgtcatataacggcataattagtcagtttctaactgagcaacaaacggaaacagctttcgcatatactttattccgcataactttgaaaagaaacaataatattttctattcttacgacaaaaatactcattatcataaaccggcagcctttcaatttactataaaacacgaatgcaacctgaacgagctggaacagttctcgatttcatatcacaacatgaagatcacgattattctggcgctaactctagttgcggtttgcttaatgcaggttcgatctattccgaaggattccgagaatagacttctgcaaaaggagcttcaaaggagtcttatccaggatgcgaaggaacatgtccgcccaaggcgacagtcctgcattgagcggtgcaattccctctgttcgaagaagggctttaaaggtgtttgtgttaaaggtttgtgccgttgcacttgattttaataaggagatatatatttttctatatatttttaaataaaatccacattaaatctatgtgttttctatttaagattgcggtgcttctcgaactcattcatagctgaataaattatcatcgatcgcttatctcgtagcccgcgaatgccactttccgtttggcagggtcaaaaaattgaacctacgctaaaaggtatagcaacaatttgcattgcatttccgtttcttttgcggcattgctctataaatacggcaagtccgacgactacaattcgttcttatcaattaaccgagcaaacaaacagacgccaagaaaaatgatcatcagtgcaagcgaacaaggggaatagggaagagaaacacgcgccgagagagaaacacgacacttaattaacgccaattataatggttaataagagtatgtagaaatcgaggaacgcggccgacttgtgggtttcttttaatttacaaacgctttgccggttaattacgcgaacccctcgtcctcacatctcgatccgaaaacagagcaaccactcgcgagcgattctccatttgcactgactcttcagttatcggctcactatatagtagcacatcggctaatgtacataagttttcgatctagagctaagagaatacgagaattgagatgcacatatgtatataatgcagctctcccccaaacttaaacatttcaacgtgcatcgtgctacgatcaagatttgaattaacgcgcgcacttgactatcgatattttttttgttcaaacgatttacaaatgttaaacgacatcattttatgtgaatcatcaaattaaatctcttaacgacaagtacacatatttcatttttagcttaaaataggtagagatggtcaccttaaaaatatttgatagccaaaactggcgttagctagaaaagttctatcgatagccgggtattatcaataaggtttctttaaaacgtttaccacaattcttgtgaacgctgacccagacccactgaccgcgtccctcgtcaccacatcttgggcataaattaagtagaattcttcacttatcgctgcagagcatcaagaaccacgtcgctcttaagtcgtcgtaaatacagcacacgtctttatcaacgccgcacttttaaacggaaggcgcttctgctgacgtggttaatgcaattagtttccacgcgttaaactattaaacaatcaattaaaaagatgctgacgaaggcgcttatcctgttcggcctgctggccttggcccaaggttacagcttcacctcccgcgaggtcaagtgtcacggtaaggagaatccacacataacagcgcgccagcaacaggcggcagtgcacttgttggctggccctgggagcccggataattgaggttccataaattacagtgtgcaaggccgtggttacggaactggaggaggccattgccaaggaggacccccacaagatggccgatgtcagtggattccggctggacgcacagggaaattcgatcagcaagaaagttcgcctagtgaaatc

SEQ ID NO: 28712 - DNA, 2765 bp, DROSOPHILA
tggttgctctgttttcggatcgagatgtgaggacgaggggttcgcgtaattaaccggcaaagcgtttgtaaattaaaagaaacccacaagtcggccgcgttcctcgatttctacatactcttattaaccattataattggcgttaattaagtgtcgtgtttctctctcggcgcgtgtttctcttccctattccccttgttcgcttgcactgatgatcatttttcttggcgtctgtttgtttgctcggttaattgataagaacgaattgtagtcgtcggacttgccgtatttatagagcaatgccgcaaaagaaacggaaatgcaatgcaaattgttgctataccttttagcaccacggtaatcggtaaataaataaatcggagagcggcaaagtaaaagttctaggaagaaaatctaattgcgactttgcgaaaaagatggtgaaataaacgaaaaactttgattataatgagagaatcgtacttgatgcaataaacacgcgtatcaaaccaatcccccatcctccgaagcacagtaacagttaattgacgaattcgaactgctaagtgaaatgttggcgagatgtgttttgttcgtcacttggctggcggttttcattgcgactggaaaaagtgacgatcagttgatgaagctccccgcctgcgccgccaaacagggagagtgcgatgataacgagggtcccgtctgcggcaccgatggccaaacctatcccaccaggtgtcatctgctgcgggcgcagtgcggtggccaccaggtgagcctcaagtacagcggctcctgcaatgcctgcctggaggcggtgaaatttgcccgtcgtcagcaggagcgagatcccggatactttgtgccccgatgcaggaaggatggcaactttgcggctatgcagtgctacgggaacaacggatgctggtgcagcgacagtcagggcaggcccatcgcggatgataacaagcaattccggcgaaagggaaagctgcgctgcagggccaatcgacgtgaccgacgccgcctggcatcgcatcagattggctacaatccggatacatctgcgtccaaaggcagttcggaggcaggatcaacagcccaccggacttgcagcaagtccgatcggtcgcaattcaacaccaacctgatgaggatgttccggaacgaggctcagagctttttccgccagccatctctctcggattcccacatcctggagtggcagttctccaagctggacacgaatggcaacaagttgctcgatcgtcaggagattcgggagctgaagaaggtactcaggcggaacgttaaacctcgtcgttgtggacggacctttggtaaatactgtgatgtaaccaaggatgccaatctcaattggttggaatggagcgtctgctttaccaaggagtttcacaaccgtagtgctgtcgtaaatcttctggcgagcagtgcagccaccgcaccaccacactccacccactacagcatccacaacaccaacgtcaatggccaccaccgaggtcacaccaataccattggcactggagttaatccacactcatattccgaggatgcgagtggcagtgaggagcacgaggacaactacgaggacagtgcaacgggctacggaggtgaagaggacgactcgcaaggagcagatctgcccagttcacgaacgcatatcccatcattatatatgctcaactcaaagccagagacggcgagccaggacttggaaaatgactccaactgctggatggatcagtcggtcacgctggaggagcaaggccacggtggaaagagcgtcctatttgtgccgcagtgccttccggatggtcgctatcagcgcattcagtgctactcctccacgtccacttcgtactgctggtgcgtcaacgaggacacgggaaagagcatcccgggcacatcggtgaagaacaagcggcctcagtgtgacgagagcgtggccgtgcgacccatgaagggatgcaccgagccgcgcaagacgcagttcctcaaagagctaaaggcttacctcaacacctctcttctgcccagcagcaccaccggttcgaattctagcatgtggaaaacagacgatgagcgaatcgccactctgagctttgtttatctggacaagaacaagaataagtcgtgggatcgtcgagagtggaagaactttcgcgatctggttaccagtgccagccacttgcgcagatgcggcaagaagatgccgcgctactgcgacgtcaatggtgacaaaaagatctcgctggccgagtggctcaattgcctgcaagcaactccgcgggaaagtgccaccacggccaagccggcacagtcaaatgagaccgccagtccaaagtttcaaggtgtgaatccggtggagcgatatctgaaagattaatcgggataaacgtttctatagccgtgctgctgcttctacaactcattagatgtcgtcgtgccatgacacacacaaaaccacacgaatacacatcctacacaacaccatccacaattgggtgggtcgattttttggagtaatcccaaaaagatacacttgatacatttttttttaagaaatataatttctgtctttgatttttttaaagatctattagggttctttaatatgattagtttacaatttatttttaactatcaaaagtgttttaaatttcttaatatattcatgtttaaaatagtaacaatactggtgtttctaatacattcttaaatgcgtcagtacagtacag

SEQ ID NO: 28713 - protein, 613 aa, DROSOPHILA; identical to SEQ ID NO: 3744

SEQ ID NO: 28714 - DNA, 12521 bp, DROSOPHILA
tatcctggttctatgttcctctacataaaacagttgtcagcgcctagccagagattcctgcaaaaatatcaactttaataatggacaaatataaattgggtatctggacttacggattgaagaagggggagcgcggcggatacttcctctttggtggaggacacaagatgggatccagcttataatcgtttgttgtgtctagacttctgggagagtagtgctgccaatctaaggacttctcatctggttggtagccatcggtcgcgtgctcaatcttcacgtgtaccttgagatgatcctggaggaggaataccttgtcgcagagctggcattgaaagtgtccctctgtgttgggcacatgggcttcatggtatcttttatagtgctggtgcagttccagcgaggatcgcatcgtgcgcccgcatatatcgcatgtttgaccagtgctcacaggctgcggaaagtgggtggggaggtgttcgtccagcttctcagtggcatcaaaagtctgctcgcacagcagacaggaaagttgcacttcagccaacgccgtttccattatctatttatttcacatgcaacttgtttatttttatgttagcttaagaatatacgaatggaaactctctatattttcaattcatcaacatatgaactactcgcattacggttcctcgctctcgttcttttactccgttatttacacgtctttcttttcattcaacatccagtctattcgatgcgcacttaaaagtcacaagtgttccattcggttacaagaaatcaactgttcttttcgttctcctcatactcattgtgaaaacaggagagagcgaagtgtcatatcagtgttgcatgtttagcctcttttagctataacaaaaattagctattgtgggaagtgtgagttagggcagatatcgatcagcgctggctcgacaagttctcgaaaaaagggcgcagtctaaaacaacagcacacacacttttcttttgatatgaaattggttcaattctggtggtacagttagcataatattcttttctttttaaacctacccagcattatgtaatcgatttaggagtatttatagtaaaacgaatataaggcttgcaacttagccgaaaaatgtgcgatcatatttaaaccgcttccaaatctgaaaagaagaaacgtgaacaataaatatttttatgtacatacatatgaacatatttatatatgtatgtatgtgtataataattctgtatatgtatgtataataattctttgatttcttagtttattttttcaaagtgaattacctctttaaattagtggatattttatgagatatcgcggtgcacatgtacacatatgtatgtatatacataaaaatcccaatacatatgtacttaaattattcatttcttgaccaggattaataaccgagtctaactggccatgtccgaataaacgcctcgatctcaggaactataaaagctagtatgttgagattaagcatggggcttccagagagccacccaaaactgcgacttccacatttttgaaaaatgtattactagtttttcatatattatgaagaactagctgagtaacgggtatccaatagtcgggaaactcgactatagcattctctcttggttttaaactaaacctgaatacaatactgaatacaatacatatgatttcacaccccttgagtttaaagatgatattttttatgcatggcctgaagaatgtttgaatttattttggattcgcaaactaaacaccagacgaacataaagattagcaagcaagtaacaaacaaatttgtgtaggttctaagctcaattttctgataacgttcgcgttgctcagccgagaaactggaaataaaaggcgtacttaagcattatgttcccttattactttatttataaattattatttaaaattatttaacaagttgttttaaaataatatatttcttaatttaaataaacagcggattatgacccgtttgaaatattttaaagaacgaaaaatgcctttcgtactgcaagtactaatattacaaaaatagtaaatgtttcgggttagaatgatatgttataaattataacgcatttatagttaggacaaatatgataaagatgaaaaagaatatggataagtgaataatatgtttacacatacatccaaattctttattatttagatctctggcctgctgagaaaattgttatattttaactcgatgcaaaaaacatgtgtacgtcaaatatcttttgctcttaaagggactatcagcaaaatataaacggggggtcggctttccactttaggtacttcgggtaaccggagaatacccactgcgaagagcctccatttttaagggactgaaggacacttagtaaaaaataaaaaatcacagtttttatgggttttgcttgggcgtttctttatttccattttatgtacaaaacttatgacagaaacggacgaatttgagcgtccgagtgcttaaaatgtattgcaatgctcagcgtttttagtttctttattatgacaagaagtttggggctttgggacttcgacgtcgagatccagatccaaagtgctgaggctacagaataaatcgcttgcgagtgcgatatgtatccatgctattatgtatgtacatcgtacatagtcagaagctccatgaaacgaagtgatattttataagtaaaaataacaagggcgctattggctatcttattagctcgaatatttgataccccaagcttcttaaaatccagccaagttcaacctataagtatgaatcgcagtccagccatagatccctaaaaaacagtcgaaaattcagaggtgttgtatgacgatgatgaaaactatctgaacatacggattgaagtagggcgaacgaagtggatatgtccgtttggacgtgatcgtaaaacccgattccaactgctcggtttgctgacgtggcgcaaccagatacttgtccgcccgctcgctggccggttgatactttgctgccgccacagcgttgaatattcgtgtgctccatatctcctttttcggtgcctcgttcggcgacgacattggggagacaggaaccttcgcggatacaggcgaatctacagattttggatattcgggatcagcatttactctgcccgggaaagcaatcccgtgtttgaccttcatgtgcatcaggaggaaggtccgccgcttgtagcgtttcttgcatgtgaggcacttatgctgcttggtcaaattcttctctaaccgattcacagccagctctttattcccgtggaagtggctctcgtggtatttcagcgactggcgggagctcaatcgctttccgcaccaattgcactcgaactgaccttgattgaaagccaaggatttggcatttgggggcttgggttcgatcagaaccgccgatcgggacttccctgcacccgcatcctgaatcggatcttgtgcttggggtcggggattttccaagaccggtggttcctccacccttgtgagaattccttccggcacacaaaggttttgcatttcaagcgaagtatgttggttacttggaatcgcgcttgccattggatgaccagaaggctccagaggagattgcggtgacattggaagtttttggcgcagttcgagtggccgatgacctaaaaactgcactggtggctcataagccgtatgctgagcggtcatatacatgggtggtatctgaatcggatgttgatgaaccgcaggcatttgaaatggaatttctggttcgagcggcggtgagtaaaaatccatgggtggcggacagccaaactccatccgattgcggtagtgggcattgtgatggtgatccatgtcaccatgatcaatggaatgaaataagtgctgatctgtgggatgcacgaatggtttattcatggactgaacaaagggtgttatcgtcggcggaggtgtctgctcctgcgcacgcgtgttattccaggcgttaatttccgccgcatgttgggtgaggtgctccttgaaggattcaatatcattgaagggctgtttgcacaggtagcacggaacacagagcacggttccttcgggaacatttatatgttcactgcgagccagaatctccttgaccagcggcatatccgtaggatcagtgggtgaaaatggtggggagggtatggcggatggaatttgcgggtacatctttgcgggatgcctctttggttccgtctggcgatggtggtgatgatggttcatgagttccgtctctatgatctccacatcgctatcactttcagcgtccatgacactcttcggttggtggaattataaataacaactgttctgtaggatcgctttcacgttaaattcactagggtggccggccatgctttttaacagttacactcgatctaagtacatatgcatatatacatatgtgtaaataaaatataaagttccaacgcccagctcacaactgcgcagctcgacgtttctctgcggactaaaagaagaaaaggcgatcgcattctgtaaaatcccaaataagaagactttactcgttgagtttttgtaagaaactgattttatttggaaatatcttcggtttaaataggtgacatgagaatcgcatcttaaagtaaatggcctacgcagaggcctaagtaaatagtccccgccttatcgaggtcccacgctcgggcacatctgcctatcttgagcggcgaggaccttatctgtggtctcccactaagggactattttaggaggcggggaacgatctcaagtgactgactcatgtagtgtgcacttaaattacatgtttttgagcaatgcacccatgtcgccttagataacaaaatcctaaatataatttatcgctctcgattcatttacataagatatgaacggagcccaaaattgtaagtctttaaatatatttcggtgttcatgtgtgaacacattctattttatgcgatctacgctgtcttctcgtttgtttagaagtacgtttaagaatcagaataacagctagacttatttgagataaggctaaacaaaaaagcattttatttttgcaccatcttatggcaggcattcacagttccttcaatcgttttaaagtgcttagaatagtactgataagcctttttactgataagcctttaatattttttaaattgtcattagtgttcaacggttttatgatgcccacttcgagttatgggaacgtaggtacaataaaaggacaccaatagaaaagaacaagaacatttcttaaatacgtatgtatgtacatatgtatttacgccagaaattataaaagagatgaaaaaggatatggtatacccgtttcttgtggagcacggacttgcattgttaaaaatatgtacatatgttgtttaaatatgtgtttagacatgataagaaggcaaactataaatatgtcctatttatgggctggaataaacatgtcactggacagcataagtggcaactacagataagtacggttgcagcggcccattgccgaagtgtcaagagataggtctcaaacatagatttaagaataaaactcagatgcatttaccaacgtagactgcggcgtcttacaagcgctgcattatataattggttgataagaacctatgtaagaatgaataaaaggcgaagccctcgcagcagcgagtcagttagattcaaacacccgaattgaactcattaagtgtacgcacaagtttatagtgtgacagtctcaaaagtatgtaaacttggaatttgttgtttattttcttgtatatttaatatttttaatttgttttttgatttataagtaaaataaatattgtttaattatattttataaaaaaaattgcgtttaattaagcaaaaaacctttaatttttagctttaaagtcaaaaattcaacttatttcacagtgtgtaaacagtttctgtatatcttgggtatatcctttttatcgaacattttgatttaagtaccaggtatatatattcatttgtgttaatatccaaggttcactttatttatatcctaacatatatggcttacctgaagatctttttagtccatgtggtccatgaagtaccgaacacgcacgaacgtgctcgatctgtactctacctaaagctacacacgtttggttatgtgttcgtccacccggaaagtccttaatttttataaaagggtaccattataaagttatttttcacaagtaattgtagattaatatgtatcaaacatatgtatcaaaattaacggacattgctacatacatatatcgacttagctgatcaccaagtctccttaaaggatgtcgcttcacaactcgtatcatattattaaatgctttatgaggcctgaagaaaaacatgaacaataatttatattgcattacaaaatcaaaactaatgacgatgtgaaatagaatgaaagctcaatacataactcagaaaaattctgcatggaataaacagaacctgaagcatttttcacaggactagacatccaagacgattgtacatttctccaaaagtaaaagtttttgcttggttatatttcttaacgtctcataatatattatcaatttgattaggattgggtgacagcgagaactattccatgacttgatataacacttccgctggtaatttgtatctataaaaaaaacattgatgtctagtattcagttttttgatgttcacctttaaaaatgtaacctataatttcatatcagttgtaaaatcccaaatgagaagactttactcgttgagtttttgtaagaaactcgttttatttggaaatatcttcggtttaaataggtgacatgagaatcgcatcttagagtaaatggcatacgcagaggcctaagtatttcaggccttttaatttaatttatttattaacaatttattattaacaataacaacaccaataaataacgatccttgttcaatctaagaggcatagcacatttacataagctttatgcttaaatgtcgactccatcggctaaaactaactagagaggacaaattatattttaaaaagtaattcaaaattcgaatttaatgatgaagatgacgttattataatacatacaattctcttgcgccaaattcagaatatttgcttgcctttatgaactctcttatcatcctgaagtcaattaaaagtcattaaaaatctttgaaaaattattatattttttatttgattaccaaaatgaattgctgtacagagatttcacgcagctatttaaatacttgcgcacatcttttcaattttgcaccttttcgactatcagatacccgttagtcgttgcaaggtagtgcaagggagatggagacacatgtgacccatgtgcgccatctagcgacagtttcaataatagcttcgacgctctgatgtttgactgaataactgcaatatatgtataagaaatagtttgtatttccctacgaggttttgaaatttcttgacgttagagtaggcgtagcccaaatatttaaaaaaaataccttttttttataagttgccagttcacagcttttagcgttttgttgccgttatggcgtgcaatgaaaaaaattgatgagctaggtgtcactagaatctccatgtttgattccaacatttcagcccgaataggtccggacaaacagacgaacgtggttggattgacttcgctcttaatcccgatcaagaatatacatgtgtatactttatatgttcggattcgcatcctttttcctttcagatactgtaaaatcccaaatgagaagactttactcgttgagtttttgtaagaaaactgcttttatttggaaatatcttcggtttaaatagatgacatgagaatcacatcttaaagtaaatggccttcgcagaggcctaagtaaatagtccccgccttatcaaggtcccaccctccggctcatctgcctatattgagcggcgaggaccttatctgtggtctcccactaagggactattttaggaggcggggaacgatctcaagtgactgactcatgtggtgtgcacatgattttgagcactgcacccatgtcgccttagataacaaaatcctaaatataaattatcgctctcgattcatttacataagatatgaacggatactttgatacagtcacaattgtctcagtaattttgcacatgtaagattctccctcaaaaaatttcctggattacttttatttcgacactttgcgatttgagcccttcagctgaataactgaactgagaagctcagaactgcaacacttgagtttgtgtagcaatgtggaaagggctctcggcttgaaagcgcaatcgttaagggataaataacgtttgttcttagaggaaaacaactttgccaatgtcacacgaacaagaatatattagagtatatatgtatgtatatacatatatattgtaggtaaagcgattgaaccgcttcagcaattgtattgtcaaaacattggtctgcctatacttaaaaagtaacaacgcttattcgttaaataagatacgttcttatagcatatagaaaagtggaaactcacatcttttctcatggtgaggaccaccactacgttggtctaagccatttataatattagaacatgtgaatttcattttagctatataagcttgaacaatgaaataaaaatgcagtttgaaatatcaactcaacgaatgcagacatatgcttagtttgcagcctctttaaaagtatgcttttaaaaatagtttctgaacccaacgtaaaaatttggaaaagaactgaatatggctcttaattcctaaatgcaaaaatagtaataataataaagaaactcatttacaaactttttatcaacttttgcatgtttaagttttgtccttaggatttttaatatccttctgaaaatatttgttatgccccaaattctccctttatttgaattttatttttgacgtaattatatattttaattgtaattttctttttgacgtaattatatacctaaaaaacttttcaagtaatcttgtttccaggcaaaagattgagcttatgatcaatccgctgtcgccagatcttcaagactaacatttatggagataaggaaatccatttgaattgagaaaagagaattgctaatagcactatgagaattaatttaaaattggcaaatggggacttaaggaagcagatttttctactactaacgaatttgttggcattctatactattgcgaggtcgcgtggttgataaaaatattatttttgtgtaaacataatttagtaataattgtgtttttcttgtttatatcccgtgaataaagcactttgaaggcatcaattaaggaacgtgttcaagcttttgtaagcttgtttattcgttgattagaacgctacaatttgaagtgactagctagtaatgtgacattaaatttttcggataactttagtacaatcgcttgtaggtcaacagtaaaactaactaaatactaaacctattccttggagacgggtttgcaggctatcatgtacactggaaagagtcccttgggaaagttttgttgcttgaccttgcgtacaatgcgaaatccggcttcctttaggaagtgttcatagctgtccagaggcctcgttaccgacgagtcgttcctatcttccactgtcttcttcgagctgctcacgttctccttcagacacaagaaggcgccgggcgccagtccctgctttatgcgtcgaaagaacgagaccagatcgcggtccgtgagatggcccaggacccactgggtccaaacgaggtcgtactgttgcgtaggcgtaaacttctgcaatcccacgttatagatctgtcccacctttccacggcttccgtcttccgaagtgcagtactcccgtgctttatcggcaaacgcgggatcctgctcgacaagatccacgcagctgaagcgggggatcaggagattccgagtcacccgaccaatgccagctccgcagtcgagggccaacctgttgcccggcacgcggatctcgcgcaggaacacattcgatccctgtatatctatggcactaatgtagcccaggccgccgagcatcccgttaacagtcgccggtacctcagaccaatatttttgtgccttattgtaaaattcggactccggtgcggcgactttggtcgaactatcgctcgaagaaggggacgctgtcttggcatctgaacttgcggctatactgctatcatccttctgcttcgacgacccctggaccttatccgtggtctcgtccatcatctgcaacttgtctgaaagctgctcttctaatgtagtcgtcatttttgtcaggatttcgaaggccgcatgctttgttttgttttagtgcgataaccagggctcctaaacacagtgagccatttaggttttacgaaagagtggcaacccttcaccaatcagctgttcaacaagcaacaaaattgtccgtttgtttatgttactagttttttgtttaatttttctattgtccggacaaaatgactctcgatttggatgcgcataagaaagatgacaagttgctgatcacaaccatacagcaggagtataaaattctggccgaatagtgagttttcagagttcactgataactacgtggagtaaaactaaacttatttaatttcttatgttttagcaaaatgattgagtcggagaagttgagtgggatatatgtgatacccagctatgctaactccttgcgttagtctacccacctgccaacctgtatgcagtctttagctaattttatcttttgttaatagagtggtttggagtcttctttggccgacagggcttgtatgcggaaagtgtttttcgattcacaattttgctcccagatcgttttcccgacgacaaaagtcttccggtgagtaggatcggcaatagagcaaacgtatttaactctacaagtcccctttagagcataattttccagcaggatgtgattcatccccatgtgtgcccgtacacccacagtttggacgtgagccacgccttcccggagtggcgctgtggagaggatcacctttggcagcttttaaagtacctgcaagtcattttctccgatcccttggacagtattcggggcattgaggtagataagctcaaaaacagcgaggctgcggagctgctgatgaataacaaggaggagtatgttgctcgcgtacaggaaaatatcaaggagagcaaggagcatatatttgacaccccacccaccgaagatccgcactacatagtattcgagaagttccagcaggacgtgcacgggcccgttctggagcgcatcaaggccggaagaagcaagctgacggagccttcagcgcaacaagcaaatggtggacatgcaactggtctgtcatgggttaaggagggcgagtttaagccacttagcattgagtaaaaccaatatacatatattctgtaagttatattctatcgttgtctcaattttaaaacgattaaagttattcaattatttacaatcctcgttcatgggaaatcgctgagtattgttaacccactcgttctgcaactctaaacgttctccgttccattggaaatgtgtgggggaagcctcgccagcgagaaactcaaagtgctggctgagctcgatggccagtttggagcggactaggcctattccgcccacctgtggcgcagctggatgatagacccttccgtttcgcggatccatgtacagtttgtggggttcgtaaggcagggtaaggacctgtcccgcgtgtgcatagctgagcacctccgtatcgtccttcctcagctgttcagtaaacacaacaggtgtgtcatcgcacctaataaaattcctttcgcggccacagagggaaatgtatggaaattcgctttcatatctgctcgttttgtttagccgcagtcggttgaaaaagaacttgaggaaatccttctccttaaagcagctggtgaagtttttcatctttgcatcgtccaggaagagctgcaaaacgggttatgcgagttgaagcacagatgcatagttgagagtctcaccattccctcatgatcgatatagtaaaagtattcgcgaatttttggctccggagattgaccttggttatattgtacgtaacggcaagatatgcttggagatctaacgaattttaggtttgtaagggatctagaacgtagtataaacattgttcctctatctgagtactgtgtcttcttatgagcaacaaaaacagctgacttttgtttactacatctgtaggtgcatttgataacctcccattatcaatttaacgtttttacagttttgtattttctcaataggtagcgattatttttgcaagtacattttttggcagtcacatatttttgcatcgcgaatacagcgatatacagaaatgaaaacattttatttaaaaaaaggtggctatgtgactgtctattgaattcg

SEQ ID NO: 28715 - DNA, 991 bp, DROSOPHILA
aaattggttcaattctggtggtacagttagcataatattcttttctttttaaacctacccagcattatgtaatcgatttaggagtatttatagtaaaacgaatataaggcttgcaacttagccgaaaaatgtgcgatcatatttaaaccgcttccaaatctgaaaagaagaaacgtgaacaataaatatttttatgtacatacatatgaacatatttatatatgtatgtatgtgtataataattctgtatatatgacaagttgctgatcacaaccatacagcaggagtataaaattctggccgaatacaaaatgattgagtcggagaagttgagtgggatatatgtgatacccagctatgctaactccttgcagtggtttggagtcttctttggccgacagggcttgtatgcggaaagtgtttttcgattcacaattttgctcccagatcgttttcccgacgacaaaagtcttccgagcataattttccagcaggatgtgattcatccccatgtgtgcccgtacacccacagtttggacgtgagccacgccttcccggagtggcgctgtggagaggatcacctttggcagcttttaaagtacctgcaagtcattttctccgatcccttggacagtattcggggcattgaggtagataagctcaaaaacagcgaggctgcggagctgctgatgaataacaaggaggagtatgttgctcgcgtacaggaaaatatcaaggagagcaaggagcatatatttgacaccccacccaccgaagatccgcactacatagtattcgagaagttccagcaggacgtgcacgggcccgttctggagcgcatcaaggccggaagaagcaagctgacggagccttcagcgcaacaagcaaatggtggacatgcaactggtctgtcatgggttaaggagggcgagtttaagccacttagcattgagtaaaaccaatatacatatattctgtaagttatattcta

SEQ ID NO: 28716 - protein, 214 aa, DROSOPHILA
MIESEKLSGIYVIPSYANSLQWFGVFFGRQGLYAESVFRFTILLPDRFPDDKSLPSIIFQQDVIHPHVCPYTHSLDVSHAFPEWRCGEDHLWQLLKYLQVIFSDPLDSIRGIEVDKLKNSEAAELLMNNKEEYVARVQENIKESKEHIFDTPPTEDPHYIVFEKFQQDVHGPVLERIKAGRSKLTEPSAQQANGGHATGLSWVKEGEFKPLSIE

SEQ ID NO: 28717 - DNA, 7489 bp, DROSOPHILA
gaattgagatgtgtatatggataatgatctatctatgtctcttttattacctatccactgtttatccaaacggttagatccactgaaaatatccgatgaacttcaagtgcgaaaacgtgctgcagcagtagcaaatatttgttaatctattactaagctaatatacgtaatggttgtaaaataggcagtattaatacttcaattaggggaatttttcggagtttacaagcaaaacgcataagaaaacacaagctgaaaagctggcatttaattgtacaagtttgccgtgcatttttaaaacctgctttgaattttgatcacgtgagtcaactcatgttaatgagcagaccgattgttctgtttagtggaataacaccgaagtaccaagcggtggactttggtcagaagattataattgtacttaggccaacagatgcggtcggaattttagaaacccagattcccaagagggaaccactctttactttcaaacaaagtccagaataaaaaaatgtactctacctttttttatatggtattagcagtcgttgtaacccgtcgtgttcttaaatttccaattgcaataacttcaaaacgagaccttctagatccgcttgtttgtttgtttgttttttcgaaagtaatgtcgataaccttaaggcatttgtggcaatcgagctttcgaaattaacagataattaacgcgtttaatgcaatctctcaatcgtaaagcagagcgttcattatttcaaatattgccattgatgatttaaggtggttaagcggtggttggttgcgactgttatcaaatatttctatttcaaaatcaggttttagtgttacagttactggaattataacgtaatatgtttataaaccaaagcaccacatttccgaaaattaagcggtataaaagctaaaataatagctctgattataataaatctgttatgtatttttgcaatctttcagatacatttaagtcctaggcgggatcagcatgttcattccggccgcccagtccgcgtacaggacgctgcgcaagacccagccacgcgtccggctcaacgccatcttcaaaaatggctactccagcaaggtgagttacttagattagatcaatttaaacacgaaagaaaatgcacccaaactccacccacaggtggagtacaagcccatccggtcagtgctggtggctaaccgcggtgagatcgccatccgagtgttccgtgcctgcacagagttgggcatcaaatcggtggcggtctactcggagcaggataagatgcacatgcaccgacaaaaggccgacgagtcgtacatagtgggcaagggtctgcccccggtggaggcctacctcaacattccagagctaattagggtgtgcaaggagaacgatgtggatgccgtgcatcccggctacgggttcctttcagagcgcagtgacttcgcccaagcggtgattgatgctggactgcgcttcattggcccctcacccgaagtcgtccagaagatgggtgataaggtggcggctcgtgtggcggccattgaagcgggtgtgcccattgtgcccggcaccgacggtccagtgaccaccaaggaggaggcactggagttctgcaagaagcacggactgcccgttatcttcaaggccgcttacggaggcggaggtcgcggcatgcgcgtcgtccgcaaaatggaggatgtggaggagagcttccagcgagccagttccgaggccaaggccgcctttggcaatggtgcgatgttcattgagaagttcatcgagcgaccgcgtcacattgaggttcaactgctgggagacaaggccgggaatgtagtgcatctgtacgaacgtgactgctccgtgcagcgtcgccaccagaaggtggtggagatcgccccagcgccacgcctgcccatcgaaatccgggacaagatgacggaggcagcagtgcgcttggcccgccatgtgggctatgaaaacgccggaaccgtggagttcctttgcgacgagtccggcaacttctacttcatcgaagtgaacgcccgtctacaagtggagcacacggtcaccgaggagataacaggcatcgatttggtgcagtcgcaaatccgcgtggccgagggcatgaccctacccgaattgggctacacgcaggacaagatcgtgccgcgtggctatgccattcagtgccgtgtgaccaccgaagatccggccaacgattttcagcccaacaccggtcgcttggaggtcttccgatctggcgagggtatgggcattaggttggacagtgcgtccgcctacgccggagccatcatttcgccatactacgactccctgctggtcaaggtgatctcgcacgccagcgatctgcagagctccgcctccaagatgaaccgtgccctaagggaattccgcattcgcggcgtcaagaccaatatccccttcctcctaaacgtgctggagaaccagaagttcctccacggcgttctcgacacctacttcatcgacgagcacccgcaactgttcaagttcaagccctcgctcaatcgcgcccagaagctgctcaactatatgggtgaggtgctggtcaacggaccccagactcctctcgccaccactctgaagcctgccctcgtctcgccccacgttcccgaggttccgctgggtgagttctgcgcaccttatccactagaggatccccactttaatggcatgtgcttttcgggttcacgcttgcttatgtggctaccacttaagccaatcgcctctttccgaatgtttcagcggggtcctctctcgaagcattaaacatcccgactaagaaactatcttcaattgccaagttttaatttcgaggatttgctcaaatatcaaatgagattgtaacttatttaaacttaactatcattttctattcgtttttgctcaatggtaacaattttcgaaatatcattgcatgtattcaagttgtaatgtcaatccaggatttaaaagatttatgagtaatttaataatctctcatctaactcagtacattgcttcgtgttaggaccccagagatactaaatctattaaatggatatactactatcaaacttaatagatcctcaatgcacttcttttcaaaagtaatcaatgaaaaggcatgtttgttccacgcatctcctgtgaaatgttctttgcttttctgatatgctttaatcaaacctttatgtttttactctttcaactatcaatttttgttgcatctgttattaatcaaccaataccgaatcgaaaccgcgatcgcaatcgaatcggcatttgcaaaacaccaataccaatatcacacaccaatgtctgtaccgacaccaatcaacaacgattacaaatcgcacaacacaccaaacccacgaccacgaccacgaccacgcccactccgcctctaccacatgatcatacatagatctgtccccggaagctatagaacgcgaagaacgtggcgaggcaaaaggtacgttcacttctttatcccgaaatcacgcaggacatttgtacatacgagcatctatcatgtcggtttatgttgaagggtatctatcctaaggtactcctaacactttggaccaatcgttttgggattatcggaatatagagctaatatacatacaataaacatatgtgatgttgtggtgtttcaatttgattgcatatataatcattttgggtttaagctaatgttatttactatactgaaacaattgtatttttgcaattttttaattacgcagcttttggttttaccagcttttttgatgtttagcttttatgtattaaattggtattattgttgttgtattgaccttaaccgttgatgtcccaaatttaatgatataatcccgtaaaaatattgatatatttaaaccttataattgggaatatatcgactatacccaatcaaaaaactaacacgattttatggtatatacagttacggaaccaccgaagggactccgcgaggtcctggtgtgcgaaggtccggaggccttcgccaaggaggtgcgcaaccgtaaggaactgctactcatggacaccaccttccgcgatgcccaccagtcgctgctggccacccgcgtgcgttcccacgatctgctgaagatctccccctacgtgacgcacaagttcaacaacctgtattcgctggagaactggggcggagccaccttcgacgtggcgctgcgcttcctgcacgagtgcccgtgggagcgcctggaggagatgcgcaagcgcatcccgaacattcccttccagatgctgttgcgcggagccaacgccgtcggctacaccagctatccggacaacgtggtctacaagttctgtgagctggctgtgcagaccggcatggacatcttcagggtgttcgactcgctcaactacctgcccaacctgatcctcggcatggaagccgctggaaaggcgggcggcgtggtggaggctgccatctcctataccggagacgtcagcgatcccaagcgcaccaagtatgatctgaaatactacactaaccttgccgatgagctggtcaaggcgggcacccacgtgctctgcataaaggatatggctggtctgctcaagcccgaatccgccaggtgagtctgaaggggtttttaatttttttctgttgtgtactattttgtttccatcccctgaaaggcttctgatcacagccattcgtgacaagcaccccgacatcccaatccatatccacacccacgacacctctggagcgggagtggcctccatgctggcatgcgccaatgccggagccgatgtggtggacgtggccgtcgactccatgagcggcatgacttcccagccgagcatgggtgccgtagtggcctccctgcaaggcactccgctggacacgaacttggatctgcgcacggtgtcggagtactccgcctactgggagcagacccgcaccctgtacgctcccttcgagtgcaccacaacaatgcggtcgggcaacgccgatgtctacctcaacgagattcccggcggccagtacaccaacctgcagttccaggccttctcgctgggtctgggcgacttcttcgaggacgttaagaaggcctaccgtgaggccaacctgttgttgggtgacattatcaaggtgacgccctcgtcgaaggtggtaggtgatcttgcccagttcatggtgcagaatgacctgaccgccgatcaagtgctggagcgggccgaggagctgtcgttccccaagtcggtggtggagtacttgcagggctctattggcattccgcacggcggattccccgagccgctgcgttcgcgagtgctcaaggacatgccccgcatcgagggacgtccgggagccgaactgaaggacttggactttgacaagctgaagaaggaactgcaggagtctcacacctgcgtcaccaaccgtgatgtcatgtcagctgccctctacccgcaggtgacgaatgatttcctaaacttccgcgaaaagtacggacccgtcgacaagctggacactcgcatcttcctcacgggtcccaaggtgggcgaggagttcgacgtacctctggagcgcggtaagacgctgagcgtgaaagctctggctgtgtccgccgatctcaagcccaacggtatccgcgaggtattctttgagttgaatggccagctgcgcgcggtccacatcctggacaaggaagccgttaaggtaggttcagtcagcagtcatcggtgatctttaggcaatggaatcatttgcttgctcttcttccgcaggagatccatgtccatcccaaagcgaacaagtcgaacaagagcgaggtgggcgcccccatgcccggaactgtcatcgatatccgcgtgaaggttggcgacaaagtggagaagggtcagcctctggtcgtgctctcggccatgaagatggagatggtggtgcagtcgccattggcgggcgttgtcaagaagctggaaattgccaacggaacgaagctggagggcgaggacctcattatgattatcgaatagacagtgccaccggatcaaaatgtccattgtctaagctgccaccgcacacacccaatgtaaaattaagtgaaaacagtgataatcttagggactctgtcagttcgattgatcataaaactgtccaaagtcgcctgtgtctatttttatatgaatcaaaatcattcatgtttccgtgtttccaggatcaatcgaccatgagtaactggtcaaattttttagctgtccctgccaaaatatatcggattgcataagttcgtgcccaagtatatttgtaaatttgtcgtagggcttttcccgcaagtcatttgaatcaaatttgtacgattatggaatttttaattcgcaaacacctgtgtcgagattccccctctagtaaatacgtaagtggttattaatgttatattaactattgtgtaataaacgttatacaaaataaaaagtaacgccctggtttttgtagtgtgaaattggtgattaaacatctcgaaacaaatatgtaatgtatggttatctactttatttttttcctaaaattaattaaactgaattaagttaacaatcatgaatgaaacggctccgaagctaaagcctacatgcacttgacaatgaactctaggaaagccagatccttgttcagctcggtgacccgcttaaagtgtctctggacgtacggagtgagtacctcgaccatgttgccattgtagtagaacctcgccttgggatccagaagagcatctccgatcaagtacttgaggatcatgttgcccgcctgcgaatggcgcgagttggtggtccatgccttgacgtgctgcagcagcgcaacccgctggtcaacgttcaactggtcaaccaattgccggagaccgggctcatctcgcttgcggacaaagtggttgataatatcgaaactggctttgggcttgtccaggttcagagccaacacgaaggccttgtgaagctgcttctgggcgtgcagaagggaatgtagggtctgctcctgctccaatgcggcctgccgcttgtccagcgcttcgtttcgcgtcacctgagtgacatcaccgaagcgaatcagcttggagtccgcgccgccggtgtaaaagaaccgattgctcctggcggatacggccagcgcccaaaccctatcgttgtgctcgtccagggactgcagacatgtgttggtcttgatattccacagcttaagaaggccatccgaagcagcggagataatgaacttgccgtgatccaggaactcggctctcagtatggtgcactcctgatcgaaacgttttatgcacgaaaaattgctgatggaccagatgcggagagtacagtccgacgatgaggtgagcacgatctgatccaccggagagaagcgcacactccacacaccgcgggtgtgtccccgcaacactccttgcagcgtgttggactccgccagccaca

SEQ ID NO: 28718 - DNA, 4034 bp, DROSOPHILA
atgttcattccggccgcccagtccgcgtacaggacgctgcgcaagacccagccacgcgtccggctcaacgccatcttcaaaaatggctactccagcaaggtggagtacaagcccatccggtcagtgctggtggctaaccgcggtgagatcgccatccgagtgttccgtgcctgcacagagttgggcatcaaatcggtggcggtctactcggagcaggataagatgcacatgcaccgacaaaaggccgacgagtcgtacatagtgggcaagggtctgcccccggtggaggcctacctcaacattccagagctaattagggtgtgcaaggagaacgatgtggatgccgtgcatcccggctacgggttcctttcagagcgcagtgacttcgcccaagcggtgattgatgctggactgcgcttcattggcccctcacccgaagtcgtccagaagatgggtgataaggtggcggctcgtgtggcggccattgaagcgggtgtgcccattgtgcccggcaccgacggtccagtgaccaccaaggaggaggcactggagttctgcaagaagcacggactgcccgttatcttcaaggccgcttacggaggcggaggtcgcggcatgcgcgtcgtccgcaaaatggaggatgtggaggagagcttccagcgagccagttccgaggccaaggccgcctttggcaatggtgcgatgttcattgagaagttcatcgagcgaccgcgtcacattgaggttcaactgctgggagacaaggccgggaatgtagtgcatctgtacgaacgtgactgctccgtgcagcgtcgccaccagaaggtggtggagatcgccccagcgccacgcctgcccatcgaaatccgggacaagatgacggaggcagcagtgcgcttggcccgccatgtgggctatgaaaacgccggaaccgtggagttcctttgcgacgagtccggcaacttctacttcatcgaagtgaacgcccgtctacaagtggagcacacggtcaccgaggagataacaggcatcgatttggtgcagtcgcaaatccgcgtggccgagggcatgaccctacccgaattgggctacacgcaggacaagatcgtgccgcgtggctatgccattcagtgccgtgtgaccaccgaagatccggccaacgattttcagcccaacaccggtcgcttggaggtcttccgatctggcgagggtatgggcattaggttggacagtgcgtccgcctacgccggagccatcatttcgccatactacgactccctgctggtcaaggtgatctcgcacgccagcgatctgcagagctccgcctccaagatgaaccgtgccctaagggaattccgcattcgcggcgtcaagaccaatatccccttcctcctaaacgtgctggagaaccagaagttcctccacggcgttctcgacacctacttcatcgacgagcacccgcaactgttcaagttcaagccctcgctcaatcgcgcccagaagctgctcaactatatgggtgaggtgctggtcaacggaccccagactcctctcgccaccactctgaagcctgccctcgtctcgccccacgttcccgaggttccgctggatctgtccccggaagctatagaacgcgaagaacgtggcgaggcaattacggaaccaccgaagggactccgcgaggtcctggtgtgcgaaggtccggaggccttcgccaaggaggtgcgcaaccgtaaggaactgctactcatggacaccaccttccgcgatgcccaccagtcgctgctggccacccgcgtgcgttcccacgatctgctgaagatctccccctacgtgacgcacaagttcaacaacctgtattcgctggagaactggggcggagccaccttcgacgtggcgctgcgcttcctgcacgagtgcccgtgggagcgcctggaggagatgcgcaagcgcatcccgaacattcccttccagatgctgttgcgcggagccaacgccgtcggctacaccagctatccggacaacgtggtctacaagttctgtgagctggctgtgcagaccggcatggacatcttcagggtgttcgactcgctcaactacctgcccaacctgatcctcggcatggaagccgctggaaaggcgggcggcgtggtggaggctgccatctcctataccggagacgtcagcgatcccaagcgcaccaagtatgatctgaaatactacactaaccttgccgatgagctggtcaaggcgggcacccacgtgctctgcataaaggatatggctggtctgctcaagcccgaatccgccaggcttctgatcacagccattcgtgacaagcaccccgacatcccaatccatatccacacccacgacacctctggagcgggagtggcctccatgctggcatgcgccaatgccggagccgatgtggtggacgtggccgtcgactccatgagcggcatgacttcccagccgagcatgggtgccgtagtggcctccctgcaaggcactccgctggacacgaacttggatctgcgcacggtgtcggagtactccgcctactgggagcagacccgcaccctgtacgctcccttcgagtgcaccacaacaatgcggtcgggcaacgccgatgtctacctcaacgagattcccggcggccagtacaccaacctgcagttccaggccttctcgctgggtctgggcgacttcttcgaggacgttaagaaggcctaccgtgaggccaacctgttgttgggtgacattatcaaggtgacgccctcgtcgaaggtggtaggtgatcttgcccagttcatggtgcagaatgacctgaccgccgatcaagtgctggagcgggccgaggagctgtcgttccccaagtcggtggtggagtacttgcagggctctattggcattccgcacggcggattccccgagccgctgcgttcgcgagtgctcaaggacatgccccgcatcgagggacgtccgggagccgaactgaaggacttggactttgacaagctgaagaaggaactgcaggagtctcacacctgcgtcaccaaccgtgatgtcatgtcagctgccctctacccgcaggtgacgaatgatttcctaaacttccgcgaaaagtacggacccgtcgacaagctggacactcgcatcttcctcacgggtcccaaggtgggcgaggagttcgacgtacctctggagcgcggtaagacgctgagcgtgaaagctctggctgtgtccgccgatctcaagcccaacggtatccgcgaggtattctttgagttgaatggccagctgcgcgcggtccacatcctggacaaggaagccgttaaggagatccatgtccatcccaaagcgaacaagtcgaacaagagcgaggtgggcgcccccatgcccggaactgtcatcgatatccgcgtgaaggttggcgacaaagtggagaagggtcagcctctggtcgtgctctcggccatgaagatggagatggtggtgcagtcgccattggcgggcgttgtcaagaagctggaaattgccaacggaacgaagctggagggcgaggacctcattatgattatcgaatagacagtgccaccggatcaaaatgtccattgtctaagctgccaccgcacacacccaatgtaaaattaagtgaaaacagtgataatcttagggactctgtcagttcgattgatcataaaactgtccaaagtcgcctgtgtctatttttatatgaatcaaaatcattcatgtttccgtgtttccaggatcaatcgaccatgagtaactggtcaaattttttagctgtccctgccaaaatatatcggattgcataagttcgtgcccaagtatatttgtaaatttgtcgtagggcttttcccgcaagtcatttgaatcaaatttgtacgattatggaatttttaattcgcaaacacctgtgtcgagattccccctctagtaaatacgtaagtggttattaatgttatattaactattgtgtaataaacgttatacaaaataaaaagtaa

SEQ ID NO: 28719 - protein, 1196 aa, DROSOPHILA
MFIPAAQSAYRTLRKTQPRVRLNAIFKNGYSSKVEYKPIRSVLVANRGEIAIRVFRACTELGIKSVAVYSEQDKMHMHRQKADESYIVGKGLPPVEAYLNIPELIRVCKENDVDAVHPGYGFLSERSDFAQAVIDAGLRFIGPSPEVVQKMGDKVAARVAAIEAGVPIVPGTDGPVTTKEEALEFCKKHGLPVIFKAAYGGGGRGMRVVRKMEDVEESFQRASSEAKAAFGNGAMFIEKFIERPRHIEVQLLGDKAGNVVHLYERDCSVQRRHQKVVEIAPAPRLPIEIRDKMTEAAVRLARHVGYENAGTVEFLCDESGNFYFIEVNARLQVEHTVTEEITGIDLVQSQIRVAEGMTLPELGYTQDKIVPRGYAIQCRVTTEDPANDFQPNTGRLEVFRSGEGMGIRLDSASAYAGAIISPYYDSLLVKVISHASDLQSSASKMNRALREFRIRGVKTNIPFLLNVLENQKFLHGVLDTYFIDEHPQLFKFKPSLNRAQKLLNYMGEVLVNGPQTPLATTLKPALVSPHVPEVPLDLSPEAIEREERGEAITEPPKGLREVLVCEGPEAFAKEVRNRKELLLMDTTFRDAHQSLLATRVRSHDLLKISPYVTHKFNNLYSLENWGGATFDVALRFLHECPWERLEEMRKRIPNIPFQMLLRGANAVGYTSYPDNVVYKFCELAVQTGMDIFRVFDSLNYLPNLILGMEAAGKAGGVVEAAISYTGDVSDPKRTKYDLKYYTNLADELVKAGTHVLCIKDMAGLLKPESARLLITAIRDKHPDIPIHIHTHDTSGAGVASMLACANAGADVVDVAVDSMSGMTSQPSMGAVVASLQGTPLDTNLDLRTVSEYSAYWEQTRTLYAPFECTTTMRSGNADVYLNEIPGGQYTNLQFQAFSLGLGDFFEDVKKAYREANLLLGDIIKVTPSSKVVGDLAQFMVQNDLTADQVLERAEELSFPKSVVEYLQGSIGIPHGGFPEPLRSRVLKDMPRIEGRPGAELKDLDFDKLKKELQESHTCVTNRDVMSAALYPQVTNDFLNFREKYGPVDKLDTRIFLTGPKVGEEFDVPLERGKTLSVKALAVSADLKPNGIREVFFELNGQLRAVHILDKEAVKEIHVHPKANKSNKSEVGAPMPGTVIDIRVKVGDKVEKGQPLVVLSAMKMEMVVQSPLAGVVKKLEIANGTKLEGEDLIMIIE

SEQ ID NO: 28720 - DNA, 3893 bp, DROSOPHILA
tgtcttgctggtgatgtagatgttgtggcggtcgctaacagcgggacgcggcggctgcttgcgcaccactcggtggttctgttgtttgtggtatttggcggatctcggcttggtcccgtgctcgggataattgcttcccatcatcagcggcggaggaggcgacttgtgttttccatttacctgcgcgtgtcgcagtttcggactcgcgactccattccgaatcgcacgctggccaacactggccaactctagcgaacactaggcaatagctgagcgatctggcagcctggctctagctgtcaccgtgacagctctcgatagttttgagccagcccatcgctatagctatcgccaggctcgtgagattctcgccagttgaaaatttttcgtcgtactctcgtaacaacaaaggtatgtttttcgttttggcaccttatcaagtacaccagaccgtaagccaaggcaccgatcgatgccatccaaagcaagaattaacttggccgcgcggcgccacttcgccactccaaatcgcaacactcgcacacacacacacatacactagcgcacttacacacttccgctggcgaattcctcgggcagcaggaaaagaagaaagaaaaaagtacaagttacataactcgctgatgcactcggggtagtcatgtctgtcggggtgagttgtttgatgaggggcgggccgggtctgcatcttcctgcgtaagttggcccccaccaaatggatccgtaaccgaatgggcgtacggatccccagggttacataagtcaccgcccgccaccgaggggttgcaacggaaagcgaacagaaacagtccccttaacgtagccactattttgtagccagaaagaaaactcaactcaaatcagatcagatcaaaccccctgcacagcgcgtcctggttcgagtaacgttttgtattcatgcgttcaagtcatttttccatgcaggcgaatccgaaaatccgatacgtttcagagtcgcaaacagtcaagagttaagcacaaatcgccactaaaagctaaaaggctaacaagctgaatcgcactgattcgcacgtagccagccaaacggaaggactcctccgcatccacagcagcagcaacggcgagcagcacgaacaacatccacggatgataacgtaacgtagccgcaacgttggagcaacaccaccttccacatccacttccaccgcagcggacatcgcaaacaagtaaattaccatttctcattttatcaaacagaaatctgccagccaagtaccaatccaatcaaatcgaatcgaatcaaatcaaatcgagtccaaatcaaatcaatgcatccaaatccaagtctgagtatccaaattgcataagagtcgcgtctgcgcagtgaagcattacttgtcgcgagcattacttatcgcccgtccacttggttggagttccggctcccgaatccgtacccaatgtcacccaagtcaacccgattttgattctgattcggcccggtcaaggagccagcgccagccaagtcaagacagtgctcgaaaataatgctagattctcgattatcgattcttggttctccattcaagattctgacacgcgccaaaccgaacagaaaagaatagaatcgaaccgtaccgaaccgaaccgagacgcagatccaaaaaaagaacaaaacgctaactgattacaaagtatacagatcttgtgtataggtatttcgtaaacgcgcctctgtcaactgctcgatttaacgcggcacagtttcgatttgcagatcatcactacatccacacccgacatgtcggcggcccgcctgccctactatcagcgggatcaggaggacggccaccagcggcgcgccgcacgcggccatcagcgcggctactacgagcgtggctctggttccggatcctccagacgagagcacagtcgctacagtcgcagccgttcgcgttcccgcagtcgcagccgctccgccgaacgctttggccagcgtcgccgccaccagaaacggcagtcatcccgttaccacagagaccgcgactccagagatcgctcccgagatcgctcccgagatcgctctagggatcgcgaacgtgatcgcgatagggaccactcaaggcgctccagccactatcgacgctcggaatcgccgtcctcttctgacattggccatggatccaacaacagtcaacgaagaggccaccatgcatcatcatccagtaaatcggagctaagcgccgtacagaaggcagccgctgcagctgccgccgccacaaatcaagtccagttggctggcaagagcagtgccgcgtccgcggtgggcgcctactacaacctggacaccgacgagccctttgacaaggagcgcatccaccgcgaaatggagcagaagctgcgcgaagcactggccagggagggcaaagtgtatccgccgccaaagcctgagccaccatcgcatcctgtcttcgccaacgacggctcgttcatggagctgtttaagaagatgcaggagggccaaaagcagcaagcgaccagccagttgatgcagccatcggtcaaagaggtcctgcagcagcagttggttccgccggaggcggcctccacagggcctgcactgccggccattgcattgggagctgccagcagtgctgcggcgccgtacattgctgccgcggcggccggaaagctggcgccgccgccacccatcgtgggacgacgtcgcggcggaaaagttctcaaaactggcgtagtggccaaagtgaagacgcccaatgagagcgacgtggacccgaaggacttctggtcgttgtacctggccgaggtcaacaagtacaagagcaacgcctgcgatacggacaacggcaagcggccgctggtcaagtagtcgccgaaatagtcgcgctttccatagaaacatgaacttgaacgcaaaaagagcgagaaacgtatactgcccagacgcagtactgcagattcgattttgattcgaccatacccctgttcccgagacaccatcacatagcgatcccttcccggcccctttgaaatgttttgtacacgaaaacaagcgagcagagatgcgtagcttatagttttagtcgagagtgggtgggcttatgagctgcaagcgcgagcagtgtaatttgtatttttttcacacgaatcgatataatataatataatatgatatataccgctcattaagcaaacgcaaactgaagaactaaccattgtgatttatatatctatctcttccttcccgtttatgcactgaaattgtatttacgtttgatttcgattcggttgtgtaccgcctcacatcccatcccaccccattgtgttcatctctttctttttcatttggacaacgatccatctgtcccggtcttcgttttggtttactatttggttgccttaccgtttcgtttcgttatgtttttattttcctttgccaactaaagtctatatgcaatttttcatgtccaaaaacaaaagcagcgacaaatcgtcagacagcagcaacatgtccgcctacaagctggagaccgccccgttcgacccacggttccctaaccagaacgtgacccgctactgctaccagtcgtacatcgacttccaccgctgccagaagaagcgcggcgaggacttcgcgccctgcaactacttccagaaggtctacaagtcgatgtgccccaacgcctgggtggagaagtgggacgaccagcgcgagagcggcacattccccggccgcatctaagctgcgccagagacgcagcaacacagtaaacccagcaatccagcacccaaacacacaggacacgatcgatggacggacggaggtagaggagcgtggtaaccagaatccggcaattgcaacagagact

SEQ ID NO: 28721 - DNA, 1355 bp, DROSOPHILA
aaacagtcaagagttaagcacaaatcgccactaaaagctaaaaggctaacaagctgaatcgcactgattcgcacgtagccagccaaacggaaggactcctccgcatccacagcagcagcaacggcgagcagcacgaacaacatccacggatgataacgtaacgtagccgcaacgttggagcaacaccaccttccacatccacttccaccgcagcggacatcgcaaacaatttcgatttgcagatcatcactacatccacacccgacatgtcggcggcccgcctgccctactatcagcgggatcaggaggacggccaccagcggcgcgccgcacgcggccatcagcgcggctactacgagcgtggctctggttccggatcctccagacgagagcacagtcgctacagtcgcagccgttcgcgttcccgcagtcgcagccgctccgccgaacgctttggccagcgtcgccgccaccagaaacggcagtcatcccgttaccacagagaccgcgactccagagatcgctcccgagatcgctcccgagatcgctctagggatcgcgaacgtgatcgcgatagggaccactcaaggcgctccagccactatcgacgctcggaatcgccgtcctcttctgacattggccatggatccaacaacagtcaacgaagaggccaccatgcatcatcatccagtaaatcggagctaagcgccgtacagaaggcagccgctgcagctgccgccgccacaaatcaagtccagttggctggcaagagcagtgccgcgtccgcggtgggcgcctactacaacctggacaccgacgagccctttgacaaggagcgcatccaccgcgaaatggagcagaagctgcgcgaagcactggccagggagggcaaagtgtatccgccgccaaagcctgagccaccatcgcatcctgtcttcgccaacgacggctcgttcatggagctgtttaagaagatgcaggagggccaaaagcagcaagcgaccagccagttgatgcagccatcggtcaaagaggtcctgcagcagcagttggttccgccggaggcggcctccacagggcctgcactgccggccattgcattgggagctgccagcagtgctgcggcgccgtacattgctgccgcggcggccggaaagctggcgccgccgccacccatcgtgggacgacgtcgcggcggaaaagttctcaaaactggcgtagtggccaaagtgaagacgcccaatgagagcgacgtggacccgaaggacttctggtcgttgtacctggccgaggtcaacaagtacaagagcaacgcctgcgatacggacaacggcaagcggccgctggtcaagtag

SEQ ID NO: 28722 - protein, 362 aa, DROSOPHILA
MSAARLPYYQRDQEDGHQRRAARGHQRGYYERGSGSGSSRREHSRYSRSRSRSRSRSRSAERFGQRRRHQKRQSSRYHRDRDSRDRSRDRSRDRSRDRERDRDRDHSRRSSHYRRSESPSSSDIGHGSNNSQRRGHHASSSSKSELSAVQKAAAAAAAATNQVQLAGKSSAASAVGAYYNLDTDEPFDKERIHREMEQKLREALAREGKVYPPPKPEPPSHPVFANDGSFMELFKKMQEGQKQQATSQLMQPSVKEVLQQQLVPPEAASTGPALPAIALGAASSAAAPYIAAAAAGKLAPPPPIVGRRRGGKVLKTGVVAKVKTPNESDVDPKDFWSLYLAEVNKYKSNACDTDNGKRPLVK

SEQ ID NO: 28723 - DNA, 5093 bp, DROSOPHILA
ctgcggctaaccacgttttgtaataagcgtaattctatatagtcacgtcgagcagtaagtcgacagtcggccaagacagcggccaatccgccagattgatgtgtcgcccacttaatgccgagcgactcttttgggacaagttgatgcggcaaatcctcagcttaaaggaagcccgccaagtgcggcggagcacgttctgggttgcttggagaggtcaggtccagatatggacactgggcgccctgctccactggttgtgccggatgattgggtgctcgtcatcgtagcatcacggcatcatggcattatgcattacctcgatccaaattatagagcccagtgattccggagcagggctaaccagccggacaactggcgtcgattatggcgggccaccggacactggccaatctttgtccggggattgcttgataagcgggtgccagccgtccaatcggcccattcaaaggcccaccggctcttctcacgctcatttcgcaagcgatttggaggcggcaaccagtgttggtaagcacctggccagctatagcgattttcgtaactgtaatgctaaacctctcaccacaaaaggggatggtgcgggggcgggaccaacggggcgaatacaaaatttataaaagcctagtcgtcggcactggggattttagtgcgcgttcgtttagtctgggcaacggttgcttaaaaaaaaaaagctcgaggatcgtgcaggatcaggactggaaatcaagctggagcaaatggaatctgtgtagaatcgctagggatcaacagcgtcagttgaaaatatgcccaacgtggacgagcagcggggaaaagcagctacaaagagagcggaatcggagcaatcggaggaaaagggtgaccgccaggagggggacggggatccgaaagacgagtctgaggaggccaccgcgaagatcaagggccgttcccgattcactgcggctctgcgaagcctctcgaagaccaaaaccaaaagggaaagggagctggataaaagcaccgacagggaaacacgcagcgcggaggaagaggctcaggaaaccccaggcgagctcgaagacgtggccagctccatctccacggacagtggagccctcggcaagaccaagaaaaagagcctgacgcgccgcctgcttcttggaggcctgagaaaaagtgggaaaacgccgaaggggcggccccacagcttggcgaccagcgacgacatcagcgtggagcacctggaaacaacacccctgccatcgccacccggttcgcccacctccgccggcagcagcacgctgcagatcaccatcagtggcaagaaggtggagccatcgcccgccaagaagagcggcaagagcagacccaagagcgacacggattatctgacacccgccgcagaagaaaggaaaccgagaaagaaaaccactaccaccaccgtgaccacgagagatacgagcagcagcacccgcaccaccaagctgctggtgtcgaagaagaagccccagagccccgagagagagtccccatcggcgtcgccgtcgccgcttatcaccaccaccgagagcacgcgcgatacgccgcccagagaacgggcgccagcaaaaccaagtcgcgttcagtcagccagcggcaccggagctgttcgcaagtcccaatcctcgagcgcatccagcaggaagctggaattgatgcagcagcagcagcagcgcggccaccgcctcaacgccagaccactggctgaactagcgaacacggaaccccagccatcagggcagcaatccctggacccatccacatcccctccggcggctgaggacggagtctcctcggcggaaagcgcccagactattgctaatcccccgcccgttgtccgctttgaagtgggcagtgcagtcaggagtcccttgagtgcctacgaagccgcattggccgccgccgccagtcaacagcccaactccaacgaagagctcagcgactccagcatccggcgtctcagcttcgctcagcagcagctcatcctcggcgaccacgacagcatcgagggcaggcgggaaacactgcactatcagtcggtggctagtgaatactccaaccaggactccggatccgaggacgatagcgaggagcaggcggataccacagagccagagaacgccaagcccatgccggccttcggtgacctgaccatggatcaggaaatggaaccggtaaggtctcgtcgtcgtcggattgccaattcgccagttgtcatttacctacgaagaagcgaagaagccccacaagtgatatgttggcccccttatagtgtgtgttccagagtgtcattcaactgtgcgggcggcgggcggtggtaatagcccagggggtctcgtcaactaaccagcaaatctcagtgcggattgacgagcagcagaaggtgtaactaataccaggcttagaatttattaaagtggtgaattctcacttcctatattatatattgatatgcttttatataactgagtgtaaacgtgctatgatagaacaaactttactacttattataattcgaaatgcacggattatttatatttgtatcttgaaacccagagcccaaaagtatgtatctctttatcttgagatttcaagtcacaagtgggatttcattgtttagtgtatcaaatttatcaaactattctattaagcatggatcgaacatacaagtaactctcatccaatccttgcttgcaggccatcatgacatccaccagcgataagcgcgagcatctgtacaagattctagtcattggtgaactgggcaccggcaagacgtccttcattaagcgctatgtgcaccagttcttcagccagaactacagggccaccatcggcgtggacttcgccctgaaagtgctgcagtgggacgccaatacgatagtgcgcctccagctgtgggatatcgccggtcaggagaggtttggcaacatgacccgtgtctactacaaggaggcggtgggcgcgttcatcgtttttgatgtgactcgcagtgggactttcgattgcgtgagcaagtggaaggaagatctagactccaaggtgcagctgccggacggcagtcccattccgtgcatcctgctggccaataaagtaagtgattgcctaaaggttaaaggagaccgcataatttctatattatgtgattaatacgttgctcatccgttttccagtgcgaccaggaaaagcagggcatcataacgcagcccgagaagatggatgagtatgtgagggagaacggatttgccggttggtttgagacatccgccaaggagaatatcaacatcgatgaggcagctcgtgccctcgtgaataaggtgataatcgctgctaatgcccagccaaagccccgctaatcttcttccactcgcccgacagatactcatcaacgataagctgatatctgccgatctggccgatggcgacaagttcaacttgagcgcggccgatgcaaccggatcggatgccaagaacaagtgttcctgctgacctgggaccgaggtccggcgactcctattcccattcccagtttaagagcgagtttcaacacagaaacgccatgtgcctacgtccactccatgttcatgttgttagaagatagcgataactatgcttagggttttaacgtaacatttgtctaagacttagtgtcatccgtatcatcccgtccgtctttatctttaacaccccgtctgtgggtccacaatgttgcgccggcatcgggatccgtgtcactttgagaatttatatggtgacacataacatacctacgcatacgaaacattattactatcaccatcattgccctagttgcgaggattagccggaggtagtgcagcatccgtatcatagcatactacatttgtgtaaaatgcgaatcgtcttattgttttgtttgttttatttgcctctgctggcgagattgttttatcttggaattattattctcgtatgcaaacacactctgccatcattatttgtatttagataacaatacgtacgcttaatgcaatgcgaaatcagaaataaagtttttaatggtagttaagttcagacgacgtgttttattggctgaataaattctgtgtaagtgcttttgtgatacaatgaaaatgttatgctactagtatttgccttcattgaatcactggtctttgtaaataaatacgaataaaagctttgtttttacatttccttttttaacggtaaaaaatcgtatccccaaccggcaatgtttttctttttttttaatattcaaactatcgatagttatcaactatggtattccttattgtttagtgatcacatattaaacttaaaaataatgatatacagataaaagtgtcgtgcgttcatattctacataaaattattagcaattatttaatcgttatgaaaagcgaaacgtataaactggtaattggtatgggaaaaattgggaaaaagctggaatcaggtttaattgcaatttggttttataaaatgttttatggcacaaacaaacatcctgactcaaaagtgaattaagcttgaaacttaaatactccgagaataccgtgaatatgcgtttaccaattgctgctgaacgggaccactatcgatagaaccttacaaactatcgaatcgctgcaagactattgccatcgatacttgcacctctatttattagtgttgtgtagccgtgttactgctaaattgtttattgcaaaaattccgcaaacgagagatattaggaatagaagacaatataacaattgggcaaaatgtgttagatgtttaaggtaagccaccgccagggctgcagctcggcggagccgtatccaacggtccgcgctctgggggccgcagcattccgcactcgtcacgtttactccccttttctggtctttgttggggctccgttggcacttctgctgataagtgcccaagtcgacttaattaatcagtgccctggagtcgggggcaagtcaattggatatttggaaaccgctgggaacgtgaaccagctgcgcgcccgaaagaccagtcatgaattgccgcggctctgattt

SEQ ID NO: 28724 - DNA, 1485 bp, DROSOPHILA
ggaaagggagctggataaaagcaccgacagggaaacacgcagcgcggaggaagaggctcaggaaaccccaggcgagctcgaagacgtggccagctccatctccacggacagtggagccctcggcaagaccaagaaaaagtgggaaaacgccgaaggggcggccccacagcttggcgaccagcgacgacatcagcgcggataccacagagccagagaacgccaagcccatgccggccttcggtgacctgaccatggatcaggaaatggaaccggccatcatgacatccaccagcgataagcgcgagcatctgtacaagattctagtcattggtgaactgggcaccggcaagacgtccttcattaagcgctatgtgcaccagttcttcagccagaactacagggccaccatcggcgtggacttcgccctgaaagtgctgcagtgggacgccaatacgatagtgcgcctccagctgtgggatatcgccggtcaggagaggtttggcaacatgacccgtgtctactacaaggaggcggtgggcgcgttcatcgtttttgatgtgactcgcagtgggactttcgattgcgtgagcaagtggaaggaagatctagactccaaggtgcagctgccggacggcagtcccattccgtgcatcctgctggccaataaatgcgaccaggaaaagcagggcatcataacgcagcccgagaagatggatgagtatgtgagggagaacggatttgccggttggtttgagacatccgccaaggagaatatcaacatcgatgaggcagctcgtgccctcgtgaataagatactcatcaacgataagctgatatctgccgatctggccgatggcgacaagttcaacttgagcgcggccgatgcaaccggatcggatgccaagaacaagtgttcctgctgacctgggaccgaggtccggcgactcctattcccattcccagtttaagagcgagtttcaacacagaaacgccatgtgcctacgtccactccatgttcatgttgttagaagatagcgataactatgcttagggttttaacgtaacatttgtctaagacttagtgtcatccgtatcatcccgtccgtctttatctttaacaccccgtctgtgggtccacaatgttgcgccggcatcgggatccgtgtcactttgagaatttatatggtgacacataacatacctacgcatacgaaacattattactatcaccatcattgccctagttgcgaggattagccggaggtagtgcagcatccgtatcatagcatactacatttgtgtaaaatgcgaatcgtcttattgttttgtttgttttatttgcctctgctggcgagattgttttatcttggaattattattctcgtatgcaaacacactctgccatcattatttgtatttagataacaatacgtacgcttaatgcaatgcgaaatcagaaataaagtttttaatggtagttaagtt

SEQ ID NO: 28725 - protein, 223 aa, DROSOPHILA
MDQEMEPAIMTSTSDKREHLYKILVIGELGTGKTSFIKRYVHQFFSQNYRATIGVDFALKVLQWDANTIVRLQLWDIAGQERFGNMTRVYYKEAVGAFIVFDVTRSGTFDCVSKWKEDLDSKVQLPDGSPIPCILLANKCDQEKQGIITQPEKMDEYVRENGFAGWFETSAKENINIDEAARALVNKILINDKLISADLADGDKFNLSAADATGSDAKNKCSC

SEQ ID NO: 28726 - DNA, 2801 bp, DROSOPHILA
agcctacgtgctttcatgttcaacagcactaaaataactcgttctttttatataatgcagaaaactgatgtttctgactgaaaaccgacgaaagaatggtttccacacttgtaagtataatgattgctaaagatttatgatttttttttgtgatgaaatcgttagatagggacgtctgatatctgtgactgatttatctcgatagtagatctgatttttaaaatattgttagcttgcgtgattttatgttcaacaacactacaataactctttctttttagataatgctgaaacccgaatttctctgacagaaaccctacgtaagaaggatttccacacttgtaagtttaaagtgttatgtgtacgtatatataaatatgggagtatttgaggccaagtcttaagctattgtctaggaaacaaaataccaaatacaaaaacgaaactaagggtattctttaaaacaacatgaattttgtttgtatttattaaatctatgaaaatgatccgtaaacaaaagtaaagaaaaataattttgcacatattttttttaggaaatctttagaactgtctgtaaaaatatatatttagagtaacccctgaataatgattaaatacttatgcataatttttatttattttacagggctcccttgcatgatgccagaaaagtggacgtaaaaaatctaataaaattatatttatagaaacagaatgcagcttgccatagttttattttttaaatatttttgagagacggttgggaaaagggagaaaaaatattgatacatcgtgtaggctggaataactaattcaaagtcacaccaatactttttccaaaccagttttgcaatctgcagtaaagtttttacaaattgatcaaatcactttcgttataatgaggtttcggtcgctgaagaacatatggccaaaagagaagttggagcaattcctatttttgttcattttatgtggcttgcccgccatatactatgttctaatggagataattctgccggagttgtcggattattggtcacctggttacgtatttcagctgctgctgggactgttcctcttttcgaatgtgatgtccaactatgtcatgtgcatcctggtggaccccagcatcgatcccaagcttatgaagaatcagttggtgcgcggacagcacagtgaggactggcacgagtgcgacaagtgcgggattcttgctccaccccggtcacgtcactgcaggaagtgtggcgtctgtgtcctgatgcgagatcatcactgcttctttactggttgctgcatcggtcatgagaactatagatactttttctattttcttatctacttttttctaagctgcatgatttcactaacgtcatcttcgatatttatttacgttctgcatgggggcagataccagctctttatgctgacacatcccgcaccgaactctgcctattttaactcgcttattatcaggataatctactttaagttgcccgatatatacgagctggtgttcactctggtattcgtcctgctgtggatcggggtatgcgtagctacctatgtggcttatgatcagtggtctcgtggctatttttgctatgattttgaacttcaaaacattccttttgaccgaaaactgcgccgaaacttcaagacgttcttgggcaggcgaatgaagtggacctggatctccggatttgttcccagccagctggaccacgacggatttgatctggatcccgacaacgaacgtgtggcagattggtgctcagaaacaaccatcaaggatggctaaataattttatgcattctctgtgttttccaaattaccggtgcgatgaaaaattaaaaattcgaattcatttgattagttcaggcatgcaagaaagctttccaaattaaaaagttaaatatttaaggatgtgttattatgcgatatgtgtatgtttcgttttatttggtctctactgtgcttgctgattttccccaggttggcagtctcgtcagctgttttcctgataacattgacttgccgcaaaatgcttgtttgtttagtctgaaattggcatctggtcaagatcaactgccagtaggtagagaccacatatggagcccaccaattcggagtcgcggcaccgcctaaatggagggggcaggagttccgcgccagcaggctccggagagtacatcaaggtggtggagtcccaatgcgagaccgatggattcgttaatgaacagtggacggaaccggcgatgccaggtccagtgccttggaagaccattattatcattcttttgctgtttatcggtggcattgtgagtagtgattactggtgcccacacatacatgcacagttccttcgaacttctgatctgatgtctttgtcttcaggtttgcatcgcctttgccaccttaaactgggtgacggacacgagccgggagcgatcggatcgggtgtgggcgttgggtatcatcggggcactgaccttcatcccgggaagctactatgtgtacgtgctcttctgcataatgctcaaccgcaacggattcaccatggacgagatacgaagactcggctgaaaaggagaaaccaaagacaccaaatgtttcgtcaaatagagtttattgcttttacactacagttattcacacatttcattggcataatttctttagcaacaatcttaatatgtagttcattatgatacatgtgtattgccccggtaattgtataaaaatattttttaaacacgagcttcgttatcaaaatgtataatgcttggcgtggcttcta

SEQ ID NO: 28727 - DNA, 801 bp, DROSOPHILA
atggagataattctgccggagttgtcggattattggtcacctggttacgtatttcagctgctgctgggactgttcctcttttcgaatgtgatgtccaactatgtcatgtgcatcctggtggaccccagcatcgatcccaagcttatgaagaatcagttggtgcgcggacagcacagtgaggactggcacgagtgcgacaagtgcgggattcttgctccaccccggtcacgtcactgcaggaagtgtggcgtctgtgtcctgatgcgagatcatcactgcttctttactggttgctgcatcggtcatgagaactatagatactttttctattttcttatctacttttttctaagctgcatgatttcactaacgtcatcttcgatatttatttacgttctgcatgggggcagataccagctctttatgctgacacatcccgcaccgaactctgcctattttaactcgcttattatcaggataatctactttaagttgcccgatatatacgagctggtgttcactctggtattcgtcctgctgtggatcggggtatgcgtagctacctatgtggcttatgatcagtggtctcgtggctatttttgctatgattttgaacttcaaaacattccttttgaccgaaaactgcgccgaaacttcaagacgttcttgggcaggcgaatgaagtggacctggatctccggatttgttcccagccagctggaccacgacggatttgatctggatcccgacaacgaacgtgtggcagattggtgctcagaaacaaccatcaaggatggctaa

SEQ ID NO: 28728 - protein, 266 aa, DROSOPHILA
MEIILPELSDYWSPGYVFQLLLGLFLFSNVMSNYVMCILVDPSIDPKLMKNQLVRGQHSEDWHECDKCGILAPPRSRHCRKCGVCVLMRDHHCFFTGCCIGHENYRYFFYFLIYFFLSCMISLTSSSIFIYVLHGGRYQLFMLTHPAPNSAYFNSLIIRIIYFKLPDIYELVFTLVFVLLWIGVCVATYVAYDQWSRGYFCYDFELQNIPFDRKLRRNFKTFLGRRMKWTWISGFVPSQLDHDGFDLDPDNERVADWCSETTIKDG

SEQ ID NO: 28729 - DNA, 19738 bp, DROSOPHILA
actttgctcttttagtgtaaaagctttgttttgttgcaaagaattgccctgcataaattgttaatttaacaatcgtgttaaaccaacgatcgtaaatcagttcaattcgactgattagccagcgattagatttcataatagcctgattggcactctgtctgaaagtgattcatgtttacaatattattataatattataaaagtcgcacgcagaaaactttcaatggaaaatagataatatttctgttttgtttattacgggctatattttattatctgcctagaaagttttgctgtatttattattcgttttatttatgcactatttttgttgtattattttttttttgtagggctcccaacgcctggctgattgagttttccgtggcggctgttgatcaggaaagccgcctggatgcgtttctgctttgatcggctgtgcttcgcaaccaagcggccagcccaaaactccaacagcaatgcaccacacagcagcaccacagtagatgcaccaccacgtccagcggatgtagatgtagccactgtaccagtagcaacaccagcaccaccaccacaacagccagttagtaatctgttctatgccgactaccagaagctgcagccggcgataatcgatcgggactgggagcgggacagagatacagatacagataccaggagcgaggccaagccaccggacattgtggagcacatagaacccgtagaggagcagagacagatacacacacagatacagtcgccggcagagatacagatacagatacccccgacgccccctgccccatcgatacagatacagatacagcagcgctatcgccggcacagcagtgccgaagatcgcaatctgaacacgaggcgaaacgattcgaatattacggaggcgttacgaaaagcagccagtatgcagcaggagccgaacgccaactatcagttcccaaccgacttgggtctggtgagcatcgtcaacaataataataacacaaacacccatccgagtggatccaatagcggcagcaacaacaacagcaatatcaacaataatctggtgggtggcattgtgaccttgccggcggctggtggtctcataggtctggagcatacggcgtcgggtctgcgactgataccagcaccgcctacccactcggatgtgctgacccacacgctgatctatggcacaccgccctcgggcgcccagcaattgaaccaggatccccgaagccttctgcaccaacaggagctgcagctacagcagcgctatcagcaattgcagcagcttcaggcgcagacgcagggcctgtacaccagccaaggaagtccggtgctgtatcaccaacccagtccgggatcgagtcaaccggtggccatacccggagccacttgccattcgcccacgcaactgcagccgcccaacacgctgaacctgcagcagcagatgcagagtctgcggatctcgggatgcacgcccagcggtacgggtggctcggccacgccctcgccggtgggcctggtggatccgaatttcatagtcagcaactatgtggccgcctcgccgcaggaggagcgcttcattcagatcattcaggccaaggagctcaagatacaggaaatgcaaagggccctccagttcaaggacaacgaaatagccgagctaaagtcgcacttggacaaattccagagtgtctttcccttcagccgtggcagtgcggccggttgtgcgggcacgggcggagcgtcgggatctggagctggcggaagtggtggcagtggtcccggcaccgccacaggtgccacacgcaagtcgggtcagaatttccagaggcagagggcattgggtatctccgccgagccacagagcgagtcctcgctgctcctcgagcacgtcagctttcccaaatacgacaaggatgagcggtgagtgctttgactcatttatccatttatgtttttattttatgtagctcatcatattattcaagctcacattgtacatattgatatttgtttacattatgatgctcaacatggcgcgtgatcagtgatactataaatgtaatcattactttcactttgtgtgcttagtaattctccggcttttatcgtacattattataaaggctaaagtaaataagtttgctttactctaagagagatttttgagtgtttggcttgaggaaatcgttggcttgccttgcacagtagcatcaggttaaacctaatcgcgccgcccagatgagcccatcattatagcgatcccaatacggatgtacaaagtttagactagatgctatatagccgaaacgataacgatcggaatcggcgtcattgcgccgatcttaatcatatattgggaacagcgccctgtcgcctgtcgtcggttgcttgtgtcgcctgccacaaaatgcgtttatttaaaattgagttggggtgacaggcgcggttgcaccagccacccaccaccccttgccaatccgcccaatggccttgggcagtgtcagtactcggatataaaagtccgtatgaaaatataagccacatatatgatttgcaacccacaaagaggctgccaattggcagccaactcacgctacgttgcgtcacattcgtttcgttctattgggaattttttaagacacattttttcgtgtgtttttttttcgatcatgcaaaattcgttgcagtcactccgaaatacatacctatatacatatatacccatataattaacagagtataaaattaaatctgcgaaaatgcgtgggcggatctgtcggctccgcgattttcacactttggctggccactggaagtcgttgctcttggccagatttccccactttgtctgctgcaaaacataagaaaacataaatatttattctttggctatgtggcgctgtttcctgaatgcctttcaataatacacgggggcatgtgtgatcacagatcatttaaatggcgacacgcgttgtccaaaaaccgctgatccaaatttctgactaatttttatgagctataacttaattttatagtgttttgtgtgctatcagagatatttaatttttatacgcaaaaaattccatttaaaatattttccacgattttcccattgttgcggataagcagaaataaatatatttgaattttcattgcgtttggcataaacaaacaaatgtatatttcctattttaaatgggttttttttttaagaatggaaatctttgtgttaagaataggcgagcatttggaggttttctaaaaataaccatgtcttcttttgcgatttttttttaaacaaacaattaattacagttagttcaaggctatgccataaaataggaatattaaaaaaataaaataatgtgaataagatacttgctatgatcatagcgctactattgctgtaatctcaaagaacctgaatgacaaaatgatatgcgatatacatttatttcttatatttatcttcaattttaacatggagctggtttagattaatctgaatcggacgctaagtaatgcggcaaatttgtttaaatcggccatttttatgaccccaagctgttgacacaatcacaaaaaatcaccggcaaattcgcgaaatccaattgcattcaaacattttactggccaaaatgattgcgaggggggcgagaaggggtcccatagactttgcatttcggagccggccaattgaggtccattttatctctggccaaaatctgtgccgacggcgacgcttgtgtgtgcaacaggacattttttgacacttgcatggcataaatcaaaagcgccgtaggcctccacctcggctttacagatatatatatatatatcgtgtatatatctgtgcgatcgggattgagactgaggttggtccgagtacttttgtggccatttacaccacgcaactgtcgcttgttggctttcaacggggccatctaataaataatgccagaaaattgtgcgaaatcgccttcacgatggagtttccaggaggggtggcgtcatgtgggcagtggcgttcctggcagggggtattttgtcagaacttgctacatgttgcacatacatgtgtccacggtcaagatggcaagcaaacagtttgtgggtcatgcaattataatgctaattagagcagtgctagattgagagaataataaagtgctattgaagtattcagatgatcgtgtacatatgaaatgagctattttgactatgcttattaattaatatagctaatataatatataattgcagttttagtagctgttggcaagcaataaatcaaaagaaattacgaaatttggacactatattttttagataaggaaaacccaaactgaagtcagtcattatgcacttagcagttagctactaactattatttaatttgtataacaacataaaattggcgtgcagagattttcttttcgcagccgaatcccgataagtctccacccccttgacaaacatgccttgattgccatctcacagatagttaaccgtctcacacatggatatacacatgtgtacatagatatagattgagccaaaaatcaagccccacccaaaatagctcactttgcagttggtttgtcgcttccattggcgctgacttctatgcgcaatttccattttcaattcccccgccgagacgccagttggcttttattgtcaactgctcttagccgctaagtatttgcactttcaattcgggtttgccagtcagccgccaactgaacgcacccgcatccgaaggagatctctctggggacagactccgtgtatttctgaggtgcagccaatttcattccatgccttggcacacatttcaaattcaatttacgcacgaatatagccatatgaatggttatagcttccgacaactggaacgctcgagcgatccggcccgtaggtctaattgaagctattaattgttttggctcgtacacgcagtggcaccactggcaccacttgcatcaccgccattgtgccacgcatgtgcgtggtgctgcagccaaagaaaatgttaatttaggcatataaaaagtgctccgctggcaaaaccccacggggctgacaccatcgagcgacccaccgcctcgggcgactcgtctacactcgaaaaatatattataaaaaagaatttaaagctaatcttaagttaccaaatcaacagtcattatacgatttttgccaaagatatttgctcaagattgggattgtgtaactattggtattgttttatgaatgtcctaaaacaaggatattcttatactgtgatatgtctcaatttctctgagtgtatgcgcctccttcttctttggtttcaactccattattaaaactagtttcgatttgtggggcgctgaaatctaatacttcactatgccagaaaactatccatgttagattgtcgcttcccagactcactggtcgtgactagggtatcgattagacatgattcggttttttttcgcattttattatttttcattaaattttaattgtgagtgttatgcggcgtagccgaaaataccacaaagatacatgactacccgccaaacgggcgccacaggtgttggagtctgggtgtagctgtcggctttggccaaatgtccccactccatcgaaccgaaccaagccaactcatcaccacattttggggcaatcaggtagctggtggtttctcccaactcagactgctgccaaaaacgaggcttacaaattggcccccaaccccattgacgacagcctgggcaacgccctcgtgattaacttgatcattgatcagagatcggtgggaccaattatgaaaaatgaattttaaaccataaaacgttttttaagccagaaaacataattaacacatttaactaacattaatccctttcatcgtagtttctccctagtattttaagtattttaaatcatacaaaatgttggccacactggctggcagtgctctggttggctttaattaatcacccaggtcaggtatcagcattggcttccaattttatccgatccactgcttctattcccattactgtttctctggcccgggcgagttgtcaagttcgctgacagataaagtcatttgacatttacaggcattgccgacatggcatggtacggatccccactccccagccgaagcatacaattttcaaatttgtattaatttcatatcgctcgattgcgcgcatgccaacatccatcgacattgggctccaaaaacaaccgaaaaaattgagttaaaatgccgccaaatttttggtggcacaacttgttgtgcggcttgtaagccaaactggccaaccagataaaacgatttatatgtgtcagtcggaaaattaattggactcttgcctttgctcatttcattggaagtctcttgccattttcaatattcacatctaattgcatttatctatcgttttgcagctcccgtgaacttatcaaggctgccatattggataatgatttcatgaagaatctggatctgacgcagatccgcgagatcgttgactgcatgtatccggttaagtatccagccaagaatctgatcatcaaggagggagatgtcggaagcatcgtttatgtcatggaaggtgagttgaagctccaagcacttgtgatatatctttcatttggttagcaattttagttccttaaagatatcaaatcaatttttagtacaaagatattttctgtgggattgttaagcagtacctttcagctaataccttatatcgtacttgcagccaaaaagtatgctaacatatttgattggaaatgcaaccgaacaggtgtaaaatgcatgtagaatgtgtgtcgtctatatgtggaaatctttataagtctcttggttctttaatgacaaagtgatatttaataaagatatttgtttagtttatattataaactatttaattaagttcaagcaattgaataatatcaatgttaaaattctgaaatattatctactaattctgatatttttcaacaaattgtttatgtatccttgcaaataccttaacatatgcgttcaccttgccccgccaagatcgtgcaactagttggcgcagataagcagctactccttgggtttggctagttgcacgtgcgccttttggccagatgtggaatgcctcagttgtgggctgggattggaacgtagttttgcgtgataaaaggggatttcggggggactgtgtcacacccacgcccccagaagaagagaagttcagagtctcgccttgcagcgaaatgtcagcaactgactgtcgactcgagcgaacaatggccaagaagcgggttttcctttcagttttcgcttagcattttgtttaatagttttttgcacgtttttctgcgtttttcttgggcccgtttttaatttcagggtgcgctactacgggccttttgacttcagcctcgtggctaattgttgctttaaatatttgcgcgagttgggttcggtttggcatcagctctgtgtacctttcgtgttaatttggtcgccgacttaatttacgtactagcattagcattttaattgcgcgcagacgactggagaaaagtaacaacaataataatgataatcaacagtcgaattatacattcgcaagtggcaagatgaatcggagaagaggatgcttcctcaatcttgcaacatcatcgtctgggattttcgcttccttaacctgaagcaccgatgtccgctactccaaaccgatgagcagatgtcacggcatctgtctatatatcatatagccccgcgcatatgatattgcaacgagagagaaaatcagagaggattcatatgatcgaaaaaccccttacagcagatgtttacgagatctgcaaggtttcggccttgctcattgtgcgaatgccctgtaaaacgcattcgagataagaaaagaggaagtatttacaatataataccctactcataaaactgccccatctcgagggatgtctgatttgttttgaaactctgctctgattaccaaattgaagaatatattttgtataatgacagacttgattaggcaacagtttaaggcgcgttggctctgaggtcactggacctcgggatctataattatttctgcacgttcattgttccatttctgaattgttacgttttccagatgataacgttcgaatctcttttgtttcgcgtagcgaattggcctgtcacttaggaccaaaccagttcgccggtttggtactctaaagctacactgcgagaaaaaaattgaatgggtcaatgtgtcgaacattagcagatatttcgatatttaaaatagaacaaatttgttttctcaggttaatatattggtacaaatgactttattaagacttagttaccaagcttatatggtctcagatcattaaatataaataccatgctctagattagtgcaacttatttcctcagtgcacagcacttgcttttgttcagctctttacttgtatatgtgggtattttcgctctcccagacacacatacacacacacacatataccccgatctctggggctctcgcccacaaccaaacaaaacgtgctcagctgtccccactatctgtacctgtctctgttctgctctctcagccgatcgctcagttggaaatgagaatgagtaatgctccagtgtttcgaatcccgatcttcgggcaattcgtcattcgtccggcaggcggcgtagcgagaaaacgtgtgtggcgcatgcgcatgcgctcggttgcgaaaagtgcacctggatttgaaattaagccacaagaataacagaaatcaaaactcccccacttcgtgtttggccatttcttcggctgtcgtatcgtgattttcaattcgccctcgtgtgtgcttaacggtattatagagcattttgcatatggcaaccgctgccagtgaattaataataaaagccacaaaccagacaattaccatgccttgcgcatatgcctttgagctatttccaacaataatgcttacataaatagcagctctggttgatgttctaaatagcaagtaaacaaaaccgcacaattttcccatgctcggtttttccgctcggctgtaattatgttgaaagagatcgggaaacgcttcgtgttaatttctttgaactgctcgcaaattcttggaataaagtgaattaaaagtgaaagtgaattctttaagcactcgcattaagtgagggaaataagcttaaaaacacccacggacttaaagagaatgagacgcagaaacggagacttggattttgctctttttctcgaattgaacgcaaagatcacttgaagaattccggtttgtggttttcctgtgcagctgttgttgttgttgttttggttgctgttactgccccgctgatttgtatgtgtatttatgtcccggtcattggtccgaagtaaagagccaaaaacacaaaaatcggcaataatggtgtagaaatacagacattataaaccgtataatgccaaatgtcactgctgcgactcgatcgtgcaagaatgtgagaacacaaatcgtacactgaatctgatatggccccagaaatgaaagaaatccactagaagtgcggaagaatgtggaaaattaaattaaatattgctagaaacacaaaacagaaaagaagtagcccgaaatttagaaatcgtgcgagtcaaaagccaaaacgatggtgatcacggacgagagggagaggcaactaggcatctgtgctaatgtcatgccctggaaccgggtctccacctgtcatttggcttcttctctcgtcatcttcccaacttggctggggcatctggggctaagaccggtcggaactatgggggctcggaactcggtggggcactctcactttccagcgacccaacgagttttgcattcgccttttgacatgccaaatgaactggcttcgcttgggcgctcaaataagattgagtaatagacgaaaagtggaaaatgatgacttgggggaagtggatcacaagattatggggaaacttggctctgaattggtcaaaataatggcgttccgaagtggtttataattgaacccaaacaagtggaacgaactctcagtagcttcttgatgctgggtcttatttaatttccagcactccaacaagttcatgtttttcttattttctttttaaaaaaagagttgagcttaaatacccaattaaaaagatacccagcagcattttagtattgattaatcgaaagttaatgatgcaagtctattaagacgtttccatgaagcttgcttatacatatgtatatttcttcgtttcagaaagtggctgttttcagaatctctgtggcattccccaatgatcttaaatctaatcagtaactcgaacgctagtcagtgctgacaaccctatagatcacttcagaatctcgtttgtcagctttatcgctgttttaagtacacttgcgaaataaagagaaggaatagtgttttgcgaaaacgatctgtcccgtttggctgattctgaatctcgattccctcgcgatcttgcttgactacaatctaaattgtatacacaaaagatctttcggacctctgatcttgcctccctcttccaaccagtttggataactttctttatagccgtctttcattagcatagacaaacaaaagaaacgtcaactgagctatggccataaattattattatgatgattttttagctccaatgtgagtgccaaaatgcggtcatgtcggtaaaaaaaaaagaagcaaaaataatccaaaacgaatgactaagccaatggcagttttgtcttgccttaattgtcagccaaaagggcggaccaaaaagtaaattacgagctgtcatgcaaaaccgaaaatgacttggactcggactcgatctcattccgaatccgaatccgctgcccttggcacacaagccaatgtctgtgactaacatcgccttaatcgaggcttccaaaaaccctgctctggagatccgttaacttctataaatagctgcttcagaaaagccaagtggcgggacacactgtccaaaaaaaaaaaaataataataaaagatttaccaatcaattacaatcaataaccacgactttaagtattttttcccatgagcaccgccaattacaaatgctaattgatattttcatacaattaagtccaatgataagtgaacctgaattgttgcaataatttcaaagatttttccacagtgcaagagctgtttaaattcttgtttcctccgctctgcgattgtattcaaatcggcgaatcagacaccggctgaccttgccaacactcgacatccaacaaccattaatacttgaagccagtctctgggcgaagttgcaaaatgtctgcagtttcaatttgtacacattttttctccatttacttttataatttgggtttttttttgttttgtttggggtgctcagctgggcttgacggatttccgcatttttaaaagccagcaaacctcgaccccgctgaactcgtggagcaccaagcttggccgcgggccgtaactttccacacttattttgaggaaaattcggccctttatgagggctaagtgcagtgtgctcatgccaagaaaatctctttcaaatcgcgtaaaaaattccatataaatattgttagctggaatactgaatctctgccatgtgctgtgcacacgttatcacttcgaaaagccaaggcacgagttgttttcacatggaaaacagcatatagtagtgataacaaaattctcgggtctcccgatttatctcgcccgctactcttacgtaaataagtatctgtgagcgcggtaatttgtttgccattagctgcgagaatagttcaacaacatcgatgtttactgtttgattgatcatattcaaggtgccacaaatgatctttgttgattgtttgtcttcgccgctcgtaattgttgtgtttgtctagtcatcgtttccgattgtgcgtagtcgtgacaatcgagtgttttccattggatcgcagccgttgttgtgtttataaagcgggttccctgcacatgtgctatatgccatgtttttttatggaaatttattagctgagttaaaaaagaattagtttggcatgtgatcttggtcttctgacgcatttgtatttatgaaaatgctaatagaagccatcacattatcttttgttgatatacttagaacgatttgtgggcggcacaccctgctccgcaacttccagactttccaatttactgagcctattttgctcattgaatattattaacggaattaaaataaatatttgcctgagatcgcccgcagatattgggcacacccctaataactgagtcataaagtgcacaatacacgatcgtttgcgtcagtttgcccgatcaattagcgtaaatggacccagatctaaatggaaatacctcgaagcaaacaacaactcccttccaattcagagtcacgctctaaattttggagcccagcaccgatggtcactggacctattttgggcttctctaggttggccaatacgtcacttttggctgttcagacagaccgcctttattattgtttacctttggcaacatcgccaattgtcacttcccctttttaccgcatcgcccacttttcattcacaattggctaatttgtcgatgattaagcttttgatgcactcgcaaatggtagaggtggaaaaaaaagagcgagactcactcattcacacgctcttaccaattggccgaaattaatttgcaactcagctaaatgcgattgtgtattgaatgggtttgcaagagaagttcggtgcgtgattccccaaatccggtaaggattgtggttttccaagagacagaaaataggaaatcggtcgagtaatttatatttcaagcaatatgctcatatgctgagcatgggtaaacttatgcagattccactgttttggtttgatttcatttaaatagccatttattgctattgtactgctcaccattgtgcctgactgctcttgtcaaagctggtagatcaacaggccataaacaaaatcaatccacaaacgtgaggcaagtcgcaaaaaacatggaaagtttacaacaccgtcgacggcagaaacgaaacagcaactgaaacagcaaacgtgtgtggcttttgcaatataaataacaaatacattattgtgattttgttaccaacaacaggcctgaaaaccgtaggcatcgccattcccagtgactcttcaaatattccgtgcgcgaaactgcagagctctttggttatgcaaaagacctccgaaaataacaaacaacaggcacaaaaacataaactaaacgctggtggagccaaagacaaacgaatcacgtcgctgcagctggtcaagtgaaatttttctttcgtaatgaaaatcaaacattatccgggcaaagccgtcgatgcgagtctctcgctggagggcagcagtgccatgggtgccctgtacgaggccaattggctgagggctgcgaatcagcccgccgctccagccacaacgggcaccaaattgagcaggcagagcagctccgccggcagcagtttcctcatcgagggcatctccgccctgagcaagtaccaaatgaccctggagaatatccggcagctggagctgcagtcgcgtgacaaacgcatagcgagcacgattaaggaactcagcggctataggccatcggcactgcagcatcatcagcagcagcagatgcataacgtttgggtggccgaggatcaggatcaggaacacgaagaactggaagatgcttcggagggaaaggagaagttggctagtatccaggaaccccctgcagttaaccactatgtcctggacccgacggagagaccaagggttcccagaccccggcaacagttctccgtgaaaccgccttccttgcgtcgctcccaaaccatgtcgcaaccgcccagttatgccaccttgagatcgcccccgaaaatcaaggaaaatcttagcaaaagttcctccgcctactccacattctcctcggctgcagaggattcccaggatcaagtagtgatctgccaacagccacagagactgatggctccgccacccagagaaccgcctccggagccacccaaaagggtatcgaaacccctgagcagatcgcaaacttcggttcagcggtacgccacggttaggatgcccaaccagaccacttcgttcagcagaagtgtggtcaggtctagggattccaccgcctcccagagacgtctcagtttggagcaggccatcgagggactcaaactggagggggagaaggctgttcgtcagaagagtccacaaatctcaccagctgccagcagtaatggcagctccaaggatctcaacggggagggtttctgtatcccacgaccgcgcctcatcgttccagtgcacacatatgcccgtcgacgcaggacgggaaatctcaaggagcaatccagcggtgggcaggaggaggaagcagagaagggtaaggggtggaaggatttctatgttttaagtcaggataggcatagtagcttttatatcaataggataggacagaattatgattatgattacccaattaattttaatatattttctccagatggacgcgtggaggtttcccgcgagggcaagtacctctccacattgtcgggagcgaaggtccttggcgaattggcgatcctgtacaactgccagcggacggcgaccatcaccgcgatcaccgagtgcaacctgtgggccatcgagcgccagtgctttcagaccatcatgatgcgaacgggcctgatccggcaggcggagtacagcgatttcctcaagaggtgagtagccctccccgatccgtggctttcctccttggaatacctccttcatcgccgccttctcggccactcctctcgaagaccagaccaggagagacttccccattgccaatcggcgatttaatgtgcattttaatgagcctctgagcctgtggcgatttattggcgagatggtgccgactggttatttgcaatttgggcgtaattaatgttcatttacacttaattatatcaattccgcagtgcagctcgtgtatggtcattactctataatggcaaatgtaaaaatcgcttagcttgaggattttttttttttttagcccggtcgatttgtgtgttcaaatcgtgcaaggtatggcgaataaagtaaggtaactttctccgccggccccatcgacggcatctcttcagatcgaatgcagcattatggccatctcatcatcgtcatggtgttgggcgtccatatgacgtgcaatggctcaaactcaaatgaaaactcacttcagctaaacttcaggctgcggccaacgaacgcatagaaatttctttcccaatgccagccatggcaaccagttttttggccaagtctgcgcggctgtatccagtctcacttccatctccagtcgctcctgcctccggagtgaccggcaaattaatcgcgtttaattggtcgtccgtaaaaactgctaaaaaccataattgaggcctcgaccatgcactcgttgcctattccacattcgagaagtagcggaaaaagcagattgaaaatgaaagtgcaatgggctgatgatgacgatgatcatagatttagatacagatactgcagctgcaactgcaactgcagctatagactctagatacatgtgagcattcactgaaaaaatgctagccggcgggaaaaaacagaatgggaggagttcagcttcgattacgctgctctacagagagagaaaaagataaagaaatattcctcaaatatcgaagagaatcgaaaatgctagatagattaaactgaaacctacaaacggtggctatgtggaagataacttgttaatatttttgttaagtgtaacaacaaaagatgtgtgcgatgcacatgaaaaaattccagccggagggaaaccagtaatgggaggaggagttcaggtgcgactttcagcttgaagatcgatgtaggtcaacaatagattcccattactatggaattctcttatctagatcgaacttggctcggccactaattacagcactttctttggcctgcaacgcagattatctcgaatgaaactaacaatttttggtcttcttatctaccgctagtgtgcccatcttcaaagacctggcggaagacacgctcatcaaaatctccgatgttttggaggagacgcactaccagcgtggcgactacatagtgcgccaaggcgcccgaggcgataccttcttcatcatatccaagggaaaagtgcgagtgacgatcaagcagcaggacacgcaggaggagaagttcattcgcatgctgggcaaaggggatttctttggagagaaggctctccaggggtgagtttcattgaaatgattactatttctacttcataactaatgtgtatcatatttgtgttttagcgatgatctgcgcacggcgaatattatttgcgagtccgccgatggcgtcagttgtctggtcatcgatcgcgagaccttcaatcagctaatttccaatctagacgagatcaagcatcgctacgacgacgagggcgccatggaacgcagaaagtaagcgaatatttgaaaaaaaaaaaacacgaatcaagataagcaatgaggaattgaatcaatcgaaagcaaggtcaatgaactacctccaaatcaacaaatttttgttcatgttttaaatgtatatttacccgatagtcaagagagggctatacaaaataaccacattcgatttgactcaaactagtagttataatacgcttggcaagaagatgaaaaataattttttgggtcttgagtagatgatcaaaatgttagtttcttaaaagtcttcggcttatcttgattataaacccatttgaatgtttgaatacatggactaaaaactcatctcttttgcaggatcaacgaggaattccgggacattaacctcacagatctgcgcgtcatcgcaacccttggagttggaggcttcggtcgcgtagagctggtccaaactaatggagatagctccaggtccttcgcgctcaagcagatgaaaaagtcacagattgtggagacgcgtcagcagcaacacatcatgtccgagaaggagatcatgggcgaggccaattgccagttcatcgtgaagctgttcaagaccttcaaggacaagaagtacctgtacatgctgatggagagttgcctgggcggagagctctggacgattctacgggacaagggcaacttcgacgacagcaccacccgcttctacacggcatgtgtggtggaggcctttgattacttgcactcgcgtaacatcatctaccgcgatcttaagccggagaacctgctgctcaatgaacgaggatatgtgaagctggtggactttggctttgccaagaagctgcagacgggcaggaagacctggactttctgcggcactccagagtacgtggctcccgaggtgattctcaaccggggccacgacatcagtgcggattactggtcgctgggagtgctcatgttcgagttacttactggtgagtaaaaagaaagatctaagtaccaccgtcatataaataaccattttgtaatccttattctaggtacccctccattcacgggctcggatcccatgcgcacctacaacattatacttaagggcatcgacgccatcgaattcccaaggaatatcacccgcaatgccagcaacctgatcaagaagctctgtcgcgacaatccagccgagcgtttgggctaccagcgtgggggaatcagcgagatccaaaagcacaagtaagatccatttcaaatagtatgtgaagcagatacttattcgattattatttcccgcacagatggttcgatggcttctattggtggggcctgcagaactgcacactggaaccgcccattaagcccgccgtgaaaagcgttgtggatacaacaaactttgatgactatcctcccgatcctgagggtccgccgccagatgatgtcactggatgggacaaggacttctgaggagaatcagaacccgtttcctagacgatgctctctaaacgcttctgctgcagaaaaccaggaggatatgaaagccagggaagaaaaattgatcttaagtgcgccatatgtacgccaaagccaacagcaacagtcagcagctcgcatcgaaaagctgccacaaaaaaaaacaaagaaacgtagcagtcgcaaggtcaagggccgacacaaaagcacaatcatccatcgtcgtagctccatttgagatttatagatacgtctccgtgatgttataaccatgatgtgcaacgcaatgaatttattaacgagtttataactattattttataatgaggatatatgtgtctagttcgcttggaattgatgtaaattgtaagtaggtctgtgactctgtttcagagctctgttagccatgtgcattgtataaattcagctatttgtatctattaaatatttttaacataattattacacatcattgttaaagcatacaaatcgggttgccttatagtctgtaagagaacatttgaaagcaacatttgaccaagatcttccgtcacacatttcttaaaattctatgtggcctctctactgtctttcattagtcttagcgatcatgtctattatatttacgaataacatgcccttttaattgtcttttttaagtaaatcagctagaaattgaataaacaaattgatccgataaatttttttgtatttatacactattatcacaagaaattgtgaaagatactgctggccattgctgccctcaatgggtttcttcggttgtagtagataagatatttaatattaccaaattcacagtacacttcttaatttctttaagtgcattgtgaaatgaacactgcttttacagcatgtaaaaccgcccactcaacttgacctttttcaaggtacttcctatatgggcgcttctctgggcacacgttttctcttggcaaatagtgctgtggaaaatatgcaataaaaagaggaaacgctgaaatgcaaacgaagttggccaaaaacgaaacacaactacgtgacgaacggaagacgaattgccatgcagagaaagccgagaaaaatcagtcaaaatgctacaaaaattaaataagaacattctgtcactgacgttagtgcagatcgcaacggaaaactgaagctctgcaattggagtacgaaagtgcaactagaggatcgattggatatataatttatttcgcaacttagagagattgccgccatatgttaatgaactgaacaaaatggtttggatttcgagctgggggcaactttggctggtgttgctattggttgtgggcctatcgttgggtcttccgagcttggaaaaccagacacacgaacaaatcgaacagataataggtgagtcgtggatttattcgatacgaaactagattttaataactcttttctattctacattcagcctgcagacagccaaaggcacctggtttgtgccggggtcaccagttgcgatatgcctacaacaagaagaccggaaactgcgagagcttcatctacacgggctgtgcctccactgagaacaatttcctgaccttcgaggagtgtcgcagggattgcatgcaacgtctgcgctactgaagtcgcttttaacgat

SEQ ID NO: 28730 - DNA, 3327 bp, DROSOPHILA
acaaacacccatccgagtggatccaatagcggcagcaacaacaacagcaatatcaacaataatctggtgggtggcattgtgaccttgccggcggctggtggtctcataggtctggagcatacggcgtcgggtctgcgactgataccagcaccgcctacccactcggatgtgctgacccacacgctgatctatggcacaccgccctcgggcgcccagcaattgaaccaggatccccgaagccttctgcaccaacaggagctgcagctacagcagcgctatcagcaattgcagcagcttcaggcgcagacgcagggcctgtacaccagccaaggaagtccggtgctgtatcaccaacccagtccgggatcgagtcaaccggtggccatacccggagccacttgccattcgcccacgcaactgcagccgcccaacacgctgaacctgcagcagcagatgcagagtctgcggatctcgggatgcacgcccagcggtacgggtggctcggccacgccctcgccggtgggcctggtggatccgaatttcatagtcagcaactatgtggccgcctcgccgcaggaggagcgcttcattcagatcattcaggccaaggagctcaagatacaggaaatgcaaagggccctccagttcaaggacaacgaaatagccgagctaaagtcgcacttggacaaattccagagtgtctttcccttcagccgtggcagtgcggccggttgtgcgggcacgggcggagcgtcgggatctggagctggcggaagtggtggcagtggtcccggcaccgccacaggtgccacacgcaagtcgggtcagaatttccagaggcagagggcattgggtatctccgccgagccacagagcgagtcctcgctgctcctcgagcacgtcagctttcccaaatacgacaaggatgagcgctcccgtgaacttatcaaggctgccatattggataatgatttcatgaagaatctggatctgacgcagatccgcgagatcgttgactgcatgtatccggttaagtatccagccaagaatctgatcatcaaggagggagatgtcggaagcatcgtttatgtcatggaagatggacgcgtggaggtttcccgcgagggcaagtacctctccacattgtcgggagcgaaggtccttggcgaattggcgatcctgtacaactgccagcggacggcgaccatcaccgcgatcaccgagtgcaacctgtgggccatcgagcgccagtgctttcagaccatcatgatgcgaacgggcctgatccggcaggcggagtacagcgatttcctcaagagtgtgcccatcttcaaagacctggcggaagacacgctcatcaaaatctccgatgttttggaggagacgcactaccagcgtggcgactacatagtgcgccaaggcgcccgaggcgataccttcttcatcatatccaagggaaaagtgcgagtgacgatcaagcagcaggacacgcaggaggagaagttcattcgcatgctgggcaaaggggatttctttggagagaaggctctccagggcgatgatctgcgcacggcgaatattatttgcgagtccgccgatggcgtcagttgtctggtcatcgatcgcgagaccttcaatcagctaatttccaatctagacgagatcaagcatcgctacgacgacgagggcgccatggaacgcagaaagatcaacgaggaattccgggacattaacctcacagatctgcgcgtcatcgcaacccttggagttggaggcttcggtcgcgtagagctggtccaaactaatggagatagctccaggtccttcgcgctcaagcagatgaaaaagtcacagattgtggagacgcgtcagcagcaacacatcatgtccgagaaggagatcatgggcgaggccaattgccagttcatcgtgaagctgttcaagaccttcaaggacaagaagtacctgtacatgctgatggagagttgcctgggcggagagctctggacgattctacgggacaagggcaacttcgacgacagcaccacccgcttctacacggcatgtgtggtggaggcctttgattacttgcactcgcgtaacatcatctaccgcgatcttaagccggagaacctgctgctcaatgaacgaggatatgtgaagctggtggactttggctttgccaagaagctgcagacgggcaggaagacctggactttctgcggcactccagagtacgtggctcccgaggtgattctcaaccggggccacgacatcagtgcggattactggtcgctgggagtgctcatgttcgagttacttactggtacccctccattcacgggctcggatcccatgcgcacctacaacattatacttaagggcatcgacgccatcgaattcccaaggaatatcacccgcaatgccagcaacctgatcaagaagctctgtcgcgacaatccagccgagcgtttgggctaccagcgtgggggaatcagcgagatccaaaagcacaaatggttcgatggcttctattggtggggcctgcagaactgcacactggaaccgcccattaagcccgccgtgaaaagcgttgtggatacaacaaactttgatgactatcctcccgatcctgagggtccgccgccagatgatgtcactggatgggacaaggacttctgaggagaatcagaacccgtttcctagacgatgctctctaaacgcttctgctgcagaaaaccaggaggatatgaaagccagggaagaaaaattgatcttaagtgcgccatatgtacgccaaagccaacagcaacagtcagcagctcgcatcgaaaagctgccacaaaaaaaaacaaagaaacgtagcagtcgcaaggtcaagggccgacacaaaagcacaatcatccatcgtcgtagctccatttgagatttatagatacgtctccgtgatgttataaccatgatgtgcaacgcaatgaatttattaacgagtttataactattattttataatgaggatatatgtgtctagttcgcttggaattgatgtaaattgtaagtaggtctgtgactctgtttcagagctctgttagccatgtgcattgtataaattcagctatttgtatctattaaatatttttaacataattattacacatcattgttaaagcatacaaatcgggttgccttatagtctgtaagagaacatttgaaagcaacatttgaccaagatcttccgtcacacatttcttaaaattctatgtggcctctctactgtctttcattagtcttagcgatcatgtctattatatttacgaataacatgcc

SEQ ID NO: 28731 - protein, 742 aa, DROSOPHILA
MQSLRISGCTPSGTGGSATPSPVGLVDPNFIVSNYVAASPQEERFIQIIQAKELKIQEMQRALQFKDNEIAELKSHLDKFQSVFPFSRGSAAGCAGTGGASGSGAGGSGGSGPGTATGATRKSGQNFQRQRALGISAEPQSESSLLLEHVSFPKYDKDERSRELIKAAILDNDFMKNLDLTQIREIVDCMYPVKYPAKNLIIKEGDVGSIVYVMEDGRVEVSREGKYLSTLSGAKVLGELAILYNCQRTATITAITECNLWAIERQCFQTIMMRTGLIRQAEYSDFLKSVPIFKDLAEDTLIKISDVLEETHYQRGDYIVRQGARGDTFFIISKGKVRVTIKQQDTQEEKFIRMLGKGDFFGEKALQGDDLRTANIICESADGVSCLVIDRETFNQLISNLDEIKHRYDDEGAMERRKINEEFRDINLTDLRVIATLGVGGFGRVELVQTNGDSSRSFALKQMKKSQIVETRQQQHIMSEKEIMGEANCQFIVKLFKTFKDKKYLYMLMESCLGGELWTILRDKGNFDDSTTRFYTACVVEAFDYLHSRNIIYRDLKPENLLLNERGYVKLVDFGFAKKLQTGRKTWTFCGTPEYVAPEVILNRGHDISADYWSLGVLMFELLTGTPPFTGSDPMRTYNIILKGIDAIEFPRNITRNASNLIKKLCRDNPAERLGYQRGGISEIQKHKWFDGFYWWGLQNCTLEPPIKPAVKSVVDTTNFDDYPPDPEGPPPDDVTGWDKDF

SEQ ID NO: 28732 - DNA, 11982 bp, DROSOPHILA
cgatgagcagatgtcacggcatctgtctatatatcatatagccccgcgcatatgatattgcaacgagagagaaaatcagagaggattcatatgatcgaaaaaccccttacagcagatgtttacgagatctgcaaggtttcggccttgctcattgtgcgaatgccctgtaaaacgcattcgagataagaaaagaggaagtatttacaatataataccctactcataaaactgccccatctcgagggatgtctgatttgttttgaaactctgctctgattaccaaattgaagaatatattttgtataatgacagacttgattaggcaacagtttaaggcgcgttggctctgaggtcactggacctcgggatctataattatttctgcacgttcattgttccatttctgaattgttacgttttccagatgataacgttcgaatctcttttgtttcgcgtagcgaattggcctgtcacttaggaccaaaccagttcgccggtttggtactctaaagctacactgcgagaaaaaaattgaatgggtcaatgtgtcgaacattagcagatatttcgatatttaaaatagaacaaatttgttttctcaggttaatatattggtacaaatgactttattaagacttagttaccaagcttatatggtctcagatcattaaatataaataccatgctctagattagtgcaacttatttcctcagtgcacagcacttgcttttgttcagctctttacttgtatatgtgggtattttcgctctcccagacacacatacacacacacacatataccccgatctctggggctctcgcccacaaccaaacaaaacgtgctcagctgtccccactatctgtacctgtctctgttctgctctctcagccgatcgctcagttggaaatgagaatgagtaatgctccagtgtttcgaatcccgatcttcgggcaattcgtcattcgtccggcaggcggcgtagcgagaaaacgtgtgtggcgcatgcgcatgcgctcggttgcgaaaagtgcacctggatttgaaattaagccacaagaataacagaaatcaaaactcccccacttcgtgtttggccatttcttcggctgtcgtatcgtgattttcaattcgccctcgtgtgtgcttaacggtattatagagcattttgcatatggcaaccgctgccagtgaattaataataaaagccacaaaccagacaattaccatgccttgcgcatatgcctttgagctatttccaacaataatgcttacataaatagcagctctggttgatgttctaaatagcaagtaaacaaaaccgcacaattttcccatgctcggtttttccgctcggctgtaattatgttgaaagagatcgggaaacgcttcgtgttaatttctttgaactgctcgcaaattcttggaataaagtgaattaaaagtgaaagtgaattctttaagcactcgcattaagtgagggaaataagcttaaaaacacccacggacttaaagagaatgagacgcagaaacggagacttggattttgctctttttctcgaattgaacgcaaagatcacttgaagaattccggtttgtggttttcctgtgcagctgttgttgttgttgttttggttgctgttactgccccgctgatttgtatgtgtatttatgtcccggtcattggtccgaagtaaagagccaaaaacacaaaaatcggcaataatggtgtagaaatacagacattataaaccgtataatgccaaatgtcactgctgcgactcgatcgtgcaagaatgtgagaacacaaatcgtacactgaatctgatatggccccagaaatgaaagaaatccactagaagtgcggaagaatgtggaaaattaaattaaatattgctagaaacacaaaacagaaaagaagtagcccgaaatttagaaatcgtgcgagtcaaaagccaaaacgatggtgatcacggacgagagggagaggcaactaggcatctgtgctaatgtcatgccctggaaccgggtctccacctgtcatttggcttcttctctcgtcatcttcccaacttggctggggcatctggggctaagaccggtcggaactatgggggctcggaactcggtggggcactctcactttccagcgacccaacgagttttgcattcgccttttgacatgccaaatgaactggcttcgcttgggcgctcaaataagattgagtaatagacgaaaagtggaaaatgatgacttgggggaagtggatcacaagattatggggaaacttggctctgaattggtcaaaataatggcgttccgaagtggtttataattgaacccaaacaagtggaacgaactctcagtagcttcttgatgctgggtcttatttaatttccagcactccaacaagttcatgtttttcttattttctttttaaaaaaagagttgagcttaaatacccaattaaaaagatacccagcagcattttagtattgattaatcgaaagttaatgatgcaagtctattaagacgtttccatgaagcttgcttatacatatgtatatttcttcgtttcagaaagtggctgttttcagaatctctgtggcattccccaatgatcttaaatctaatcagtaactcgaacgctagtcagtgctgacaaccctatagatcacttcagaatctcgtttgtcagctttatcgctgttttaagtacacttgcgaaataaagagaaggaatagtgttttgcgaaaacgatctgtcccgtttggctgattctgaatctcgattccctcgcgatcttgcttgactacaatctaaattgtatacacaaaagatctttcggacctctgatcttgcctccctcttccaaccagtttggataactttctttatagccgtctttcattagcatagacaaacaaaagaaacgtcaactgagctatggccataaattattattatgatgattttttagctccaatgtgagtgccaaaatgcggtcatgtcggtaaaaaaaaaagaagcaaaaataatccaaaacgaatgactaagccaatggcagttttgtcttgccttaattgtcagccaaaagggcggaccaaaaagtaaattacgagctgtcatgcaaaaccgaaaatgacttggactcggactcgatctcattccgaatccgaatccgctgcccttggcacacaagccaatgtctgtgactaacatcgccttaatcgaggcttccaaaaaccctgctctggagatccgttaacttctataaatagctgcttcagaaaagccaagtggcgggacacactgtccaaaaaaaaaaaaataataataaaagatttaccaatcaattacaatcaataaccacgactttaagtattttttcccatgagcaccgccaattacaaatgctaattgatattttcatacaattaagtccaatgataagtgaacctgaattgttgcaataatttcaaagatttttccacagtgcaagagctgtttaaattcttgtttcctccgctctgcgattgtattcaaatcggcgaatcagacaccggctgaccttgccaacactcgacatccaacaaccattaatacttgaagccagtctctgggcgaagttgcaaaatgtctgcagtttcaatttgtacacattttttctccatttacttttataatttgggtttttttttgttttgtttggggtgctcagctgggcttgacggatttccgcatttttaaaagccagcaaacctcgaccccgctgaactcgtggagcaccaagcttggccgcgggccgtaactttccacacttattttgaggaaaattcggccctttatgagggctaagtgcagtgtgctcatgccaagaaaatctctttcaaatcgcgtaaaaaattccatataaatattgttagctggaatactgaatctctgccatgtgctgtgcacacgttatcacttcgaaaagccaaggcacgagttgttttcacatggaaaacagcatatagtagtgataacaaaattctcgggtctcccgatttatctcgcccgctactcttacgtaaataagtatctgtgagcgcggtaatttgtttgccattagctgcgagaatagttcaacaacatcgatgtttactgtttgattgatcatattcaaggtgccacaaatgatctttgttgattgtttgtcttcgccgctcgtaattgttgtgtttgtctagtcatcgtttccgattgtgcgtagtcgtgacaatcgagtgttttccattggatcgcagccgttgttgtgtttataaagcgggttccctgcacatgtgctatatgccatgtttttttatggaaatttattagctgagttaaaaaagaattagtttggcatgtgatcttggtcttctgacgcatttgtatttatgaaaatgctaatagaagccatcacattatcttttgttgatatacttagaacgatttgtgggcggcacaccctgctccgcaacttccagactttccaatttactgagcctattttgctcattgaatattattaacggaattaaaataaatatttgcctgagatcgcccgcagatattgggcacacccctaataactgagtcataaagtgcacaatacacgatcgtttgcgtcagtttgcccgatcaattagcgtaaatggacccagatctaaatggaaatacctcgaagcaaacaacaactcccttccaattcagagtcacgctctaaattttggagcccagcaccgatggtcactggacctattttgggcttctctaggttggccaatacgtcacttttggctgttcagacagaccgcctttattattgtttacctttggcaacatcgccaattgtcacttcccctttttaccgcatcgcccacttttcattcacaattggctaatttgtcgatgattaagcttttgatgcactcgcaaatggtagaggtggaaaaaaaagagcgagactcactcattcacacgctcttaccaattggccgaaattaatttgcaactcagctaaatgcgattgtgtattgaatgggtttgcaagagaagttcggtgcgtgattccccaaatccggtaaggattgtggttttccaagagacagaaaataggaaatcggtcgagtaatttatatttcaagcaatatgctcatatgctgagcatgggtaaacttatgcagattccactgttttggtttgatttcatttaaatagccatttattgctattgtactgctcaccattgtgcctgactgctcttgtcaaagctggtagatcaacaggccataaacaaaatcaatccacaaacgtgaggcaagtcgcaaaaaacatggaaagtttacaacaccgtcgacggcagaaacgaaacagcaactgaaacagcaaacgtgtgtggcttttgcaatataaataacaaatacattattgtgattttgttaccaacaacaggcctgaaaaccgtaggcatcgccattcccagtgactcttcaaatattccgtgcgcgaaactgcagagctctttggttatgcaaaagacctccgaaaataacaaacaacaggcacaaaaacataaactaaacgctggtggagccaaagacaaacgaatcacgtcgctgcagctggtcaagtgaaatttttctttcgtaatgaaaatcaaacattatccgggcaaagccgtcgatgcgagtctctcgctggagggcagcagtgccatgggtgccctgtacgaggccaattggctgagggctgcgaatcagcccgccgctccagccacaacgggcaccaaattgagcaggcagagcagctccgccggcagcagtttcctcatcgagggcatctccgccctgagcaagtaccaaatgaccctggagaatatccggcagctggagctgcagtcgcgtgacaaacgcatagcgagcacgattaaggaactcagcggctataggccatcggcactgcagcatcatcagcagcagcagatgcataacgtttgggtggccgaggatcaggatcaggaacacgaagaactggaagatgcttcggagggaaaggagaagttggctagtatccaggaaccccctgcagttaaccactatgtcctggacccgacggagagaccaagggttcccagaccccggcaacagttctccgtgaaaccgccttccttgcgtcgctcccaaaccatgtcgcaaccgcccagttatgccaccttgagatcgcccccgaaaatcaaggaaaatcttagcaaaagttcctccgcctactccacattctcctcggctgcagaggattcccaggatcaagtagtgatctgccaacagccacagagactgatggctccgccacccagagaaccgcctccggagccacccaaaagggtatcgaaacccctgagcagatcgcaaacttcggttcagcggtacgccacggttaggatgcccaaccagaccacttcgttcagcagaagtgtggtcaggtctagggattccaccgcctcccagagacgtctcagtttggagcaggccatcgagggactcaaactggagggggagaaggctgttcgtcagaagagtccacaaatctcaccagctgccagcagtaatggcagctccaaggatctcaacggggagggtttctgtatcccacgaccgcgcctcatcgttccagtgcacacatatgcccgtcgacgcaggacgggaaatctcaaggagcaatccagcggtgggcaggaggaggaagcagagaagggtaaggggtggaaggatttctatgttttaagtcaggataggcatagtagcttttatatcaataggataggacagaattatgattatgattacccaattaattttaatatattttctccagatggacgcgtggaggtttcccgcgagggcaagtacctctccacattgtcgggagcgaaggtccttggcgaattggcgatcctgtacaactgccagcggacggcgaccatcaccgcgatcaccgagtgcaacctgtgggccatcgagcgccagtgctttcagaccatcatgatgcgaacgggcctgatccggcaggcggagtacagcgatttcctcaagaggtgagtagccctccccgatccgtggctttcctccttggaatacctccttcatcgccgccttctcggccactcctctcgaagaccagaccaggagagacttccccattgccaatcggcgatttaatgtgcattttaatgagcctctgagcctgtggcgatttattggcgagatggtgccgactggttatttgcaatttgggcgtaattaatgttcatttacacttaattatatcaattccgcagtgcagctcgtgtatggtcattactctataatggcaaatgtaaaaatcgcttagcttgaggattttttttttttttagcccggtcgatttgtgtgttcaaatcgtgcaaggtatggcgaataaagtaaggtaactttctccgccggccccatcgacggcatctcttcagatcgaatgcagcattatggccatctcatcatcgtcatggtgttgggcgtccatatgacgtgcaatggctcaaactcaaatgaaaactcacttcagctaaacttcaggctgcggccaacgaacgcatagaaatttctttcccaatgccagccatggcaaccagttttttggccaagtctgcgcggctgtatccagtctcacttccatctccagtcgctcctgcctccggagtgaccggcaaattaatcgcgtttaattggtcgtccgtaaaaactgctaaaaaccataattgaggcctcgaccatgcactcgttgcctattccacattcgagaagtagcggaaaaagcagattgaaaatgaaagtgcaatgggctgatgatgacgatgatcatagatttagatacagatactgcagctgcaactgcaactgcagctatagactctagatacatgtgagcattcactgaaaaaatgctagccggcgggaaaaaacagaatgggaggagttcagcttcgattacgctgctctacagagagagaaaaagataaagaaatattcctcaaatatcgaagagaatcgaaaatgctagatagattaaactgaaacctacaaacggtggctatgtggaagataacttgttaatatttttgttaagtgtaacaacaaaagatgtgtgcgatgcacatgaaaaaattccagccggagggaaaccagtaatgggaggaggagttcaggtgcgactttcagcttgaagatcgatgtaggtcaacaatagattcccattactatggaattctcttatctagatcgaacttggctcggccactaattacagcactttctttggcctgcaacgcagattatctcgaatgaaactaacaatttttggtcttcttatctaccgctagtgtgcccatcttcaaagacctggcggaagacacgctcatcaaaatctccgatgttttggaggagacgcactaccagcgtggcgactacatagtgcgccaaggcgcccgaggcgataccttcttcatcatatccaagggaaaagtgcgagtgacgatcaagcagcaggacacgcaggaggagaagttcattcgcatgctgggcaaaggggatttctttggagagaaggctctccaggggtgagtttcattgaaatgattactatttctacttcataactaatgtgtatcatatttgtgttttagcgatgatctgcgcacggcgaatattatttgcgagtccgccgatggcgtcagttgtctggtcatcgatcgcgagaccttcaatcagctaatttccaatctagacgagatcaagcatcgctacgacgacgagggcgccatggaacgcagaaagtaagcgaatatttgaaaaaaaaaaaacacgaatcaagataagcaatgaggaattgaatcaatcgaaagcaaggtcaatgaactacctccaaatcaacaaatttttgttcatgttttaaatgtatatttacccgatagtcaagagagggctatacaaaataaccacattcgatttgactcaaactagtagttataatacgcttggcaagaagatgaaaaataattttttgggtcttgagtagatgatcaaaatgttagtttcttaaaagtcttcggcttatcttgattataaacccatttgaatgtttgaatacatggactaaaaactcatctcttttgcaggatcaacgaggaattccgggacattaacctcacagatctgcgcgtcatcgcaacccttggagttggaggcttcggtcgcgtagagctggtccaaactaatggagatagctccaggtccttcgcgctcaagcagatgaaaaagtcacagattgtggagacgcgtcagcagcaacacatcatgtccgagaaggagatcatgggcgaggccaattgccagttcatcgtgaagctgttcaagaccttcaaggacaagaagtacctgtacatgctgatggagagttgcctgggcggagagctctggacgattctacgggacaagggcaacttcgacgacagcaccacccgcttctacacggcatgtgtggtggaggcctttgattacttgcactcgcgtaacatcatctaccgcgatcttaagccggagaacctgctgctcaatgaacgaggatatgtgaagctggtggactttggctttgccaagaagctgcagacgggcaggaagacctggactttctgcggcactccagagtacgtggctcccgaggtgattctcaaccggggccacgacatcagtgcggattactggtcgctgggagtgctcatgttcgagttacttactggtgagtaaaaagaaagatctaagtaccaccgtcatataaataaccattttgtaatccttattctaggtacccctccattcacgggctcggatcccatgcgcacctacaacattatacttaagggcatcgacgccatcgaattcccaaggaatatcacccgcaatgccagcaacctgatcaagaagctctgtcgcgacaatccagccgagcgtttgggctaccagcgtgggggaatcagcgagatccaaaagcacaagtaagatccatttcaaatagtatgtgaagcagatacttattcgattattatttcccgcacagatggttcgatggcttctattggtggggcctgcagaactgcacactggaaccgcccattaagcccgccgtgaaaagcgttgtggatacaacaaactttgatgactatcctcccgatcctgagggtccgccgccagatgatgtcactggatgggacaaggacttctgaggagaatcagaacccgtttcctagacgatgctctctaaacgcttctgctgcagaaaaccaggaggatatgaaagccagggaagaaaaattgatcttaagtgcgccatatgtacgccaaagccaacagcaacagtcagcagctcgcatcgaaaagctgccacaaaaaaaaacaaagaaacgtagcagtcgcaaggtcaagggccgacacaaaagcacaatcatccatcgtcgtagctccatttgagatttatagatacgtctccgtgatgttataaccatgatgtgcaacgcaatgaatttattaacgagtttataactattattttataatgaggatatatgtgtctagttcgcttggaattgatgtaaattgtaagtaggtctgtgactctgtttcagagctctgttagccatgtgcattgtataaattcagctatttgtatctattaaatatttttaacataattattacacatcattgttaaagcatacaaatcgggttgccttatagtctgtaagagaacatttgaaagcaacatttgaccaagatcttccgtcacacatttcttaaaattctatgtggcctctctactgtctttcattagtcttagcgatcatgtctattatatttacgaataacatgcccttttaattgtcttttttaagtaaatcagctagaaattgaataaacaaattgatccgataaatttttttgtatttatacactattatcacaagaaattgtgaaagatactgctggccattgctgccctcaatgggtttcttcggttgtagtagataagatatttaatattaccaaattcacagtacacttcttaatttctttaagtgcattgtgaaatgaacactgcttttacagcatgtaaaaccgcccactcaacttgacctttttcaaggtacttcctatatgggcgcttctctgggcacacgttttctcttggcaaatagtgctgtggaaaatatgcaataaaaagaggaaacgctgaaatgcaaacgaagttggccaaaaacgaaacacaactacgtgacgaacggaagacgaattgccatgcagagaaagccgagaaaaatcagtcaaaatgctacaaaaattaaataagaacattctgtcactgacgttagtgcagatcgcaacggaaaactgaagctctgcaattggagtacgaaagtgcaactagaggatcgattggatatataatttatttcgcaacttagagagattgccgccatatgttaatgaactgaacaaaatggtttggatttcgagctgggggcaactttggctggtgttgctattggttgtgggcctatcgttgggtcttccgagcttggaaaaccagacacacgaacaaatcgaacagataataggtgagtcgtggatttattcgatacgaaactagattttaataactcttttctattctacattcagcctgcagacagccaaaggcacctggtttgtgccggggtcaccagttgcgatatgcctacaacaagaagaccggaaactgcgagagcttcatctacacgggctgtgcctccactgagaacaatttcctgaccttcgaggagtgtcgcagggattgcatgcaacgtctgcgctactgaagtcgcttttaacgat

SEQ ID NO: 28733 - DNA, 3799 bp, DROSOPHILA
gcgcatgcgcatgcgctcggttgcgaaaagtgcacctggatttgaaattaagccacaagaataacagaaatcaaaactcccccacttcgtgtttggccatttcttcggctgtcgtatcgtgattttcaattcgccctcgtgtgtgcttaacggcctgaaaaccgtaggcatcgccattcccagtgactcttcaaatattccgtgcgcgaaactgcagagctctttggttatgcaaaagacctccgaaaataacaaacaacaggcacaaaaacataaactaaacgctggtggagccaaagacaaacgaatcacgtcgctgcagctggtcaagtgaaatttttctttcgtaatgaaaatcaaacattatccgggcaaagccgtcgatgcgagtctctcgctggagggcagcagtgccatgggtgccctgtacgaggccaattggctgagggctgcgaatcagcccgccgctccagccacaacgggcaccaaattgagcaggcagagcagctccgccggcagcagtttcctcatcgagggcatctccgccctgagcaagtaccaaatgaccctggagaatatccggcagctggagctgcagtcgcgtgacaaacgcatagcgagcacgattaaggaactcagcggctataggccatcggcactgcagcatcatcagcagcagcagatgcataacgtttgggtggccgaggatcaggatcaggaacacgaagaactggaagatgcttcggagggaaaggagaagttggctagtatccaggaaccccctgcagttaaccactatgtcctggacccgacggagagaccaagggttcccagaccccggcaacagttctccgtgaaaccgccttccttgcgtcgctcccaaaccatgtcgcaaccgcccagttatgccaccttgagatcgcccccgaaaatcaaggaaaatcttagcaaaagttcctccgcctactccacattctcctcggctgcagaggattcccaggatcaagtagtgatctgccaacagccacagagactgatggctccgccacccagagaaccgcctccggagccacccaaaagggtatcgaaacccctgagcagatcgcaaacttcggttcagcggtacgccacggttaggatgcccaaccagaccacttcgttcagcagaagtgtggtcaggtctagggattccaccgcctcccagagacgtctcagtttggagcaggccatcgagggactcaaactggagggggagaaggctgttcgtcagaagagtccacaaatctcaccagctgccagcagtaatggcagctccaaggatctcaacggggagggtttctgtatcccacgaccgcgcctcatcgttccagtgcacacatatgcccgtcgacgcaggacgggaaatctcaaggagcaatccagcggtgggcaggaggaggaagcagagaagggtaaggggtggaaggatttctatgttttaagtcaggataggcatagtagcttttatatcaataggataggacagaattatgattatgattacccaattaattttaatatattttctccagatggacgcgtggaggtttcccgcgagggcaagtacctctccacattgtcgggagcgaaggtccttggcgaattggcgatcctgtacaactgccagcggacggcgaccatcaccgcgatcaccgagtgcaacctgtgggccatcgagcgccagtgctttcagaccatcatgatgcgaacgggcctgatccggcaggcggagtacagcgatttcctcaagagtgtgcccatcttcaaagacctggcggaagacacgctcatcaaaatctccgatgttttggaggagacgcactaccagcgtggcgactacatagtgcgccaaggcgcccgaggcgataccttcttcatcatatccaagggaaaagtgcgagtgacgatcaagcagcaggacacgcaggaggagaagttcattcgcatgctgggcaaaggggatttctttggagagaaggctctccagggcgatgatctgcgcacggcgaatattatttgcgagtccgccgatggcgtcagttgtctggtcatcgatcgcgagaccttcaatcagctaatttccaatctagacgagatcaagcatcgctacgacgacgagggcgccatggaacgcagaaagatcaacgaggaattccgggacattaacctcacagatctgcgcgtcatcgcaacccttggagttggaggcttcggtcgcgtagagctggtccaaactaatggagatagctccaggtccttcgcgctcaagcagatgaaaaagtcacagattgtggagacgcgtcagcagcaacacatcatgtccgagaaggagatcatgggcgaggccaattgccagttcatcgtgaagctgttcaagaccttcaaggacaagaagtacctgtacatgctgatggagagttgcctgggcggagagctctggacgattctacgggacaagggcaacttcgacgacagcaccacccgcttctacacggcatgtgtggtggaggcctttgattacttgcactcgcgtaacatcatctaccgcgatcttaagccggagaacctgctgctcaatgaacgaggatatgtgaagctggtggactttggctttgccaagaagctgcagacgggcaggaagacctggactttctgcggcactccagagtacgtggctcccgaggtgattctcaaccggggccacgacatcagtgcggattactggtcgctgggagtgctcatgttcgagttacttactggtacccctccattcacgggctcggatcccatgcgcacctacaacattatacttaagggcatcgacgccatcgaattcccaaggaatatcacccgcaatgccagcaacctgatcaagaagctctgtcgcgacaatccagccgagcgtttgggctaccagcgtgggggaatcagcgagatccaaaagcacaaatggttcgatggcttctattggtggggcctgcagaactgcacactggaaccgcccattaagcccgccgtgaaaagcgttgtggatacaacaaactttgatgactatcctcccgatcctgagggtccgccgccagatgatgtcactggatgggacaaggacttctgaggagaatcagaacccgtttcctagacgatgctctctaaacgcttctgctgcagaaaaccaggaggatatgaaagccagggaagaaaaattgatcttaagtgcgccatatgtacgccaaagccaacagcaacagtcagcagctcgcatcgaaaagctgccacaaaaaaaaacaaagaaacgtagcagtcgcaaggtcaagggccgacacaaaagcacaatcatccatcgtcgtagctccatttgagatttatagatacgtctccgtgatgttataaccatgatgtgcaacgcaatgaatttattaacgagtttataactattattttataatgaggatatatgtgtctagttcgcttggaattgatgtaaattgtaagtaggtctgtgactctgtttcagagctctgttagccatgtgcattgtataaattcagctatttgtatctattaaatatttttaacataattattacacatcattgttaaagcatacaaatcgggttgccttatagtctgtaagagaacatttgaaagcaacatttgaccaagatcttccgtcacacatttcttaaaattctatgtggcctctctactgtctttcattagtcttagcgatcatgtctattatatttacgaataacatgcc

SEQ ID NO: 28734 - protein, 934 aa, DROSOPHILA
MKIKHYPGKAVDASLSLEGSSAMGALYEANWLRAANQPAAPATTGTKLSRQSSSAGSSFLIEGISALSKYQMTLENIRQLELQSRDKRIASTIKELSGYRPSALQHHQQQQMHNVWVAEDQDQEHEELEDASEGKEKLASIQEPPAVNHYVLDPTERPRVPRPRQQFSVKPPSLRRSQTMSQPPSYATLRSPPKIKENLSKSSSAYSTFSSAAEDSQDQVVICQQPQRLMAPPPREPPPEPPKRVSKPLSRSQTSVQRYATVRMPNQTTSFSRSVVRSRDSTASQRRLSLEQAIEGLKLEGEKAVRQKSPQISPAASSNGSSKDLNGEGFCIPRPRLIVPVHTYARRRRTGNLKEQSSGGQEEEAEKGKGWKDFYVLSQDRHSSFYINRIGQNYDYDYPINFNIFSPDGRVEVSREGKYLSTLSGAKVLGELAILYNCQRTATITAITECNLWAIERQCFQTIMMRTGLIRQAEYSDFLKSVPIFKDLAEDTLIKISDVLEETHYQRGDYIVRQGARGDTFFIISKGKVRVTIKQQDTQEEKFIRMLGKGDFFGEKALQGDDLRTANIICESADGVSCLVIDRETFNQLISNLDEIKHRYDDEGAMERRKINEEFRDINLTDLRVIATLGVGGFGRVELVQTNGDSSRSFALKQMKKSQIVETRQQQHIMSEKEIMGEANCQFIVKLFKTFKDKKYLYMLMESCLGGELWTILRDKGNFDDSTTRFYTACVVEAFDYLHSRNIIYRDLKPENLLLNERGYVKLVDFGFAKKLQTGRKTWTFCGTPEYVAPEVILNRGHDISADYWSLGVLMFELLTGTPPFTGSDPMRTYNIILKGIDAIEFPRNITRNASNLIKKLCRDNPAERLGYQRGGISEIQKHKWFDGFYWWGLQNCTLEPPIKPAVKSVVDTTNFDDYPPDPEGPPPDDVTGWDKDF

SEQ ID NO: 28735 - DNA, 12020 bp, DROSOPHILA
ttccttaacctgaagcaccgatgtccgctactccaaaccgatgagcagatgtcacggcatctgtctatatatcatatagccccgcgcatatgatattgcaacgagagagaaaatcagagaggattcatatgatcgaaaaaccccttacagcagatgtttacgagatctgcaaggtttcggccttgctcattgtgcgaatgccctgtaaaacgcattcgagataagaaaagaggaagtatttacaatataataccctactcataaaactgccccatctcgagggatgtctgatttgttttgaaactctgctctgattaccaaattgaagaatatattttgtataatgacagacttgattaggcaacagtttaaggcgcgttggctctgaggtcactggacctcgggatctataattatttctgcacgttcattgttccatttctgaattgttacgttttccagatgataacgttcgaatctcttttgtttcgcgtagcgaattggcctgtcacttaggaccaaaccagttcgccggtttggtactctaaagctacactgcgagaaaaaaattgaatgggtcaatgtgtcgaacattagcagatatttcgatatttaaaatagaacaaatttgttttctcaggttaatatattggtacaaatgactttattaagacttagttaccaagcttatatggtctcagatcattaaatataaataccatgctctagattagtgcaacttatttcctcagtgcacagcacttgcttttgttcagctctttacttgtatatgtgggtattttcgctctcccagacacacatacacacacacacatataccccgatctctggggctctcgcccacaaccaaacaaaacgtgctcagctgtccccactatctgtacctgtctctgttctgctctctcagccgatcgctcagttggaaatgagaatgagtaatgctccagtgtttcgaatcccgatcttcgggcaattcgtcattcgtccggcaggcggcgtagcgagaaaacgtgtgtggcgcatgcgcatgcgctcggttgcgaaaagtgcacctggatttgaaattaagccacaagaataacagaaatcaaaactcccccacttcgtgtttggccatttcttcggctgtcgtatcgtgattttcaattcgccctcgtgtgtgcttaacggtattatagagcattttgcatatggcaaccgctgccagtgaattaataataaaagccacaaaccagacaattaccatgccttgcgcatatgcctttgagctatttccaacaataatgcttacataaatagcagctctggttgatgttctaaatagcaagtaaacaaaaccgcacaattttcccatgctcggtttttccgctcggctgtaattatgttgaaagagatcgggaaacgcttcgtgttaatttctttgaactgctcgcaaattcttggaataaagtgaattaaaagtgaaagtgaattctttaagcactcgcattaagtgagggaaataagcttaaaaacacccacggacttaaagagaatgagacgcagaaacggagacttggattttgctctttttctcgaattgaacgcaaagatcacttgaagaattccggtttgtggttttcctgtgcagctgttgttgttgttgttttggttgctgttactgccccgctgatttgtatgtgtatttatgtcccggtcattggtccgaagtaaagagccaaaaacacaaaaatcggcaataatggtgtagaaatacagacattataaaccgtataatgccaaatgtcactgctgcgactcgatcgtgcaagaatgtgagaacacaaatcgtacactgaatctgatatggccccagaaatgaaagaaatccactagaagtgcggaagaatgtggaaaattaaattaaatattgctagaaacacaaaacagaaaagaagtagcccgaaatttagaaatcgtgcgagtcaaaagccaaaacgatggtgatcacggacgagagggagaggcaactaggcatctgtgctaatgtcatgccctggaaccgggtctccacctgtcatttggcttcttctctcgtcatcttcccaacttggctggggcatctggggctaagaccggtcggaactatgggggctcggaactcggtggggcactctcactttccagcgacccaacgagttttgcattcgccttttgacatgccaaatgaactggcttcgcttgggcgctcaaataagattgagtaatagacgaaaagtggaaaatgatgacttgggggaagtggatcacaagattatggggaaacttggctctgaattggtcaaaataatggcgttccgaagtggtttataattgaacccaaacaagtggaacgaactctcagtagcttcttgatgctgggtcttatttaatttccagcactccaacaagttcatgtttttcttattttctttttaaaaaaagagttgagcttaaatacccaattaaaaagatacccagcagcattttagtattgattaatcgaaagttaatgatgcaagtctattaagacgtttccatgaagcttgcttatacatatgtatatttcttcgtttcagaaagtggctgttttcagaatctctgtggcattccccaatgatcttaaatctaatcagtaactcgaacgctagtcagtgctgacaaccctatagatcacttcagaatctcgtttgtcagctttatcgctgttttaagtacacttgcgaaataaagagaaggaatagtgttttgcgaaaacgatctgtcccgtttggctgattctgaatctcgattccctcgcgatcttgcttgactacaatctaaattgtatacacaaaagatctttcggacctctgatcttgcctccctcttccaaccagtttggataactttctttatagccgtctttcattagcatagacaaacaaaagaaacgtcaactgagctatggccataaattattattatgatgattttttagctccaatgtgagtgccaaaatgcggtcatgtcggtaaaaaaaaaagaagcaaaaataatccaaaacgaatgactaagccaatggcagttttgtcttgccttaattgtcagccaaaagggcggaccaaaaagtaaattacgagctgtcatgcaaaaccgaaaatgacttggactcggactcgatctcattccgaatccgaatccgctgcccttggcacacaagccaatgtctgtgactaacatcgccttaatcgaggcttccaaaaaccctgctctggagatccgttaacttctataaatagctgcttcagaaaagccaagtggcgggacacactgtccaaaaaaaaaaaaataataataaaagatttaccaatcaattacaatcaataaccacgactttaagtattttttcccatgagcaccgccaattacaaatgctaattgatattttcatacaattaagtccaatgataagtgaacctgaattgttgcaataatttcaaagatttttccacagtgcaagagctgtttaaattcttgtttcctccgctctgcgattgtattcaaatcggcgaatcagacaccggctgaccttgccaacactcgacatccaacaaccattaatacttgaagccagtctctgggcgaagttgcaaaatgtctgcagtttcaatttgtacacattttttctccatttacttttataatttgggtttttttttgttttgtttggggtgctcagctgggcttgacggatttccgcatttttaaaagccagcaaacctcgaccccgctgaactcgtggagcaccaagcttggccgcgggccgtaactttccacacttattttgaggaaaattcggccctttatgagggctaagtgcagtgtgctcatgccaagaaaatctctttcaaatcgcgtaaaaaattccatataaatattgttagctggaatactgaatctctgccatgtgctgtgcacacgttatcacttcgaaaagccaaggcacgagttgttttcacatggaaaacagcatatagtagtgataacaaaattctcgggtctcccgatttatctcgcccgctactcttacgtaaataagtatctgtgagcgcggtaatttgtttgccattagctgcgagaatagttcaacaacatcgatgtttactgtttgattgatcatattcaaggtgccacaaatgatctttgttgattgtttgtcttcgccgctcgtaattgttgtgtttgtctagtcatcgtttccgattgtgcgtagtcgtgacaatcgagtgttttccattggatcgcagccgttgttgtgtttataaagcgggttccctgcacatgtgctatatgccatgtttttttatggaaatttattagctgagttaaaaaagaattagtttggcatgtgatcttggtcttctgacgcatttgtatttatgaaaatgctaatagaagccatcacattatcttttgttgatatacttagaacgatttgtgggcggcacaccctgctccgcaacttccagactttccaatttactgagcctattttgctcattgaatattattaacggaattaaaataaatatttgcctgagatcgcccgcagatattgggcacacccctaataactgagtcataaagtgcacaatacacgatcgtttgcgtcagtttgcccgatcaattagcgtaaatggacccagatctaaatggaaatacctcgaagcaaacaacaactcccttccaattcagagtcacgctctaaattttggagcccagcaccgatggtcactggacctattttgggcttctctaggttggccaatacgtcacttttggctgttcagacagaccgcctttattattgtttacctttggcaacatcgccaattgtcacttcccctttttaccgcatcgcccacttttcattcacaattggctaatttgtcgatgattaagcttttgatgcactcgcaaatggtagaggtggaaaaaaaagagcgagactcactcattcacacgctcttaccaattggccgaaattaatttgcaactcagctaaatgcgattgtgtattgaatgggtttgcaagagaagttcggtgcgtgattccccaaatccggtaaggattgtggttttccaagagacagaaaataggaaatcggtcgagtaatttatatttcaagcaatatgctcatatgctgagcatgggtaaacttatgcagattccactgttttggtttgatttcatttaaatagccatttattgctattgtactgctcaccattgtgcctgactgctcttgtcaaagctggtagatcaacaggccataaacaaaatcaatccacaaacgtgaggcaagtcgcaaaaaacatggaaagtttacaacaccgtcgacggcagaaacgaaacagcaactgaaacagcaaacgtgtgtggcttttgcaatataaataacaaatacattattgtgattttgttaccaacaacaggcctgaaaaccgtaggcatcgccattcccagtgactcttcaaatattccgtgcgcgaaactgcagagctctttggttatgcaaaagacctccgaaaataacaaacaacaggcacaaaaacataaactaaacgctggtggagccaaagacaaacgaatcacgtcgctgcagctggtcaagtgaaatttttctttcgtaatgaaaatcaaacattatccgggcaaagccgtcgatgcgagtctctcgctggagggcagcagtgccatgggtgccctgtacgaggccaattggctgagggctgcgaatcagcccgccgctccagccacaacgggcaccaaattgagcaggcagagcagctccgccggcagcagtttcctcatcgagggcatctccgccctgagcaagtaccaaatgaccctggagaatatccggcagctggagctgcagtcgcgtgacaaacgcatagcgagcacgattaaggaactcagcggctataggccatcggcactgcagcatcatcagcagcagcagatgcataacgtttgggtggccgaggatcaggatcaggaacacgaagaactggaagatgcttcggagggaaaggagaagttggctagtatccaggaaccccctgcagttaaccactatgtcctggacccgacggagagaccaagggttcccagaccccggcaacagttctccgtgaaaccgccttccttgcgtcgctcccaaaccatgtcgcaaccgcccagttatgccaccttgagatcgcccccgaaaatcaaggaaaatcttagcaaaagttcctccgcctactccacattctcctcggctgcagaggattcccaggatcaagtagtgatctgccaacagccacagagactgatggctccgccacccagagaaccgcctccggagccacccaaaagggtatcgaaacccctgagcagatcgcaaacttcggttcagcggtacgccacggttaggatgcccaaccagaccacttcgttcagcagaagtgtggtcaggtctagggattccaccgcctcccagagacgtctcagtttggagcaggccatcgagggactcaaactggagggggagaaggctgttcgtcagaagagtccacaaatctcaccagctgccagcagtaatggcagctccaaggatctcaacggggagggtttctgtatcccacgaccgcgcctcatcgttccagtgcacacatatgcccgtcgacgcaggacgggaaatctcaaggagcaatccagcggtgggcaggaggaggaagcagagaagggtaaggggtggaaggatttctatgttttaagtcaggataggcatagtagcttttatatcaataggataggacagaattatgattatgattacccaattaattttaatatattttctccagatggacgcgtggaggtttcccgcgagggcaagtacctctccacattgtcgggagcgaaggtccttggcgaattggcgatcctgtacaactgccagcggacggcgaccatcaccgcgatcaccgagtgcaacctgtgggccatcgagcgccagtgctttcagaccatcatgatgcgaacgggcctgatccggcaggcggagtacagcgatttcctcaagaggtgagtagccctccccgatccgtggctttcctccttggaatacctccttcatcgccgccttctcggccactcctctcgaagaccagaccaggagagacttccccattgccaatcggcgatttaatgtgcattttaatgagcctctgagcctgtggcgatttattggcgagatggtgccgactggttatttgcaatttgggcgtaattaatgttcatttacacttaattatatcaattccgcagtgcagctcgtgtatggtcattactctataatggcaaatgtaaaaatcgcttagcttgaggattttttttttttttagcccggtcgatttgtgtgttcaaatcgtgcaaggtatggcgaataaagtaaggtaactttctccgccggccccatcgacggcatctcttcagatcgaatgcagcattatggccatctcatcatcgtcatggtgttgggcgtccatatgacgtgcaatggctcaaactcaaatgaaaactcacttcagctaaacttcaggctgcggccaacgaacgcatagaaatttctttcccaatgccagccatggcaaccagttttttggccaagtctgcgcggctgtatccagtctcacttccatctccagtcgctcctgcctccggagtgaccggcaaattaatcgcgtttaattggtcgtccgtaaaaactgctaaaaaccataattgaggcctcgaccatgcactcgttgcctattccacattcgagaagtagcggaaaaagcagattgaaaatgaaagtgcaatgggctgatgatgacgatgatcatagatttagatacagatactgcagctgcaactgcaactgcagctatagactctagatacatgtgagcattcactgaaaaaatgctagccggcgggaaaaaacagaatgggaggagttcagcttcgattacgctgctctacagagagagaaaaagataaagaaatattcctcaaatatcgaagagaatcgaaaatgctagatagattaaactgaaacctacaaacggtggctatgtggaagataacttgttaatatttttgttaagtgtaacaacaaaagatgtgtgcgatgcacatgaaaaaattccagccggagggaaaccagtaatgggaggaggagttcaggtgcgactttcagcttgaagatcgatgtaggtcaacaatagattcccattactatggaattctcttatctagatcgaacttggctcggccactaattacagcactttctttggcctgcaacgcagattatctcgaatgaaactaacaatttttggtcttcttatctaccgctagtgtgcccatcttcaaagacctggcggaagacacgctcatcaaaatctccgatgttttggaggagacgcactaccagcgtggcgactacatagtgcgccaaggcgcccgaggcgataccttcttcatcatatccaagggaaaagtgcgagtgacgatcaagcagcaggacacgcaggaggagaagttcattcgcatgctgggcaaaggggatttctttggagagaaggctctccaggggtgagtttcattgaaatgattactatttctacttcataactaatgtgtatcatatttgtgttttagcgatgatctgcgcacggcgaatattatttgcgagtccgccgatggcgtcagttgtctggtcatcgatcgcgagaccttcaatcagctaatttccaatctagacgagatcaagcatcgctacgacgacgagggcgccatggaacgcagaaagtaagcgaatatttgaaaaaaaaaaaacacgaatcaagataagcaatgaggaattgaatcaatcgaaagcaaggtcaatgaactacctccaaatcaacaaatttttgttcatgttttaaatgtatatttacccgatagtcaagagagggctatacaaaataaccacattcgatttgactcaaactagtagttataatacgcttggcaagaagatgaaaaataattttttgggtcttgagtagatgatcaaaatgttagtttcttaaaagtcttcggcttatcttgattataaacccatttgaatgtttgaatacatggactaaaaactcatctcttttgcaggatcaacgaggaattccgggacattaacctcacagatctgcgcgtcatcgcaacccttggagttggaggcttcggtcgcgtagagctggtccaaactaatggagatagctccaggtccttcgcgctcaagcagatgaaaaagtcacagattgtggagacgcgtcagcagcaacacatcatgtccgagaaggagatcatgggcgaggccaattgccagttcatcgtgaagctgttcaagaccttcaaggacaagaagtacctgtacatgctgatggagagttgcctgggcggagagctctggacgattctacgggacaagggcaacttcgacgacagcaccacccgcttctacacggcatgtgtggtggaggcctttgattacttgcactcgcgtaacatcatctaccgcgatcttaagccggagaacctgctgctcaatgaacgaggatatgtgaagctggtggactttggctttgccaagaagctgcagacgggcaggaagacctggactttctgcggcactccagagtacgtggctcccgaggtgattctcaaccggggccacgacatcagtgcggattactggtcgctgggagtgctcatgttcgagttacttactggtgagtaaaaagaaagatctaagtaccaccgtcatataaataaccattttgtaatccttattctaggtacccctccattcacgggctcggatcccatgcgcacctacaacattatacttaagggcatcgacgccatcgaattcccaaggaatatcacccgcaatgccagcaacctgatcaagaagctctgtcgcgacaatccagccgagcgtttgggctaccagcgtgggggaatcagcgagatccaaaagcacaagtaagatccatttcaaatagtatgtgaagcagatacttattcgattattatttcccgcacagatggttcgatggcttctattggtggggcctgcagaactgcacactggaaccgcccattaagcccgccgtgaaaagcgttgtggatacaacaaactttgatgactatcctcccgatcctgagggtccgccgccagatgatgtcactggatgggacaaggacttctgaggagaatcagaacccgtttcctagacgatgctctctaaacgcttctgctgcagaaaaccaggaggatatgaaagccagggaagaaaaattgatcttaagtgcgccatatgtacgccaaagccaacagcaacagtcagcagctcgcatcgaaaagctgccacaaaaaaaaacaaagaaacgtagcagtcgcaaggtcaagggccgacacaaaagcacaatcatccatcgtcgtagctccatttgagatttatagatacgtctccgtgatgttataaccatgatgtgcaacgcaatgaatttattaacgagtttataactattattttataatgaggatatatgtgtctagttcgcttggaattgatgtaaattgtaagtaggtctgtgactctgtttcagagctctgttagccatgtgcattgtataaattcagctatttgtatctattaaatatttttaacataattattacacatcattgttaaagcatacaaatcgggttgccttatagtctgtaagagaacatttgaaagcaacatttgaccaagatcttccgtcacacatttcttaaaattctatgtggcctctctactgtctttcattagtcttagcgatcatgtctattatatttacgaataacatgcccttttaattgtcttttttaagtaaatcagctagaaattgaataaacaaattgatccgataaatttttttgtatttatacactattatcacaagaaattgtgaaagatactgctggccattgctgccctcaatgggtttcttcggttgtagtagataagatatttaatattaccaaattcacagtacacttcttaatttctttaagtgcattgtgaaatgaacactgcttttacagcatgtaaaaccgcccactcaacttgacctttttcaaggtacttcctatatgggcgcttctctgggcacacgttttctcttggcaaatagtgctgtggaaaatatgcaataaaaagaggaaacgctgaaatgcaaacgaagttggccaaaaacgaaacacaactacgtgacgaacggaagacgaattgccatgcagagaaagccgagaaaaatcagtcaaaatgctacaaaaattaaataagaacattctgtcactgacgttagtgcagatcgcaacggaaaactgaagctctgcaattggagtacgaaagtgcaactagaggatcgattggatatataatttatttcgcaacttagagagattgccgccatatgttaatgaactgaacaaaatggtttggatttcgagctgggggcaactttggctggtgttgctattggttgtgggcctatcgttgggtcttccgagcttggaaaaccagacacacgaacaaatcgaacagataataggtgagtcgtggatttattcgatacgaaactagattttaataactcttttctattctacattcagcctgcagacagccaaaggcacctggtttgtgccggggtcaccagttgcgatatgcctacaacaagaagaccggaaactgcgagagcttcatctacacgggctgtgcctccactgagaacaatttcctgaccttcgaggagtgtcgcagggattgcatgcaacgtctgcgctactgaagtcgcttttaacgat

SEQ ID NO: 28736 - DNA, 4277 bp, DROSOPHILA
attcgtccggcaggcggcgtagcgagaaaacgtgtgtggcgcatgcgcatgcgctcggttgcgaaaagtgcacctggatttgaaattaagccacaagaataacagaaatcaaaactcccccacttcgtgtttggccatttcttcggctgtcgtatcgtgattttcaattcgccctcgtgtgtgcttaacggtattatagagcattttgcatatggcaaccgctgccagtgaattaataataaaagccacaaaccagacaattaccatgccttgcgcatatgcctttgagctatttccaacaataatgcttacataaatagcagctctggttgatgttctaaatagcaagtaaacaaaaccgcacaattttcccatgctcggtttttccgctcggctgtaattatgttgaaagagatcgggaaacgcttcgtgttaatttctttgaactgctcgcaaattcttggaataaagtgaattaaaagtgaaagtgaattctttaagcactcgcattaagtgagggaaataagcttaaaaacacccacggacttaaagagaatgagacgcagaaacggagacttggattttgctctttttctcgaattgaacgcaaagatcacttgaagaattccggcctgaaaaccgtaggcatcgccattcccagtgactcttcaaatattccgtgcgcgaaactgcagagctctttggttatgcaaaagacctccgaaaataacaaacaacaggcacaaaaacataaactaaacgctggtggagccaaagacaaacgaatcacgtcgctgcagctggtcaagtgaaatttttctttcgtaatgaaaatcaaacattatccgggcaaagccgtcgatgcgagtctctcgctggagggcagcagtgccatgggtgccctgtacgaggccaattggctgagggctgcgaatcagcccgccgctccagccacaacgggcaccaaattgagcaggcagagcagctccgccggcagcagtttcctcatcgagggcatctccgccctgagcaagtaccaaatgaccctggagaatatccggcagctggagctgcagtcgcgtgacaaacgcatagcgagcacgattaaggaactcagcggctataggccatcggcactgcagcatcatcagcagcagcagatgcataacgtttgggtggccgaggatcaggatcaggaacacgaagaactggaagatgcttcggagggaaaggagaagttggctagtatccaggaaccccctgcagttaaccactatgtcctggacccgacggagagaccaagggttcccagaccccggcaacagttctccgtgaaaccgccttccttgcgtcgctcccaaaccatgtcgcaaccgcccagttatgccaccttgagatcgcccccgaaaatcaaggaaaatcttagcaaaagttcctccgcctactccacattctcctcggctgcagaggattcccaggatcaagtagtgatctgccaacagccacagagactgatggctccgccacccagagaaccgcctccggagccacccaaaagggtatcgaaacccctgagcagatcgcaaacttcggttcagcggtacgccacggttaggatgcccaaccagaccacttcgttcagcagaagtgtggtcaggtctagggattccaccgcctcccagagacgtctcagtttggagcaggccatcgagggactcaaactggagggggagaaggctgttcgtcagaagagtccacaaatctcaccagctgccagcagtaatggcagctccaaggatctcaacggggagggtttctgtatcccacgaccgcgcctcatcgttccagtgcacacatatgcccgtcgacgcaggacgggaaatctcaaggagcaatccagcggtgggcaggaggaggaagcagagaagggtaaggggtggaaggatttctatgttttaagtcaggataggcatagtagcttttatatcaataggataggacagaattatgattatgattacccaattaattttaatatattttctccagatggacgcgtggaggtttcccgcgagggcaagtacctctccacattgtcgggagcgaaggtccttggcgaattggcgatcctgtacaactgccagcggacggcgaccatcaccgcgatcaccgagtgcaacctgtgggccatcgagcgccagtgctttcagaccatcatgatgcgaacgggcctgatccggcaggcggagtacagcgatttcctcaagagtgtgcccatcttcaaagacctggcggaagacacgctcatcaaaatctccgatgttttggaggagacgcactaccagcgtggcgactacatagtgcgccaaggcgcccgaggcgataccttcttcatcatatccaagggaaaagtgcgagtgacgatcaagcagcaggacacgcaggaggagaagttcattcgcatgctgggcaaaggggatttctttggagagaaggctctccagggcgatgatctgcgcacggcgaatattatttgcgagtccgccgatggcgtcagttgtctggtcatcgatcgcgagaccttcaatcagctaatttccaatctagacgagatcaagcatcgctacgacgacgagggcgccatggaacgcagaaagatcaacgaggaattccgggacattaacctcacagatctgcgcgtcatcgcaacccttggagttggaggcttcggtcgcgtagagctggtccaaactaatggagatagctccaggtccttcgcgctcaagcagatgaaaaagtcacagattgtggagacgcgtcagcagcaacacatcatgtccgagaaggagatcatgggcgaggccaattgccagttcatcgtgaagctgttcaagaccttcaaggacaagaagtacctgtacatgctgatggagagttgcctgggcggagagctctggacgattctacgggacaagggcaacttcgacgacagcaccacccgcttctacacggcatgtgtggtggaggcctttgattacttgcactcgcgtaacatcatctaccgcgatcttaagccggagaacctgctgctcaatgaacgaggatatgtgaagctggtggactttggctttgccaagaagctgcagacgggcaggaagacctggactttctgcggcactccagagtacgtggctcccgaggtgattctcaaccggggccacgacatcagtgcggattactggtcgctgggagtgctcatgttcgagttacttactggtacccctccattcacgggctcggatcccatgcgcacctacaacattatacttaagggcatcgacgccatcgaattcccaaggaatatcacccgcaatgccagcaacctgatcaagaagctctgtcgcgacaatccagccgagcgtttgggctaccagcgtgggggaatcagcgagatccaaaagcacaaatggttcgatggcttctattggtggggcctgcagaactgcacactggaaccgcccattaagcccgccgtgaaaagcgttgtggatacaacaaactttgatgactatcctcccgatcctgagggtccgccgccagatgatgtcactggatgggacaaggacttctgaggagaatcagaacccgtttcctagacgatgctctctaaacgcttctgctgcagaaaaccaggaggatatgaaagccagggaagaaaaattgatcttaagtgcgccatatgtacgccaaagccaacagcaacagtcagcagctcgcatcgaaaagctgccacaaaaaaaaacaaagaaacgtagcagtcgcaaggtcaagggccgacacaaaagcacaatcatccatcgtcgtagctccatttgagatttatagatacgtctccgtgatgttataaccatgatgtgcaacgcaatgaatttattaacgagtttataactattattttataatgaggatatatgtgtctagttcgcttggaattgatgtaaattgtaagtaggtctgtgactctgtttcagagctctgttagccatgtgcattgtataaattcagctatttgtatctattaaatatttttaacataattattacacatcattgttaaagcatacaaatcgggttgccttatagtctgtaagagaacatttgaaagcaacatttgaccaagatcttccgtcacacatttcttaaaattctatgtggcctctctactgtctttcattagtcttagcgatcatgtctattatatttacgaataacatgcc

SEQ ID NO: 28737 - protein, 934 aa, DROSOPHILA; identical to SEQ ID NO: 28734

SEQ ID NO: 28738 - DNA, 12047 bp, DROSOPHILA
ttccttaacctgaagcaccgatgtccgctactccaaaccgatgagcagatgtcacggcatctgtctatatatcatatagccccgcgcatatgatattgcaacgagagagaaaatcagagaggattcatatgatcgaaaaaccccttacagcagatgtttacgagatctgcaaggtttcggccttgctcattgtgcgaatgccctgtaaaacgcattcgagataagaaaagaggaagtatttacaatataataccctactcataaaactgccccatctcgagggatgtctgatttgttttgaaactctgctctgattaccaaattgaagaatatattttgtataatgacagacttgattaggcaacagtttaaggcgcgttggctctgaggtcactggacctcgggatctataattatttctgcacgttcattgttccatttctgaattgttacgttttccagatgataacgttcgaatctcttttgtttcgcgtagcgaattggcctgtcacttaggaccaaaccagttcgccggtttggtactctaaagctacactgcgagaaaaaaattgaatgggtcaatgtgtcgaacattagcagatatttcgatatttaaaatagaacaaatttgttttctcaggttaatatattggtacaaatgactttattaagacttagttaccaagcttatatggtctcagatcattaaatataaataccatgctctagattagtgcaacttatttcctcagtgcacagcacttgcttttgttcagctctttacttgtatatgtgggtattttcgctctcccagacacacatacacacacacacatataccccgatctctggggctctcgcccacaaccaaacaaaacgtgctcagctgtccccactatctgtacctgtctctgttctgctctctcagccgatcgctcagttggaaatgagaatgagtaatgctccagtgtttcgaatcccgatcttcgggcaattcgtcattcgtccggcaggcggcgtagcgagaaaacgtgtgtggcgcatgcgcatgcgctcggttgcgaaaagtgcacctggatttgaaattaagccacaagaataacagaaatcaaaactcccccacttcgtgtttggccatttcttcggctgtcgtatcgtgattttcaattcgccctcgtgtgtgcttaacggtattatagagcattttgcatatggcaaccgctgccagtgaattaataataaaagccacaaaccagacaattaccatgccttgcgcatatgcctttgagctatttccaacaataatgcttacataaatagcagctctggttgatgttctaaatagcaagtaaacaaaaccgcacaattttcccatgctcggtttttccgctcggctgtaattatgttgaaagagatcgggaaacgcttcgtgttaatttctttgaactgctcgcaaattcttggaataaagtgaattaaaagtgaaagtgaattctttaagcactcgcattaagtgagggaaataagcttaaaaacacccacggacttaaagagaatgagacgcagaaacggagacttggattttgctctttttctcgaattgaacgcaaagatcacttgaagaattccggtttgtggttttcctgtgcagctgttgttgttgttgttttggttgctgttactgccccgctgatttgtatgtgtatttatgtcccggtcattggtccgaagtaaagagccaaaaacacaaaaatcggcaataatggtgtagaaatacagacattataaaccgtataatgccaaatgtcactgctgcgactcgatcgtgcaagaatgtgagaacacaaatcgtacactgaatctgatatggccccagaaatgaaagaaatccactagaagtgcggaagaatgtggaaaattaaattaaatattgctagaaacacaaaacagaaaagaagtagcccgaaatttagaaatcgtgcgagtcaaaagccaaaacgatggtgatcacggacgagagggagaggcaactaggcatctgtgctaatgtcatgccctggaaccgggtctccacctgtcatttggcttcttctctcgtcatcttcccaacttggctggggcatctggggctaagaccggtcggaactatgggggctcggaactcggtggggcactctcactttccagcgacccaacgagttttgcattcgccttttgacatgccaaatgaactggcttcgcttgggcgctcaaataagattgagtaatagacgaaaagtggaaaatgatgacttgggggaagtggatcacaagattatggggaaacttggctctgaattggtcaaaataatggcgttccgaagtggtttataattgaacccaaacaagtggaacgaactctcagtagcttcttgatgctgggtcttatttaatttccagcactccaacaagttcatgtttttcttattttctttttaaaaaaagagttgagcttaaatacccaattaaaaagatacccagcagcattttagtattgattaatcgaaagttaatgatgcaagtctattaagacgtttccatgaagcttgcttatacatatgtatatttcttcgtttcagaaagtggctgttttcagaatctctgtggcattccccaatgatcttaaatctaatcagtaactcgaacgctagtcagtgctgacaaccctatagatcacttcagaatctcgtttgtcagctttatcgctgttttaagtacacttgcgaaataaagagaaggaatagtgttttgcgaaaacgatctgtcccgtttggctgattctgaatctcgattccctcgcgatcttgcttgactacaatctaaattgtatacacaaaagatctttcggacctctgatcttgcctccctcttccaaccagtttggataactttctttatagccgtctttcattagcatagacaaacaaaagaaacgtcaactgagctatggccataaattattattatgatgattttttagctccaatgtgagtgccaaaatgcggtcatgtcggtaaaaaaaaaagaagcaaaaataatccaaaacgaatgactaagccaatggcagttttgtcttgccttaattgtcagccaaaagggcggaccaaaaagtaaattacgagctgtcatgcaaaaccgaaaatgacttggactcggactcgatctcattccgaatccgaatccgctgcccttggcacacaagccaatgtctgtgactaacatcgccttaatcgaggcttccaaaaaccctgctctggagatccgttaacttctataaatagctgcttcagaaaagccaagtggcgggacacactgtccaaaaaaaaaaaaataataataaaagatttaccaatcaattacaatcaataaccacgactttaagtattttttcccatgagcaccgccaattacaaatgctaattgatattttcatacaattaagtccaatgataagtgaacctgaattgttgcaataatttcaaagatttttccacagtgcaagagctgtttaaattcttgtttcctccgctctgcgattgtattcaaatcggcgaatcagacaccggctgaccttgccaacactcgacatccaacaaccattaatacttgaagccagtctctgggcgaagttgcaaaatgtctgcagtttcaatttgtacacattttttctccatttacttttataatttgggtttttttttgttttgtttggggtgctcagctgggcttgacggatttccgcatttttaaaagccagcaaacctcgaccccgctgaactcgtggagcaccaagcttggccgcgggccgtaactttccacacttattttgaggaaaattcggccctttatgagggctaagtgcagtgtgctcatgccaagaaaatctctttcaaatcgcgtaaaaaattccatataaatattgttagctggaatactgaatctctgccatgtgctgtgcacacgttatcacttcgaaaagccaaggcacgagttgttttcacatggaaaacagcatatagtagtgataacaaaattctcgggtctcccgatttatctcgcccgctactcttacgtaaataagtatctgtgagcgcggtaatttgtttgccattagctgcgagaatagttcaacaacatcgatgtttactgtttgattgatcatattcaaggtgccacaaatgatctttgttgattgtttgtcttcgccgctcgtaattgttgtgtttgtctagtcatcgtttccgattgtgcgtagtcgtgacaatcgagtgttttccattggatcgcagccgttgttgtgtttataaagcgggttccctgcacatgtgctatatgccatgtttttttatggaaatttattagctgagttaaaaaagaattagtttggcatgtgatcttggtcttctgacgcatttgtatttatgaaaatgctaatagaagccatcacattatcttttgttgatatacttagaacgatttgtgggcggcacaccctgctccgcaacttccagactttccaatttactgagcctattttgctcattgaatattattaacggaattaaaataaatatttgcctgagatcgcccgcagatattgggcacacccctaataactgagtcataaagtgcacaatacacgatcgtttgcgtcagtttgcccgatcaattagcgtaaatggacccagatctaaatggaaatacctcgaagcaaacaacaactcccttccaattcagagtcacgctctaaattttggagcccagcaccgatggtcactggacctattttgggcttctctaggttggccaatacgtcacttttggctgttcagacagaccgcctttattattgtttacctttggcaacatcgccaattgtcacttcccctttttaccgcatcgcccacttttcattcacaattggctaatttgtcgatgattaagcttttgatgcactcgcaaatggtagaggtggaaaaaaaagagcgagactcactcattcacacgctcttaccaattggccgaaattaatttgcaactcagctaaatgcgattgtgtattgaatgggtttgcaagagaagttcggtgcgtgattccccaaatccggtaaggattgtggttttccaagagacagaaaataggaaatcggtcgagtaatttatatttcaagcaatatgctcatatgctgagcatgggtaaacttatgcagattccactgttttggtttgatttcatttaaatagccatttattgctattgtactgctcaccattgtgcctgactgctcttgtcaaagctggtagatcaacaggccataaacaaaatcaatccacaaacgtgaggcaagtcgcaaaaaacatggaaagtttacaacaccgtcgacggcagaaacgaaacagcaactgaaacagcaaacgtgtgtggcttttgcaatataaataacaaatacattattgtgattttgttaccaacaacaggcctgaaaaccgtaggcatcgccattcccagtgactcttcaaatattccgtgcgcgaaactgcagagctctttggttatgcaaaagacctccgaaaataacaaacaacaggcacaaaaacataaactaaacgctggtggagccaaagacaaacgaatcacgtcgctgcagctggtcaagtgaaatttttctttcgtaatgaaaatcaaacattatccgggcaaagccgtcgatgcgagtctctcgctggagggcagcagtgccatgggtgccctgtacgaggccaattggctgagggctgcgaatcagcccgccgctccagccacaacgggcaccaaattgagcaggcagagcagctccgccggcagcagtttcctcatcgagggcatctccgccctgagcaagtaccaaatgaccctggagaatatccggcagctggagctgcagtcgcgtgacaaacgcatagcgagcacgattaaggaactcagcggctataggccatcggcactgcagcatcatcagcagcagcagatgcataacgtttgggtggccgaggatcaggatcaggaacacgaagaactggaagatgcttcggagggaaaggagaagttggctagtatccaggaaccccctgcagttaaccactatgtcctggacccgacggagagaccaagggttcccagaccccggcaacagttctccgtgaaaccgccttccttgcgtcgctcccaaaccatgtcgcaaccgcccagttatgccaccttgagatcgcccccgaaaatcaaggaaaatcttagcaaaagttcctccgcctactccacattctcctcggctgcagaggattcccaggatcaagtagtgatctgccaacagccacagagactgatggctccgccacccagagaaccgcctccggagccacccaaaagggtatcgaaacccctgagcagatcgcaaacttcggttcagcggtacgccacggttaggatgcccaaccagaccacttcgttcagcagaagtgtggtcaggtctagggattccaccgcctcccagagacgtctcagtttggagcaggccatcgagggactcaaactggagggggagaaggctgttcgtcagaagagtccacaaatctcaccagctgccagcagtaatggcagctccaaggatctcaacggggagggtttctgtatcccacgaccgcgcctcatcgttccagtgcacacatatgcccgtcgacgcaggacgggaaatctcaaggagcaatccagcggtgggcaggaggaggaagcagagaagggtaaggggtggaaggatttctatgttttaagtcaggataggcatagtagcttttatatcaataggataggacagaattatgattatgattacccaattaattttaatatattttctccagatggacgcgtggaggtttcccgcgagggcaagtacctctccacattgtcgggagcgaaggtccttggcgaattggcgatcctgtacaactgccagcggacggcgaccatcaccgcgatcaccgagtgcaacctgtgggccatcgagcgccagtgctttcagaccatcatgatgcgaacgggcctgatccggcaggcggagtacagcgatttcctcaagaggtgagtagccctccccgatccgtggctttcctccttggaatacctccttcatcgccgccttctcggccactcctctcgaagaccagaccaggagagacttccccattgccaatcggcgatttaatgtgcattttaatgagcctctgagcctgtggcgatttattggcgagatggtgccgactggttatttgcaatttgggcgtaattaatgttcatttacacttaattatatcaattccgcagtgcagctcgtgtatggtcattactctataatggcaaatgtaaaaatcgcttagcttgaggattttttttttttttagcccggtcgatttgtgtgttcaaatcgtgcaaggtatggcgaataaagtaaggtaactttctccgccggccccatcgacggcatctcttcagatcgaatgcagcattatggccatctcatcatcgtcatggtgttgggcgtccatatgacgtgcaatggctcaaactcaaatgaaaactcacttcagctaaacttcaggctgcggccaacgaacgcatagaaatttctttcccaatgccagccatggcaaccagttttttggccaagtctgcgcggctgtatccagtctcacttccatctccagtcgctcctgcctccggagtgaccggcaaattaatcgcgtttaattggtcgtccgtaaaaactgctaaaaaccataattgaggcctcgaccatgcactcgttgcctattccacattcgagaagtagcggaaaaagcagattgaaaatgaaagtgcaatgggctgatgatgacgatgatcatagatttagatacagatactgcagctgcaactgcaactgcagctatagactctagatacatgtgagcattcactgaaaaaatgctagccggcgggaaaaaacagaatgggaggagttcagcttcgattacgctgctctacagagagagaaaaagataaagaaatattcctcaaatatcgaagagaatcgaaaatgctagatagattaaactgaaacctacaaacggtggctatgtggaagataacttgttaatatttttgttaagtgtaacaacaaaagatgtgtgcgatgcacatgaaaaaattccagccggagggaaaccagtaatgggaggaggagttcaggtgcgactttcagcttgaagatcgatgtaggtcaacaatagattcccattactatggaattctcttatctagatcgaacttggctcggccactaattacagcactttctttggcctgcaacgcagattatctcgaatgaaactaacaatttttggtcttcttatctaccgctagtgtgcccatcttcaaagacctggcggaagacacgctcatcaaaatctccgatgttttggaggagacgcactaccagcgtggcgactacatagtgcgccaaggcgcccgaggcgataccttcttcatcatatccaagggaaaagtgcgagtgacgatcaagcagcaggacacgcaggaggagaagttcattcgcatgctgggcaaaggggatttctttggagagaaggctctccaggggtgagtttcattgaaatgattactatttctacttcataactaatgtgtatcatatttgtgttttagcgatgatctgcgcacggcgaatattatttgcgagtccgccgatggcgtcagttgtctggtcatcgatcgcgagaccttcaatcagctaatttccaatctagacgagatcaagcatcgctacgacgacgagggcgccatggaacgcagaaagtaagcgaatatttgaaaaaaaaaaaacacgaatcaagataagcaatgaggaattgaatcaatcgaaagcaaggtcaatgaactacctccaaatcaacaaatttttgttcatgttttaaatgtatatttacccgatagtcaagagagggctatacaaaataaccacattcgatttgactcaaactagtagttataatacgcttggcaagaagatgaaaaataattttttgggtcttgagtagatgatcaaaatgttagtttcttaaaagtcttcggcttatcttgattataaacccatttgaatgtttgaatacatggactaaaaactcatctcttttgcaggatcaacgaggaattccgggacattaacctcacagatctgcgcgtcatcgcaacccttggagttggaggcttcggtcgcgtagagctggtccaaactaatggagatagctccaggtccttcgcgctcaagcagatgaaaaagtcacagattgtggagacgcgtcagcagcaacacatcatgtccgagaaggagatcatgggcgaggccaattgccagttcatcgtgaagctgttcaagaccttcaaggacaagaagtacctgtacatgctgatggagagttgcctgggcggagagctctggacgattctacgggacaagggcaacttcgacgacagcaccacccgcttctacacggcatgtgtggtggaggcctttgattacttgcactcgcgtaacatcatctaccgcgatcttaagccggagaacctgctgctcaatgaacgaggatatgtgaagctggtggactttggctttgccaagaagctgcagacgggcaggaagacctggactttctgcggcactccagagtacgtggctcccgaggtgattctcaaccggggccacgacatcagtgcggattactggtcgctgggagtgctcatgttcgagttacttactggtgagtaaaaagaaagatctaagtaccaccgtcatataaataaccattttgtaatccttattctaggtacccctccattcacgggctcggatcccatgcgcacctacaacattatacttaagggcatcgacgccatcgaattcccaaggaatatcacccgcaatgccagcaacctgatcaagaagctctgtcgcgacaatccagccgagcgtttgggctaccagcgtgggggaatcagcgagatccaaaagcacaagtaagatccatttcaaatagtatgtgaagcagatacttattcgattattatttcccgcacagatggttcgatggcttctattggtggggcctgcagaactgcacactggaaccgcccattaagcccgccgtgaaaagcgttgtggatacaacaaactttgatgactatcctcccgatcctgagggtccgccgccagatgatgtcactggatgggacaaggacttctgaggagaatcagaacccgtttcctagacgatgctctctaaacgcttctgctgcagaaaaccaggaggatatgaaagccagggaagaaaaattgatcttaagtgcgccatatgtacgccaaagccaacagcaacagtcagcagctcgcatcgaaaagctgccacaaaaaaaaacaaagaaacgtagcagtcgcaaggtcaagggccgacacaaaagcacaatcatccatcgtcgtagctccatttgagatttatagatacgtctccgtgatgttataaccatgatgtgcaacgcaatgaatttattaacgagtttataactattattttataatgaggatatatgtgtctagttcgcttggaattgatgtaaattgtaagtaggtctgtgactctgtttcagagctctgttagccatgtgcattgtataaattcagctatttgtatctattaaatatttttaacataattattacacatcattgttaaagcatacaaatcgggttgccttatagtctgtaagagaacatttgaaagcaacatttgaccaagatcttccgtcacacatttcttaaaattctatgtggcctctctactgtctttcattagtcttagcgatcatgtctattatatttacgaataacatgcccttttaattgtcttttttaagtaaatcagctagaaattgaataaacaaattgatccgataaatttttttgtatttatacactattatcacaagaaattgtgaaagatactgctggccattgctgccctcaatgggtttcttcggttgtagtagataagatatttaatattaccaaattcacagtacacttcttaatttctttaagtgcattgtgaaatgaacactgcttttacagcatgtaaaaccgcccactcaacttgacctttttcaaggtacttcctatatgggcgcttctctgggcacacgttttctcttggcaaatagtgctgtggaaaatatgcaataaaaagaggaaacgctgaaatgcaaacgaagttggccaaaaacgaaacacaactacgtgacgaacggaagacgaattgccatgcagagaaagccgagaaaaatcagtcaaaatgctacaaaaattaaataagaacattctgtcactgacgttagtgcagatcgcaacggaaaactgaagctctgcaattggagtacgaaagtgcaactagaggatcgattggatatataatttatttcgcaacttagagagattgccgccatatgttaatgaactgaacaaaatggtttggatttcgagctgggggcaactttggctggtgttgctattggttgtgggcctatcgttgggtcttccgagcttggaaaaccagacacacgaacaaatcgaacagataataggtgagtcgtggatttattcgatacgaaactagattttaataactcttttctattctacattcagcctgcagacagccaaaggcacctggtttgtgccggggtcaccagttgcgatatgcctacaacaagaagaccggaaactgcgagagcttcatctacacgggctgtgcctccactgagaacaatttcctgaccttcgaggagtgtcgcagggattgcatgcaacgtctgcgctactgaagtcgcttttaacgatgcttaatatatatatttgttgtcacag

SEQ ID NO: 28739 - DNA, 4184 bp, DROSOPHILA
attcgtccggcaggcggcgtagcgagaaaacgtgtgtggcgcatgcgcatgcgctcggttgcgaaaagtgcacctggatttgaaattaagccacaagaataacagaaatcaaaactcccccacttcgtgtttggccatttcttcggctgtcgtatcgtgattttcaattcgccctcgtgtgtgcttaacggtattatagagcattttgcatatggcaaccgctgccagtgaattaataataaaagccacaaaccagacaattaccatgccttgcgcatatgcctttgagctatttccaacaataatgcttacataaatagcagctctggttgatgttctaaatagcaagtaaacaaaaccgcacaattttcccatgctcggtttttccgctcggctgtaattatgttgaaagagatcgggaaacgcttcgtgttaatttctttgaactgctcgcaaattcttggaataaagtgaattaaaagtgaaagtgaattctttaagcactcgcattaagtgagggaaataagcttaaaaacacccacggacttaaagagaatgagacgcagaaacggagacttggattttgctctttttctcgaattgaacgcaaagatcacttgaagaattccggcctgaaaaccgtaggcatcgccattcccagtgactcttcaaatattccgtgcgcgaaactgcagagctctttggttatgcaaaagacctccgaaaataacaaacaacaggcacaaaaacataaactaaacgctggtggagccaaagacaaacgaatcacgtcgctgcagctggtcaagtgaaatttttctttcgtaatgaaaatcaaacattatccgggcaaagccgtcgatgcgagtctctcgctggagggcagcagtgccatgggtgccctgtacgaggccaattggctgagggctgcgaatcagcccgccgctccagccacaacgggcaccaaattgagcaggcagagcagctccgccggcagcagtttcctcatcgagggcatctccgccctgagcaagtaccaaatgaccctggagaatatccggcagctggagctgcagtcgcgtgacaaacgcatagcgagcacgattaaggaactcagcggctataggccatcggcactgcagcatcatcagcagcagcagatgcataacgtttgggtggccgaggatcaggatcaggaacacgaagaactggaagatgcttcggagggaaaggagaagttggctagtatccaggaaccccctgcagttaaccactatgtcctggacccgacggagagaccaagggttcccagaccccggcaacagttctccgtgaaaccgccttccttgcgtcgctcccaaaccatgtcgcaaccgcccagttatgccaccttgagatcgcccccgaaaatcaaggaaaatcttagcaaaagttcctccgcctactccacattctcctcggctgcagaggattcccaggatcaagtagtgatctgccaacagccacagagactgatggctccgccacccagagaaccgcctccggagccacccaaaagggtatcgaaacccctgagcagatcgcaaacttcggttcagcggtacgccacggttaggatgcccaaccagaccacttcgttcagcagaagtgtggtcaggtctagggattccaccgcctcccagagacgtctcagtttggagcaggccatcgagggactcaaactggagggggagaaggctgttcgtcagaagagtccacaaatctcaccagctgccagcagtaatggcagctccaaggatctcaacggggagggtttctgtatcccacgaccgcgcctcatcgttccagtgcacacatatgcccgtcgacgcaggacgggaaatctcaaggagcaatccagcggtgggcaggaggaggaagcagagaaggatggacgcgtggaggtttcccgcgagggcaagtacctctccacattgtcgggagcgaaggtccttggcgaattggcgatcctgtacaactgccagcggacggcgaccatcaccgcgatcaccgagtgcaacctgtgggccatcgagcgccagtgctttcagaccatcatgatgcgaacgggcctgatccggcaggcggagtacagcgatttcctcaagagtgtgcccatcttcaaagacctggcggaagacacgctcatcaaaatctccgatgttttggaggagacgcactaccagcgtggcgactacatagtgcgccaaggcgcccgaggcgataccttcttcatcatatccaagggaaaagtgcgagtgacgatcaagcagcaggacacgcaggaggagaagttcattcgcatgctgggcaaaggggatttctttggagagaaggctctccagggcgatgatctgcgcacggcgaatattatttgcgagtccgccgatggcgtcagttgtctggtcatcgatcgcgagaccttcaatcagctaatttccaatctagacgagatcaagcatcgctacgacgacgagggcgccatggaacgcagaaagatcaacgaggaattccgggacattaacctcacagatctgcgcgtcatcgcaacccttggagttggaggcttcggtcgcgtagagctggtccaaactaatggagatagctccaggtccttcgcgctcaagcagatgaaaaagtcacagattgtggagacgcgtcagcagcaacacatcatgtccgagaaggagatcatgggcgaggccaattgccagttcatcgtgaagctgttcaagaccttcaaggacaagaagtacctgtacatgctgatggagagttgcctgggcggagagctctggacgattctacgggacaagggcaacttcgacgacagcaccacccgcttctacacggcatgtgtggtggaggcctttgattacttgcactcgcgtaacatcatctaccgcgatcttaagccggagaacctgctgctcaatgaacgaggatatgtgaagctggtggactttggctttgccaagaagctgcagacgggcaggaagacctggactttctgcggcactccagagtacgtggctcccgaggtgattctcaaccggggccacgacatcagtgcggattactggtcgctgggagtgctcatgttcgagttacttactggtacccctccattcacgggctcggatcccatgcgcacctacaacattatacttaagggcatcgacgccatcgaattcccaaggaatatcacccgcaatgccagcaacctgatcaagaagctctgtcgcgacaatccagccgagcgtttgggctaccagcgtgggggaatcagcgagatccaaaagcacaaatggttcgatggcttctattggtggggcctgcagaactgcacactggaaccgcccattaagcccgccgtgaaaagcgttgtggatacaacaaactttgatgactatcctcccgatcctgagggtccgccgccagatgatgtcactggatgggacaaggacttctgaggagaatcagaacccgtttcctagacgatgctctctaaacgcttctgctgcagaaaaccaggaggatatgaaagccagggaagaaaaattgatcttaagtgcgccatatgtacgccaaagccaacagcaacagtcagcagctcgcatcgaaaagctgccacaaaaaaaaacaaagaaacgtagcagtcgcaaggtcaagggccgacacaaaagcacaatcatccatcgtcgtagctccatttgagatttatagatacgtctccgtgatgttataaccatgatgtgcaacgcaatgaatttattaacgagtttataactattattttataatgaggatatatgtgtctagttcgcttggaattgatgtaaattgtaagtaggtctgtgactctgtttcagagctctgttagccatgtgcattgtataaattcagctatttgtatctattaaatatttttaacataattattacacatcattgttaaagcatacaaatcgggttgccttatagtctgtaagagaacatttgaaagcaacatttgaccaagatcttccgtcacacatttcttaaaattctatgtggcctctctactgtctttcattagtcttagcgatcatgtctattatatttacgaataacatgcccttttaattgtcttttttaagtaaatc

SEQ ID NO: 28740 - protein, 894 aa, DROSOPHILA
MKIKHYPGKAVDASLSLEGSSAMGALYEANWLRAANQPAAPATTGTKLSRQSSSAGSSFLIEGISALSKYQMTLENIRQLELQSRDKRIASTIKELSGYRPSALQHHQQQQMHNVWVAEDQDQEHEELEDASEGKEKLASIQEPPAVNHYVLDPTERPRVPRPRQQFSVKPPSLRRSQTMSQPPSYATLRSPPKIKENLSKSSSAYSTFSSAAEDSQDQVVICQQPQRLMAPPPREPPPEPPKRVSKPLSRSQTSVQRYATVRMPNQTTSFSRSVVRSRDSTASQRRLSLEQAIEGLKLEGEKAVRQKSPQISPAASSNGSSKDLNGEGFCIPRPRLIVPVHTYARRRRTGNLKEQSSGGQEEEAEKDGRVEVSREGKYLSTLSGAKVLGELAILYNCQRTATITAITECNLWAIERQCFQTIMMRTGLIRQAEYSDFLKSVPIFKDLAEDTLIKISDVLEETHYQRGDYIVRQGARGDTFFIISKGKVRVTIKQQDTQEEKFIRMLGKGDFFGEKALQGDDLRTANIICESADGVSCLVIDRETFNQLISNLDEIKHRYDDEGAMERRKINEEFRDINLTDLRVIATLGVGGFGRVELVQTNGDSSRSFALKQMKKSQIVETRQQQHIMSEKEIMGEANCQFIVKLFKTFKDKKYLYMLMESCLGGELWTILRDKGNFDDSTTRFYTACVVEAFDYLHSRNIIYRDLKPENLLLNERGYVKLVDFGFAKKLQTGRKTWTFCGTPEYVAPEVILNRGHDISADYWSLGVLMFELLTGTPPFTGSDPMRTYNIILKGIDAIEFPRNITRNASNLIKKLCRDNPAERLGYQRGGISEIQKHKWFDGFYWWGLQNCTLEPPIKPAVKSVVDTTNFDDYPPDPEGPPPDDVTGWDKDF

SEQ ID NO: 28741 - DNA, 11702 bp, DROSOPHILA
ttatagttgttaatatttttcttatttttgttttgctcgcggctcggttcttatgctgctttcggctgcgcttcgctttaggctatttatttcccagtttgctttgtgtaattatttaaaataatcaagacttatgcttctacgtatttttcataaatttatcacgcggcgcaatagagggtcggcgtgaacatggctaattagcgttatgaaacacgaaagataaattacatcgcttgggtgatgcattttcgtattatttcttaaaagtttagttagagtgagtataccttcggggccctttcattacgcatatttgttataagaactgagtaaatgtgcattagcaccttaaatcaccttaacacctcccacgtggctcattaatttagtaaaatgacctacgtttactaattgctaatttgaatttatttgtttgcatattgcttgcaataaaggagctgtatgcatgtgtgcatatgacttattttgattcgaaatagcaaaatgtgaaattcggaattattggacgagaaagtggcttacaaatttagacattattttaaataggtaattgtacaaaaaatacacgcattttatgtataagtaataataattttgaactcttatgtaagttttgcaataactcatcatcaagcccgactttaacttcttatactgccgttactttcccctcaaaaccaacatatgttattgtactttatttgtgcctcggatgaaagtcgactgcccgtaaatttggttaaatgcacttatggccaacttatatcctctttccttcttgtcgacatcgcaatgcacctcggctctctttccttctcattccttgtattcctttacccttcttttgcgcacacatactcgcacaaagccaccaagttcgagagttggtctcttgcttttttctcattaaaaactggttatgttaatcgcatgaaatggtgtatggctggccgttcttaaagatttcgtcacatcttcggattgcataataggcaaatttttgttatttgacttgatatcgtttgttttgtatacgtgcgttttttagacttcgatttgcattttgagcaagaagtcatgcgggtcaagaaactgataaaaatgtttaaggccacttgcggaattatgtgagcacttttgggcacaaaaataaaaaaaaaattctttcactttctatgcttatattaaacatacttaactccacttattcaccgctgggtgttattacctgcaaatacacatgtgcgtacatatataatataatattgtaatttaactttccggtcaaccggcacgcacttaatcgattaattcccaacaaatgcaaatttatgtactggaactgccagcattctttttgtgtccggctaattttgtttcgtccgtatatttatatttttcgactgcttttcgcgacgatttttgacacttgggacgcaggcgcagtgagagaaaaaatgcggatgaaaggggctggagggaatgttgaaaagggcgcgaactcagctgttcctttgggcttctgaggtttcagtggttgttttctgaagagagggattcagtcacgacttggtaatcagagttgccaggtggcttcaacaaatacagtcgttagtatttaaaatgaacaaacctataacgagtatctacgacgtactcagcaagtgtgagtgcgaatggaaaatttcataatttttctggaatatcgataaatattggggaataaaacgagaaaaaatttaaaaattgttcaaaagtgtgggcggaaccgattagagagttagagtgggcgtggcaaacagtttttttgacaaatcgataaaaatttaatgacttattaaattaggaaaaaatatccaaaagtttttcaaaaatgtgttcgtacacatttgatcctgatcaagaatattaatattttatatacctttcaacgaatctagtactcgtagagtaagagtatcgggtataataagcattaggcgttaacaggaactgagaatgaaatttgacatttttaatcagttatattagccataaaacagatgtccaatcatttctccggtagccaaactccgcataaacccagtttaatcagtgctattcaacaacactacgccaccaaaataaaatatttcccttttcttaatcgcttcaccacaatttatttcttgccaatttccgccataattaaacccaaaacaacaattttccatttgttctgtgccatcaaaagcgagcaggtctgcgcgcatgttttcaactttttcgagaattcaacctcgtgccctgttgaccgaaagtgaaatataagctgcactctggccaaatacgagtccgtgtccaagcttaaaacacgcagattgtgttggccaaaagaaccccgtgatagaggcagacaatcgcaaatgaatcaacaggtagccttcgcaaaaaacccgttagaaccagcacaaaggtgagtcttgaaagccaagcgccaatctgaacgttaacctattttacttcctatcagaattctggttttagcatctgacttccggttagtgtttcgtaatgaccgaaaacgaacgttttgttttgtgccatgtgttatccgatgacttggacattatgctgttcacatttcctgtgccggcgatgatggcccatttggctagaacagcctaaacctcgcttattattattaattatgatttatctgactacaataaggagcttgataattattggccaaaaatcatatagcgtcatggtcatcgattggctaccgtaaacaattttttgtgagtcttgggaatctcatatgtgtggtgctaattgcgcttcgccttctgaagtattttatatttcttggttatttgcaaatttgaaatgcttgaggggattctcgttaagaatatcgggcttttttagttcccgcgaattgcgttgcagagcttgtagaattttgtagatttggggacccaacaataccggttctattgtttgtgaaactaattttcatctgattcgttaaagtatattaaatatatatatatatagagttaattacaaaaaaaaaaattacagttacaaaattacattcgttttcagctgtagcttatacactatttgcaaatagctaacactatttaattaacaagcttatattattattctcagcttatatattcttactagaatagtcaagtgagtcataagaattaacatattaaatactatacgtcaaaaataacatgcgtttaaactgtttttcggaattttaatgtcgatttcacataaaattttaacatatgggaaaacaaatctcgatgagtctgttaaccattgatctgccacagcaaatcataattgtttcgtccaataaagtgctatttgtaaacctgaccaacaacttccgacttcatagagccacattcccaaagaaaaaagacaaatgaaaccgaaatgacattgaattttgattatattgtctctgtctttgatttcaattaacataaatgctctaaagtcttatcgtgaacgtccgtcatgcctgaaacctatgtaagatgttgtaagaaaatcgatggtatggtattgatttaatatagtaacaaatgtacgaagtaagacagacagtaagacccaatcaaagtatagtaggcggcttgaaacactcataaatttcgcctaaactttatttttaaaccggacaaggtagcctttgccaaaaatagaagaaactttatttttacttgaattagtaaataaatcacaagtaaaaaggtcaaacatccgaccaattatgaccaacgtcggttaaagttggtcagaaggtcgatccgtggagtcgttgatttgacgagagcaacctctaaaaaactccagagatactttgctgaagtgcacacgttcgaattaaacggcttggtataagttgagatagtttgcattttattgttttggtttttatgaccgctgtctgccgtttgattgtccacagaaaacccgtttcgttctagacaaattcagagattgctgctaaagccagctccactagttatgtttttcaccgaaaatagaacactctcgataggataggattctaccttctaccacaaggtctccaatcgggcttgaagccgtcttaactgtttattttagcggcttctcgcatttgtttgtttcaaattttagcacaacttgcgggagtcatttgcacaagtcaaggtcgccttctcagataaatgccagatctaacaactttgaatataatattctttaggttccattcggctcgttaaaaagaaggtaggaattattatttaaagatggaaaattttacttcgtaacgaaaatataataaaagaatggtagcttaagatacctgattgatttgtttttacattttaaaagtaacccgtcaatacacatttgaatgcactttaactaatgaacgcaagagcaaaatacttataggtgtaaaaataatatttaacgtgctaaacatttgaaatgtggctttcatttgttaaacgttgttgtttgtcatacctatgtgattatggtgtacttccttaatttcgtttttattcctaatctaaactagtaatcttgatgatatttatattacgtgaccttaaattctgtatgttcgtattaggtttttgttgccggaatgaaaaaagtacacatacttcaccttaagatttaaattgaggagtgtgatttttcaaatcacttgcagtattgttattccgagaatactttgttttattaaaactgtacatttaaatgtgttggatttatgggagaagtcaaaaaaaataattataaaaagtcgtctagacagtagaattcaaagaaatataaccagattttctagcttcgccgagttgcaaaagatattctaatattagcttaggcgccatgtttatcaatactaagtaggtatacgatttattagctttagtttgagtgttccttatatataaatttcttattgaggaaatcagtatatttatagacggagctgcagtaaattcaaaaataaagtacattagctatgcaaaacgattgcacttgtgcaactctttcgagtaccaaatgcagagaccctccgcattttccaccccacccaacccactttcccatttcccatttcccattttctcaccaaagagcagaaggcaggccaaccaactgtaaacgtaaacaacgtccactgcgcaggacagtattgaattgaatccgaatctttatccgattccgaatccggtggacagctgtgcgtcggaatcgggcgaaagctgtttgggcggcggaggaaaagcttcaagtgaacattcagtggattgcggccaatttaagcgagcggttacgcgttacctgtgcacttcccccatattttaccaggttacgtgtcaagagcagaagttacctctcaagcgtgttggctaattaagggctaaagctcaagtgctgaagtgttggagtatctaatataaattttaataaaagatcactacaaaatggcagtcattgttggccaagttctgccacaagatgagcagcaaatcacattttgaacctggccgattgctagctgagtgaaaaccacagtaacctttgctacaacaacgacaatgtcgagtggcaggtaggattctctagcccatatccattcatacaataaatacatttggcctatactcgacagccatttcgaccatatctggcagttgttatggctgatatttgtcatgtaatcaataaattgatttttgattggcatgtgtgtgggtattcttcctcgttcttggtctcctcgttttagtttttctgttgtcttctgactggtatttgctttcctttcgttcttcctctggcggcgtcgcactgactggctttttcgctgcgatttaccttggcccattcaagtgcccgaccactgtgcgtatacttgatatattcaagctgtgcatgaattctaattctatgaagatacggagacaaacagagacacaaggacataggaaaaaaatcttgtttatttagttatgtattcaaatatcattcttgggagctcaacaagttcgatacgaacggataattttacatatacaagaaacaactataaacaaacctaagtgtaccgcaaagtgtaccttgactgttttaaagcatctcattctctaagctgggtcaaagattcgttcggaaaatgtggaaaattagattcacgaaaaagtgtcccccactattatttcactcccagcttagcaaggccaaagctagaaacctgatagcccgccagcagctggccatgtaattaggataatcgagctgcttaaaatatgcacacagagtacacataattacaagcagcagaaaattggcctgggaaagggaggaaaatagaagcttcaataccaatggcgtaaggggatatccccaaaaaacaggctatgactcatggcatccgagaggaggcaaagccaccagagcctcagagcaaacaggcgcgatctcctttcaccactctttccctgtttgttcttgcactgcaaccacatataattgaaaattgcttgatgaaatgtttatttaaatgttgactgggaaaatatgtttattaatttcccattaaaattaaaatagataaaaatgatttaaaaaaatatatatttttcttaccttccttatgaaagaattttttgtgctgtaatccctcccaatgtcagtttggcgccaaaaactgtgcttgtaagcgtggttgtggttacttaaagttgtatggatttccgttcgtgtttctgtgggtgtctaaccacagaagtcatatcccgtcaaaggtgactgagtccttagttccactccgtcatgtaggcaaatgcaccttcgcaagtaaaatcagtcgaaaaagttaagtcaaaccatactcatttttgccagtatattgaagccaatggtattattatgggctttgcgaactttgatctaaaaataatgttttgcgcatgattaatcccttcaattaaaagtaagtgtgcaattaagtcttcataaatgctcagataaagttccgagtaaaaatgtcattaaaagacttccaaaaccatttagtattctgaccgcatatatatttaattatacacatcttttcgctacgattcttaagccaacataaaagtataaggaaatgagcagtctaatttgcacaattttgtattcattacgccagttcctcgcaggcaatttaatttaacttgcccccgtgcgtcctttgaattatccttgcagcctgctggacgtgctctgcagcggcagtggcgcccgtttggccctcggagcctcggtaatctcctatctgattgtctacaacgaggcttccgctcccagcctgctggttggcgttgtcttggccaccgtttatggcgcaatggcaggtgggagttaggtggaatacttgtaaatattccaaagtaagttaattctttgttccagcccgctgtaaaactagcctccgcagcctgcaaatgccgtatgtgcgggccacaaataaattcgactttagctgtttgtttctggccatctggctagatgctctggccaccgtgtgtgcctgcgctgccctggcgaggaccctcagtgcctgcttggacgccatgaccggaggtctggccaggattctcatattgggtgagtggtaacagatgcttgtaaataaagtagcacaatacattggttcaaggaataacaaaaccattagaaatacgagatacgacctaattagcaaactattatacatacatacttataagtaaagccacttcttcgaaaataattaagtaccatatggtgctctaagaaacaaacagaactgtaattattaaatatatattaatttcgtttttgtcataaaataataaacttgatgtatattatcatatcgcatatattttgttatgtatgcgtaatattttggcgtgaactgtgctggccgacctgttcaaatattatgttgcctactttcaggccgcaatgcacccgcgaatgagccgtggccggatgttcttggcgtgtcggttgtcttcctcgtcactgggatgttcatgctgggcctggaggtgggtactcctccgaatccgaagccgagtttaaatccaaatccacccacttatcgcgacactcactgcatttgcgtattcacagcactcgagggccttcagcctcatcctgactcttggcatgtttggcttgaacgccattttaagcgccgtcggctggtggcggggcgacatgttggcctggtctgcggatagctacttccagcccgatggcattagcagtgtaagtggccgtagacgttagaccccataccaactggaacttcgatagtgggtcagtgcactgtgccagtctgagctttgttttttttttttttgtttgccaagtcccatcgattttcgctgtcgtgaccgggaacatttgcgtgaccgcagctgaatccacaggatacgggcttttgattatgacacgtactgctgcgtttcgtttttgtttttttttggcctcctttcactggtattcgttcgcggaaagccgccagtcagacagcaaaaacatggaaaattttttggcgcttagtttgccggagttggtaatacttagagtattcgtaataaaagagctttgatttaaatacagcataatgtattactttttaagttattcagtccagtaatttaaaaatttgtagtgccttttatagaccaaaaaaatcatagagaaatcaaaaaatttcatagagaagtcaatttatacactagcaaccagcattggtggggaaagtctgctgctatttgcaaaattatccgtctgataactagttcaaaccaccacactcaggtcttcctgggtactgccctgctcacctactccttccccggcgattggccccaacaacttcgaggtggacgattcacggcgactctaattacgggattggtcagtacttcgctgctgctgacggccatttgtctgtcgacggtggtgcattataggtgagtctgacaatgcgataataatggaaaaagacatattgtacaactgttatcggctactgtacaaatgttttgtgaacttgtactagagatatccttaatgatgatgtatatttaaaccaatagcgtggcttgacatacatacatacattttatgtgttctttcagatctcaggaggactatgtagccgtgcccttgttcaacattctggatgaaaacggcttccataagttggttcctgcctcggcttgcatgttgcttttgacgagttcggcggcatttctggagctctttccggaactatatggtattgttgtgcgactggccacctcggagtggagaatactgtccaagcagatcagttatgagagctcggagagtggtaaccccgtgctggctgtgttcatcgccggcagcatgtgtgccatgttggccttcgcctgtccactacagcatctcagttacacattagccgctggccacatgggtggggtattcctgagggccctttacctcctatacatcccttacagacccaaatatatggcgcccagcagcgagtcttcactgtcgtacagtcgcctatccacagcaccgtttgccaagagcagcagctacagcagtgccgcaacttccagttcgagtcgcttaaagagaagtctctggaagatcggtctgcccaagcacagtaacttaaaaaagccgaagaccaagcccaggaacaaacaagagctggaaaaggagtggctgctcctgggtgaacccacctcgccctgtcctcaacgagagggcagggatgtggagtccaccattctttccgatggcgagccaccggtaagtgatttctgtgcttaattaagtttattaagggtaaatgtcaattaaaaatatatattctgacattttgcatgaagccatctgactttgagtacccagataaatttgacaaaagtgactcggacacctccaccgacattgatgccattgtggatgagtatcgtgaaaagattaaggtaagaactctccatgaatacacgtaaatatagacactacatgtaatcatcctccaactctccaggtaaccaccgccggacctttggagcgcagtgtgcgagtgcctacggtgagttcctggcgcgtgaccattttcgccattgtggtgattggattgggcattgccctatgcattgccgggctcatgatgcactgggctccggcagcgttgaccggagggattggggttcttatcgtgaccattatgatgggttttatacccaaatacacgggcagtgtgatcaacgtgagtcccgtgatctgtggaatgtcgctgctgatgggcgtgatcctattcagtggctgtgctatacattcctggccgggattgcttatctggctgatggctggactcattctggtgatcagatgcgataaatactgttgcaattgttttgagcacaccaccataatgaatgcccagctgatacctagtgtctcgggaaagagcaacatggggtcagcgtcgggatcggcatcaaatttagcgggtccctccaccagcatccggatacccagaccgcccaagggaatgggcgtagtcggcttgccacagcgcatcaacgagcacagatgacagtcggagtcctcggaggaggaaggcgaagacctgttccacgaggacttcaatgtgcgcgactttgacgaggaggatgacgaagattgctggactgattagcttgcgccttttaaaatccgtttagaaaactatttaattgctatgcggatccccaggacgatccagcttcgagccacatatgcctgaaattttctagctagctaaattgattgtcgaaatttacttatgtatttacaaatatatagctaggcgactctctgtacaactaagttcagaataaattaaatttttcaaaacgaaaatgtataatcaatcgttacatcattttacattgtaagagtttcgtagctgcatagaatgttatctgccatctaaatatataaattctcattctccatgaggtaatccaccagttccctgataggcgtcataatggtctcctcgtaaccaggttgaatctcgattaccctgagtaataactcactccgatcgcagttgaggtaatagtcaaacttctccggttcttcggatcgttatctatttgaaatactgggtgacatttttgtctgaggttcggtgagagcccaaataacaagggctgccaatcgagttctttggcactcttttctaaagttattttctgttatgagattcttgtccaaacccagacgatccaggtgatgctgtagattcttataatagtgctcgagacactcatcataaatcgcccttctgacttcagcggaggctacaatatagagtaggaataaaacatctaaggtgggagaacaatactgggtgagttgaaaatctacaatgcagcaggcattaggtaatactgaagattccttgttgaaatagtacacaatattatgatcccaagtgtctcgatgacagagtacatttcttatagtctttgagggggcgaccagttcttcagccttggttagaagattgtagagcttatcttgaataaagttctgagctttcattgttt

SEQ ID NO: 28742 - DNA, 2310 bp, DROSOPHILA
tcggattgcataataggcaaatttttgttatttgacttgatatcgtttgttttgtatacgtgcgttttttagacttcgatttgcattttgagcaagaagtcatgcgggtcaagaaactgataaaaatgtttaaggccacttgcggaattatgtgagcacttttgggcacaaaaataaaaaaaaaattctttcactttctatgcttatattaaacatacttaactccacttattcaccgctgggtgttattacctgcaaatacacatcctgctggacgtgctctgcagcggcagtggcgcccgtttggccctcggagcctcggtaatctcctatctgattgtctacaacgaggcttccgctcccagcctgctggttggcgttgtcttggccaccgtttatggcgcaatggcagcccgctgtaaaactagcctccgcagcctgcaaatgccgtatgtgcgggccacaaataaattcgactttagctgtttgtttctggccatctggctagatgctctggccaccgtgtgtgcctgcgctgccctggcgaggaccctcagtgcctgcttggacgccatgaccggaggtctggccaggattctcatattgggccgcaatgcacccgcgaatgagccgtggccggatgttcttggcgtgtcggttgtcttcctcgtcactgggatgttcatgctgggcctggagcactcgagggccttcagcctcatcctgactcttggcatgtttggcttgaacgccattttaagcgccgtcggctggtggcggggcgacatgttggcctggtctgcggatagctacttccagcccgatggcattagcagtgtcttcctgggtactgccctgctcacctactccttccccggcgattggccccaacaacttcgaggtggacgattcacggcgactctaattacgggattggtcagtacttcgctgctgctgacggccatttgtctgtcgacggtggtgcattatagatctcaggaggactatgtagccgtgcccttgttcaacattctggatgaaaacggcttccataagttggttcctgcctcggcttgcatgttgcttttgacgagttcggcggcatttctggagctctttccggaactatatggtattgttgtgcgactggccacctcggagtggagaatactgtccaagcagatcagttatgagagctcggagagtggtaaccccgtgctggctgtgttcatcgccggcagcatgtgtgccatgttggccttcgcctgtccactacagcatctcagttacacattagccgctggccacatgggtggggtattcctgagggccctttacctcctatacatcccttacagacccaaatatatggcgcccagcagcgagtcttcactgtcgtacagtcgcctatccacagcaccgtttgccaagagcagcagctacagcagtgccgcaacttccagttcgagtcgcttaaagagaagtctctggaagatcggtctgcccaagcacagtaacttaaaaaagccgaagaccaagcccaggaacaaacaagagctggaaaaggagtggctgctcctgggtgaacccacctcgccctgtcctcaacgagagggcagggatgtggagtccaccattctttccgatggcgagccaccgccatctgactttgagtacccagataaatttgacaaaagtgactcggacacctccaccgacattgatgccattgtggatgagtatcgtgaaaagattaaggtaaccaccgccggacctttggagcgcagtgtgcgagtgcctacggtgagttcctggcgcgtgaccattttcgccattgtggtgattggattgggcattgccctatgcattgccgggctcatgatgcactgggctccggcagcgttgaccggagggattggggttcttatcgtgaccattatgatgggttttatacccaaatacacgggcagtgtgatcaacgtgagtcccgtgatctgtggaatgtcgctgctgatgggcgtgatcctattcagtggctgtgctatacattcctggccgggattgcttatctggctgatggctggactcattctggtgatcagatgcgataaatactgttgcaattgttttgagcacaccaccataatgaatgcccagctgatacctagtgtctcgggaaagagcaacatggggtcagcgtcgggatcggcatcaaatttagcgggtccctccaccagcatccggatacccagaccgcccaagggaatgggcgtagtcggcttgccacagcgcatcaacgagcacagatga

SEQ ID NO: 28743 - protein, 681 aa, DROSOPHILA
ILLDVLCSGSGARLALGASVISYLIVYNEASAPSLLVGVVLATVYGAMAARCKTSLRSLQMPYVRATNKFDFSCLFLAIWLDALATVCACAALARTLSACLDAMTGGLARILILGRNAPANEPWPDVLGVSVVFLVTGMFMLGLEHSRAFSLILTLGMFGLNAILSAVGWWRGDMLAWSADSYFQPDGISSVFLGTALLTYSFPGDWPQQLRGGRFTATLITGLVSTSLLLTAICLSTVVHYRSQEDYVAVPLFNILDENGFHKLVPASACMLLLTSSAAFLELFPELYGIVVRLATSEWRILSKQISYESSESGNPVLAVFIAGSMCAMLAFACPLQHLSYTLAAGHMGGVFLRALYLLYIPYRPKYMAPSSESSLSYSRLSTAPFAKSSSYSSAATSSSSRLKRSLWKIGLPKHSNLKKPKTKPRNKQELEKEWLLLGEPTSPCPQREGRDVESTILSDGEPPPSDFEYPDKFDKSDSDTSTDIDAIVDEYREKIKVTTAGPLERSVRVPTVSSWRVTIFAIVVIGLGIALCIAGLMMHWAPAALTGGIGVLIVTIMMGFIPKYTGSVINVSPVICGMSLLMGVILFSGCAIHSWPGLLIWLMAGLILVIRCDKYCCNCFEHTTIMNAQLIPSVSGKSNMGSASGSASNLAGPSTSIRIPRPPKGMGVVGLPQRINEHR

SEQ ID NO: 28744 - DNA, 3161 bp, DROSOPHILA
gctcggtggacctgcggtgcctcttccgtatgacgggcgtttggaggagcagaagcatgcggcagcagcagcagcagcgggaacgggatgcagtggacgggcgggggaagccaggaaaacaggtgagttgagctcagctcttgttaatttatacgcaagatttgatcttattgaaagattttaaaaaagatgatcatattcaaatattataagttcttcagttgcaaagttaagggtgactaaccttttttttttatttatttatacaccatatgcatttacgtaatgtgtgtagttttgactgtaccgtttaatctttgactcattgccataaagacttctgcgtatagctgaccgataaatatagggctttattccgatttatcaatgcttcgttgaacgctttcgatttgcaccggaagttgcagtttcatggttccagaggaggttcgtcttgaagcgtcatcgatttggttgaacaactcatgaactctgttctcagcaaagaaatgagtgatatataccaaattctgcgaatcgtctgacatttttcctgtgtgcatcagttcctaaacaattagtttagttttccatcaagttctttaaaagaatattaggttcttggagagcaataggttctctagtactagtactaaaaacaaatgaaatatctcaccaattacaatatatcagtatcagatcgcttggaatatgaaatttcgattgggtgttagtttaaagtcgaaaagtttagtcaacaaatctaagttgtcgttttttgacaaaaattagcaaaatgcttacgtatgatgtatgatatatataaataatctttcattaattgcaatgatatcagaaaaaaagaaactgagcaacacgatcaatgggttctgatggtaattagttgatttaggttacaattgatacttactagtaagtggcattccattgcatccccttaattagttcccaaatgcacaaaaacttttatccgtggcgtggtcttaactatttgtatttgccaatttaaggatgttaaacgtgaatgaaaattgtaaacagttagtgtatagtacagcgacaattgacccttacgaacgtatagttgataattgattgcggataataactaatttgcacttaaatcgatctatgtataaagacaaatgtggatggtgtttattcggcggctgcgattggtatccccactattcagtttctactgcgtgtagtcggtgtcgcccttcgaatagtgtatgcaagccaacacggtgtccagcaggtacagtgcgccctcgataacgcacagcgagcccatggcaatgcccacttgacgctccgagttcacatacaggaatccctcgtcggacatgtaacccttccagtagtggagtgccactccgcccacggcgatccacatgatgcagccaaccacgttcatgatggtgtcgcacagctctctgaaaaacggaaagccattgaaaacaaacagttgtgagttgagagtgtggaattaagggcggaaaatacaagaaaaggaataagatgcgggtcaaagttcagctataatcaatatcggcattcaacataccccttatgtttggttgtgccgaaggcaaaggcaatggtgtggcatccagtgtaaatcaagaatccaaccatgacgcctgaggctacgatttccgcatcggcgctcttctcctcgtttaagttccacgtgccgccgatgcccaggaattcgccaccatcgccccaacggtacaagaagatgatcaccagattgatgatctgcgaaaaaggagcgcacaggagagcaattaaatgaggtcacaattgggaatgggaatgaatgaatcacttcttggccacgcctcgccttgccgtacaactcggcgtatgagtaacattgctaatacgccaggactgataaaacgcgcgcttatctatcagccgagttattgcgaccacaaacaggctattgctcaataggaagggaccaaagaagcccaaaacttaccagcttcagggccttgatgaaaatagagcctacagtctccacggacaccatttcgcactagatatgctgattgctcttatcgctgagctggaatttgggcaaatgctttagttcacagaggggtttctcccagtcaaggggcactcacaatcttttctgtaattttcacgcggaaactacagcgaaatgattcgttttcgtatcgttgtcgttcgtcgactaaactgaaaaatatcactgaaaggcaaccaaccaacctgtcgcgcccagttcgtcgtgtcgccaagaatttgtagcttttgcaatcagagcatacacggtcagcgataagataagatagggctcacgataacaggtgccgttcgaaatgggttactaattcgttgacggttcaacatgttcaggctccgaagcccaatgaaacccagatgcgcatgcgccagccccacccgcgtatcttatcaaaacggccttatcgcagctctgtcgccttacatcgcgatatatcaggtgctccgatttgccgctttccacagcattgttacacattattcatggcggccacaaagccacaaaacggggaaacatacccgcggctctgagagaccggaaacaattattcttgcgtcatcgatgtatttctgaaatactttcgtggtgacccattcccattcccactgataaagctcccggtggtgcatccctcgaacagattaaaaattcactgaccttgtcacgattccgatgatcgatagcccagtggattccagctactgattaaaaagtctcagacacacaaaaagtcactggaacctaatctgcatttcaattatcacaaccctagcacaataatcgtggctgtaggtggcccatgttcgagatttcgaatcaattggaagagcacaatgcaaaatgataggagcaattggggagcaaaaaagcaacttgcggttgatgtggggttcctcgatttacatattgcctatttatcacagtaaaatggtgtataaaaatacaactcttggatgaatggtgcgttttaagaacactgtgtaacatgaaaagcaaacaattttcaggtcacgaagaaaagaaagaacttagttagaaatagttacagtcccttgtttctaaattcaatgtt

SEQ ID NO: 28745 - DNA, 801 bp, DROSOPHILA
gtgccccttgactgggagaaacccctctgtgaactaaagcatttgcccaaattccagctcagcgataagagcaatcagcatatctagtgcgaaatggtgtccgtggagactgtaggctctattttcatcaaggccctgaagctgatcatcaatctggtgatcatcttcttgtaccgttggggcgatggtggcgaattcctgggcatcggcggcacgtggaacttaaacgaggagaagagcgccgatgcggaaatcgtagcctcaggcgtcatggttggattcttgatttacactggatgccacaccattgcctttgccttcggcacaaccaaacataagggagagctgtgcgacaccatcatgaacgtggttggctgcatcatgtggatcgccgtgggcggagtggcactccactactggaagggttacatgtccgacgagggattcctgtatgtgaactcggagcgtcaagtgggcattgccatgggctcgctgtgcgttatcgagggcgcactgtacctgctggacaccgtgttggcttgcatacactattcgaagggcgacaccgactacacgcagtagaaactgaatagtggggataccaatcgcagccgccgaataaacaccatccacatttgtctttatacatagatcgatttaagtgcaaattagttattatccgcaatcaattatcaactatacgttcgtaagggtcaattgtcgctgtactatacactaactgtttacaattttcattcacgtttaacatccttaaattggcaaatacaaatagttaagacc

SEQ ID NO: 28746 - protein, 162 aa, DROSOPHILA
MVSVETVGSIFIKALKLIINLVIIFLYRWGDGGEFLGIGGTWNLNEEKSADAEIVASGVMVGFLIYTGCHTIAFAFGTTKHKGELCDTIMNVVGCIMWIAVGGVALHYWKGYMSDEGFLYVNSERQVGIAMGSLCVIEGALYLLDTVLACIHYSKGDTDYTQ

SEQ ID NO: 28747 - DNA, 3829 bp, DROSOPHILA
cgctcgccatttgaacaggtggtccccgaaagctgattcacatgaagaaggagcacatgaaggaatacggtttggcgattgaacaattcaaatcaaaaatcaacgatggaaaggtttttttaatagtgaacctaaatgaagtgattaccctgaattctttcgttctgcaatattctgaaagctttcttattacagattgcgccgaatggagctcgagccctgcacacaatctgcgatacctacagccctctggtggaggatgcagtcatcttcctctcccttcgaacattcaacacaaccgccgtgaacaactccgtcaatctagccacggatactctgtacgatctgtgggaccaggagttgggggaccacgagctggatcctttaattactcgagttactgatcaggtgctccatttgagttaaactgaaagacactattcaaaatctttttacaaagcttataaagcaataaataaagagaattttgttggctctcgatgataaatatataagttaacaagtaacatcaggaaaagctgcgtgtgacgacgaacgacacacgaagctatacttcggatgctggtcggcggccgtgatttgtgcgagatagggtaatctttctttgtattacttagttctgaactgacagccgaaataaagtgatgttatcgtaagatacctgccgtgaatatcaagtcggagctacgaccctgctaccggcttattccagttggtcacttcagctatagtcaccgatcgtggccaccacctggtcctgatccgcactctgtaccacaccacagctacagaggcgacaacgaggtgactgtgttgtgggcagcaactcgccgcaacacactttagctactacgtgagcagcaacgtgccacgttgacatccccttgcaacaacggtgcaggcggaggatttcgcgggcaactaccttgccgcgtccatctttaaatcatatcttatatgtaaatatacttccatgtttcagtttagttttgatattgtagatgtatatagaaaataaaaacaattaaactacccctgtcccctccagagttctccgagaaatgtcagaaggctacaaatcatgccgaagcaccaaagcaggattaggccaataaaattatcaatgccaagtttaacaggtcctatatctaggttcgttttctcagatgccacgatgcgattttggcggtgcgcattcatgtattcggcggcgatcttccattcccagaatttgtcaaagcccgaggaatgccaagccagaatgaagtcgttgtaggcatttaagtgcggccacagtcgcggcacaaacgccaccgtaaatgcaaagtaaatatcatccaccataagtttcagccgctttagggcatcgttttctattagctcggtgttgcccaaatgaccaaactgaaggcgctcgacgacaaatcccatttgctccgtgtgcgagaaggcggatattaaattggcatcgtaaactcggtaatgctccattaaaccaagaagaactggctgcataaataagaatcttaaaaaatgtactaataaatttaattttgtagggcttacgtcggccgatcgctcgtcaatggtggtaatccaggcctgtgaagtccccgtccaaatgagcttatggtcgaagagacgttggcgagagtccgccgcttcctctaaagtgggcaaagtgaggatggccgccagaccgccactgtacacagtggtcaatataatgtcgatcatgtagctggccactaggacggttcttagagcatacgagctggtcacataattggtgctctgatttacgaaaagtttcagcgtactgatgcaaccgaagcgcagactactgatccaggaattgcctgccgcaaccgacgagtgttcccagcgacgggttataccaagagctaagctctcgagcagaaggcagagcatcacgcacatccagaggacaaactggaatggtcggagcaggagcgtccagctgattaaacggttcggagcgggcaccagacaggttactccagatcgtcccagaaaatgagtcatgtccatatactcgtacgcctcgtacctagaaagcgatggaatggtttacttttcaaaatgtttgattgattaatcaagagttttaccacaaatacatgccccctactccgtaatcgtttcgtctatcgaggatcattccaaccagaccatagcccgaggcattcaagtagatgtcaccccagtcgtatggttcagctgtggattgccttgacaataagctttagttgaatgtatttaattacctacatgtgtccacctgaatggtgcagttgtacaactcgcagaaaatgagcattagttgaatatctgttccatcaatggttacatccgtcgtgttcataaaacgatcataatataatggtggcttttcctaactcacataactggaattactgcgatatattctggtagcgaaaacttattaaaactcacataatccaatagcataaaaggcttgtagtcgaagatgcctatgactacctcgcgtcccttgaggtttcgcatcttgctggacattgcactctgggtttcccaagtagctttcgtacccttggcatcgaaacgctggagtatgtaaaactcaacaggctccgggtttttgttaaagtttcgcggaccgacaaatcggttcgttttaatttcaaaagtgcttgagttcaggtattgtgaagtaattaccaagatgttaggttgatctagcaattcaaatggtgagcatgtgtaattatttcaattcactgcacttatcctaccttggaatatataaccggacagataactatcttttttgtcctcaaactctttagtgtaaacgaacataaaacgatttcgcagagatctccaaatggagtagatgctggcgtgataaaaatatctggcgaattcgggaatctgctcctgaaatgctatgaaggtcttacatacaaaagtaaaataattaaatttattaattacaaatttaaaaaaaaaagggaataaccaaaaagtcttcaaacttaaaatttaacatcagctgctccgttatgttatcgatagcagatttattacgatataagccgcataaaaacgggaaatatcgtattatcaacttggaaacagttgaactgcaaaatagtttcaggacaatggacaaactgggattaggctgccccttctccttcctggtcggaagaccgcagagtatgagtgggggacccggtttcctggatctcaactacgactgctaccatcagatattttcatatataaatgtgctggaggaccagctaaatctgggccgggcccatccactattccaggttgtactgacggacattttgcgaacgcgccacaaaaaaatcaatgtgcggcttctgaaaaccattccggactgggagttcctgctgcagctgtgcggttccgaagtgtccaggtgcgaagtgccccatggtagctgggatgagccgtttacctacccctttctggggctcctgggacggcactgccccaaactgcgacaggcagtcatcatatttatgcacgccgttacagagtcgccgccgaaaagtggggacaggggccacatcatgcagctcctcctggagctacccagtctaaccaatctcactctgatcgatgccagatctgcacagcgtgagtacgaaaaccacgagcgcttcatattaattgtttcataccactcacacttttatcgtttaactctggtcaatattttaacttgaaaaagatattgcttaatctaaaattactttagattattttc

SEQ ID NO: 28748 - DNA, 1598 bp, DROSOPHILA
atattccaaggtaggataagtgcagtgaattgaaataattacacatgctcaccatttgaattgctagatcaacctaacatcttggtaattacttcacaatacctgaactcaagcacttttgaaattaaaacgaaccgatttgtcggtccgcgaaactttaacaaaaacccggagcctgttgagttttacatactccagcgtttcgatgccaagggtacgaaagctacttgggaaacccagagtgcaatgtccagcaagatgcgaaacctcaagggacgcgaggtagtcataggcatcttcgactacaagccttttatgctattggattatgaaaagccaccattatattatgatcgttttatgaacacgacggatgtaaccattgatggaacagatattcaactaatgctcattttctgcgagttgtacaactgcaccattcaggtggacacatctgaaccatacgactggggtgacatctacttgaatgcctcgggctatggtctggttggaatgatcctcgatagacgaaacgattacggagtagggggcatgtatttgtggtacgaggcgtacgagtatatggacatgactcattttctgggacgatctggagtaacctgtctggtgcccgctccgaaccgtttaatcagctggacgctcctgctccgaccattccagtttgtcctctggatgtgcgtgatgctctgccttctgctcgagagcttagctcttggtataacccgtcgctgggaacactcgtcggttgcggcaggcaattcctggatcagtagtctgcgcttcggttgcatcagtacgctgaaacttttcgtaaatcagagcaccaattatgtgaccagctcgtatgctctaagaaccgtcctagtggccagctacatgatcgacattatattgaccactgtgtacagtggcggtctggcggccatcctcactttgcccactttagaggaagcggcggactctcgccaacgtctcttcgaccataagctcatttggacggggacttcacaggcctggattaccaccattgacgagcgatcggccgacccagttcttcttggtttaatggagcattaccgagtttacgatgccaatttaatatccgccttctcgcacacggagcaaatgggatttgtcgtcgagcgccttcagtttggtcatttgggcaacaccgagctaatagaaaacgatgccctaaagcggctgaaacttatggtggatgatatttactttgcatttacggtggcgtttgtgccgcgactgtggccgcacttaaatgcctacaacgacttcattctggcttggcattcctcgggctttgacaaattctgggaatggaagatcgccgccgaatacatgaatgcgcaccgccaaaatcgcatcgtggcatctgagaaaacgaacctagatataggacctgttaaacttggcattgataattttattggcctaatcctgctttggtgcttcggcatgatttgtagccttctgacatttctcggagaactctggaggggacaggggtagtttaattgtttttattttctatatacatctacaatatcaaaactaaactg

SEQ ID NO: 28749 - protein, 433 aa, DROSOPHILA
MSSKMRNLKGREVVIGIFDYKPFMLLDYEKPPLYYDRFMNTTDVTIDGTDIQLMLIFCELYNCTIQVDTSEPYDWGDIYLNASGYGLVGMILDRRNDYGVGGMYLWYEAYEYMDMTHFLGRSGVTCLVPAPNRLISWTLLLRPFQFVLWMCVMLCLLLESLALGITRRWEHSSVAAGNSWISSLRFGCISTLKLFVNQSTNYVTSSYALRTVLVASYMIDIILTTVYSGGLAAILTLPTLEEAADSRQRLFDHKLIWTGTSQAWITTIDERSADPVLLGLMEHYRVYDANLISAFSHTEQMGFVVERLQFGHLGNTELIENDALKRLKLMVDDIYFAFTVAFVPRLWPHLNAYNDFILAWHSSGFDKFWEWKIAAEYMNAHRQNRIVASEKTNLDIGPVKLGIDNFIGLILLWCFGMICSLLTFLGELWRGQG

SEQ ID NO: 28750 - DNA, 7715 bp, DROSOPHILA
ttttgtcttgtcaacttgttctgataatggtgccacttagaatgtttcgacagatgactcatctggtgtagggcgtctaccagcttcccctggccgaccttcctgtccaagaactagttttacatctgaagcctctgctctctctggaagtgcatccaagccggagagagagccgacgccgactgcgcagcttggagagccgtgttttggtcgcaatggcaatcgctgccaagccagtcagtttgttgatgggcgcgtgatcggtaaatcgaagtagcggaccgtgaaggtgcagaggatattccacagagcacactgttgttgttgttgtcgctggtcgttgttgttgtcgttgtggttgttgttgctgctgtgttatcgtgtaaatttgcgcagttcagcttgaaagcagagaaaaagagagagagcgcgaaaaaataaaaaacccgctagcatcccggcactcttgttgttgttgtgattttgttttcgtctcgcgtgcagttggaaaataagaagtaatactacaaactgcactaattattttgatcaacgaacaagacgaccatatcgagtgaaaacaggcgtaaatagtttggcaaaagtaagtgagcgattaaacacatccaaagtcgcgctttaaacgttattttctgcaaagtcattagccaaaggcaggtcaagagagaaagggagagcaaaggctgtgagcgctgagtgggaggaaaatgaaactgcgagatcgaaacggctagagaagatgagggaaagagccagaaacaaagcctttgtttaattttaatggcacttgaaaaattaaaattacaaatcatcattgctctccagctctaatctctacaattgtttatctctcacgtcggagctcgcgctctctatctccggctctctcgagtgaattaaaacgaatcgacttgaaaaagttggagcccagcttttttgttgtgctattcgctgctgtctcccgtcgcgttcgtttgtgtttggcgccgtggcgctccagaaatagcggtgaattgctgtgcctgtgactgtgactgctgctcctactcctactcctccttcagcttgtaacggtatgcatgcgtgcataaaagcaaaagcaaaagtgctcaaaaagcaattacaatataactgaaattaacgtttggtgtgccagtgtgcctaatgaaatcccatgttgtgtttataacattagctttcaaaactaggacacagaaagaaacatttaagatgatctgctgaattttacgatcagatcatttgtacgattagtttttaaatgaatgattttcatttatcgagtgttatccactcaactaactatttcctagaagcgttatgttactgatgtatgtatagctctaaattttggtgtgtatttaacaagatattcacctgtttttctctgtgtacacttagagaaacagtcacgcacaatggcaaataagcacgcatagtccgcgtgtcccagcttcagcttctgctaattatgaaagttgaaaaaaaaaacaccgacgctttactttgtttgtttgtttttgttagccttgtgcaatgccttgtgttggccaaacacctgttgaatgccgcccgaaaaaagactgcaaaacggcaaagaaagtgtctggccagcatgaaaagaaaatgcccgtaaacacatggcaacataaagccataaaactaaaactgaaaacacaagtcagcaaagagagtggaaatggaggaccgaaaatggttcacaataatttcacagtcagtgcgcaggcccaattgaatttaaatttcgcttctcccccactcctccgatcccactcccccctcggccacattctcttaccgcatttgcatatctgatgtgtaagtaagtacacacagcgttgtctaatctcagtcgccggaaatctcagtaattagggcgggcagcttggcttgttcctagctaaatctttgagattactgaaacttattcatatttattgctgaggtcgcctttaggtcaccagcataaaactagctgacactgtgctgttttctgttttaaaactataaaaaatatatatttaatttactagctttttaaaaagtaaagaaacacatatttgaaattttgaccagtctggaaagatacataaaatacagaaagcctgtacatgtacaagcatgtaccatatactgaagaaacctatataaaaatgtcctcctaaaaaggtaattgcgaaatactacacaagaaaaccgtctattatctgcacaatttctgtgaagtgacagccactgagaaatagtgtcaagttgctctcgtccgctaatatcaatttagacgatatacatacggccagatctggcacgcagtctgcattcccaatgatgcgggatggatttggattgtggggcggaatctctaagtgcgataagatgcggagaattacttccgcgacttggctctgttttgttaaatatactatgtgtgtatgtgcgtagtacagcgacttgtacggagtacataaacatatgcatatctgcggtttagttgtcgacattatcttttgttcgtcgtttgaaaaatgtgtgtagttgttggggtaattgcgcacaattgccgggctacagggtgctttgagtctttgtttttggatttcgttttcgatgtttagctacgaaagccaagcgttgtgctattttcgaattttgtattttataacccgggctgtcgtcatcggcgtcgctcgccgtttttggccaatttagctttcgcttttgtgcgattgcctaacaaaacccccgttcccaattccgcaccgcacttccctcctttttggccaactccaaataaatcaaacccgtactatatacacacatgcaagcgccaaacaaagaaaaagagagccaaaaaccagcaaagcttcattaattttttgcaagatttttcttaattatgagacggcacgaaatgtgagaattgcacgaaagaaccaattcacaaaagatccgttcgtcacatcatctctgtccacaaggtgtgactttgatccggtgtgagctcagcttagcttagcgactttgttctaatttcggtttatatcttttttgtcgtttttgtggttttacttctgagaaactgttgccttattgtctttgcacaatgacgaatgtttgagtgcatttctacatccgtactccatagtctggaaaatggataaaccagtcactttactggtggtggcttcgtggtagcttcatgatttcaatattattgccttgcaaataagtatgtaacttctctgttttggtgagctcattcataatatagaaatattaaatgtgccatagggacctccttgcaattatatgtagtaaaaattgttccagagggagcaatcgagctttatgttaatttgttttaaaactcaaaagtaacattactccgatgctctctggctctttagccatctaaactacaaatatgaaagcaattaatcaaataacacacttcagtgccttttaaaaagctttgttttgcttttttgttaattttaaaaaaaggcaaaattttatttcaaggttgataattaagtgacttcctaaaatcgcgcttactttctacacgtttaagaggattaaattgagactgaatgttaattttctttgtgtattcctgcggtgtgtatagttttataaaagtgtctaggtccaagtgcaccgatctcgacagctgatgaaggcaacaaataaatcaggtttgagtctgcgatgacgcagatgggattggcattcatggatcccgatctccactccgcctagcccatcgagcagtgtagattctttgctgtccctctctccgaacacgatttgcaattagccaaaagaatacattcagattcagtttgttgtataacgataattagcagtacagcggcagctggtatttgtatgcacactgtattttatactcgagggatccgagaggaaaaacccaacacaatgccggcggcgggcaaagttcaatccgtagctcatttgccaattctaattccaatttcagctcccttaaacgcttaaaaacggcgccgaccacaacaatgccttatcagccagccaacagcggcgggacgtctggtggcagcaaggcggcagccaagatggcccagctaaagttctggaacaagcagaacagcagcaagcagcagcagcaggacaaggacaaggacgccgccgacgggggcaacaacaccagtggcggcggcactggcagcaacagcaacggggatgccaaaagcgaggccaagaacggcaagcgcaactggctgcacacgccggagcagctcatcagcggacacgcggtctatctagtcaaggtgagcaagggacaacccacctgtgacgaccgaccccgataggcggtacatggcgagaaacatggccgtcgttttcgcttctttgtggtgccgagaaaccgtccacaactcatgcaccctaagggagtaaaatgaaaacaaatatttaacagattcgacgttaacctcagattaaattgaatggcatcgccataaaactttactttagtatccctttcaatttgtagtggccttctctgcgtatacgtaatgtgtttattataggattgtttatcaatatagaatatatacgtatataactaactatttatacctacatcggtcttttagaggtttaaatattaatagtgtactatttatacgtttaatattccagattaacaaatcaataatttgctaaattaatttgaagtataagtaaaatacctcaaattccttatttcctgcaacaagcacaattaaataacttcgttttagtcgaatgcaattttcaatttttaagtcgaccgtaaaatggaacacatttttttccataggaaacatatttttgctttaataggcaattacaacgaaacagtttaaaaagtagtttaatggcatgtcattgttttcattttccagttctttggtaacctgagcgtggatcagcccaaagggattgaggtggtcaaggaggccattcggaagctgcagtttgcccagcagatgaagaaggcggaaacgggcacccaggagaagttcaagaagcttgagatcaccattagcatcaagggcgtggcaatccaggagccgcgcacccacaagatcctccaccagtttccgctgtacaacatttcgtattgtgcggacgagaagggtgtgaagaagttcttcagcttcattgccaagacggtgaagacgcaggacggcagcgatccgacgtcaaatggccatgcaaacggaaatggcgatggtagtgccaaagtcgaggagagccacgagtgctttgtcttcatttcaaacaaattggcctcggatatcacgctgaccattggccaggccttcgatttggcctacaggtgggttattaagcagttttattcaagccacatcattttactgacgccatgactgtctttaattaacagaaagtacatggatagcaccgaaaagacgaatctgagcaaggcgcagcaacagattaatcatctgcaacaaaccgtaaacgtttacaaggagcgactgcgagaagtttccgccaaattgccaaaggccgagctagatgccctgctcttcaatctgggaatcaaggatatcctggaagcgcccaccacagaaccccagaatggaatcgaggtggccagcgaagccctgagcaacggcaagctgggtaaaatgatgctcaactatttgtcgtacataaataaattccataactgcatttcagatgatgataagctgctaatcgacaccaattccaccacagcgtcgacccactcagcgtcgcccagctcgttcttgccgattgtcccgccgaggaacaatttatccagccagatcagcatcggcggcaagagcaatagccaaaagatggacgagctgctgctgaactcggattccgatagtgatttcgatccgcgagcggatgagacgcaggagatcggcggcactggtcgcagtgcgataagcaatatgttcggcttcgagccggccaatagctttggtcagcatttgttttccaacaacaatgatcacaagctgcaaaataataacagcagcttactgataacgagcaataacaacagcattaacagcagtggcttctccagcgagctgaacataacgccgccattgtgtatgtttaaagatgcatatccaagcatataggttactaatgatatgttttcttttcacagtggccccaccgccaaagattgccgctcccaggcgcctaaactcggtgacaacgggcaacggcctgaatggcaacacagatctattcggttcggatcctttcgaattgaacaatggaccgaacattttcaaggtgagttttgtcgaaactaactgctgtaagtcattattaatactttgatgtcattaaagcaaaatcagcttaaccttgacgacttctcgctggagagtttggatcccctgcgaaagtagagcggtgctaccaaggccattttcacacttcaacatgattgaaactttatgacatcccaaaagtttgtctcatcgtttatccttctatgtttctccgattcgcatgcattccaatccaattgcaattcgatttatttaatgtgtattattgtttatatattgtattgtatttattatcattgattttttgtcgattttatattgcatattatgaattctactattattataattataaatatgataataatctgaggtcaagatcaaaagaacacaagaaacaaccgcaatgcaccttgtttaaacgtatcaatttgttgctgtagttgaatagattaattgatggtcgagtaaagcgaatgaaaaaatgttaacaagtgataaatgtgaaaattgctaaacaatgctaactgaatgtgagaattttgtataaaataattataaagacataaccagaagcaaatgaatcgattactgtatagagccgaaatacgaggagaattaaagcaaaatgaacaatatttaatgttattgatgcaatatagagaaatattattattactattattattgtgtacgtaaagaataaaatgtagtgcctaaaagaaaactccgctgtttgatctttaacaaactgccgtgtttgtcatgcatccgttttatttcaaataacaacacgataactacacgtaactgccatgaatacaaatatgagttgcttccgttgctgctgcagtttgggaatgtttgcctagggctagtgatatatatcgcgatttaatatccaacaattgtttcctgaatagtcctctttgcttaacctgagtaacatttgctggagcacatccttcatgcgtcctgaagaaagtcgcagcgcttgggtgtggtggccgacaactggcgtgcgttcatatcggagctctagaagatcagagagtttggaaagcttaatggttaccctgtgtggcaataaatgaaaaccaataaactgcaaacgcgtctggatcaaatgcagtcctatgaattctttaaaaaaccatataaataacgccaacgattggaaaagttctgaaagaaatcatcagtggagagtatataagtaaagaaagaggtatttaaaaacaatagaaataaccatagacattaagttggaattaaactgttaataaaacaaatgaaagcaacagaggaaat

SEQ ID NO: 28751 - DNA, 1879 bp, DROSOPHILA
tttggcgccgtggcgctccagaaatagcggtgaattgctgtgcctgtgactgtgactgctgctcctactcctactcctccttcagcttgtaacgctcccttaaacgcttaaaaacggcgccgaccacaacaatgccttatcagccagccaacagcggcgggacgtctggtggcagcaaggcggcagccaagatggcccagctaaagttctggaacaagcagaacagcagcaagcagcagcagcaggacaaggacaaggacgccgccgacgggggcaacaacaccagtggcggcggcactggcagcaacagcaacggggatgccaaaagcgaggccaagaacggcaagcgcaactggctgcacacgccggagcagctcatcagcggacacgcggtctatctagtcaagttctttggtaacctgagcgtggatcagcccaaagggattgaggtggtcaaggaggccattcggaagctgcagtttgcccagcagatgaagaaggcggaaacgggcacccaggagaagttcaagaagcttgagatcaccattagcatcaagggcgtggcaatccaggagccgcgcacccacaagatcctccaccagtttccgctgtacaacatttcgtattgtgcggacgagaagggtgtgaagaagttcttcagcttcattgccaagacggtgaagacgcaggacggcagcgatccgacgtcaaatggccatgcaaacggaaatggcgatggtagtgccaaagtcgaggagagccacgagtgctttgtcttcatttcaaacaaattggcctcggatatcacgctgaccattggccaggccttcgatttggcctacagaaagtacatggatagcaccgaaaagacgaatctgagcaaggcgcagcaacagattaatcatctgcaacaaaccgtaaacgtttacaaggagcgactgcgagaagtttccgccaaattgccaaaggccgagctagatgccctgctcttcaatctgggaatcaaggatatcctggaagcgcccaccacagaaccccagaatggaatcgaggtggccagcgaagccctgagcaacggcaagctggatgatgataagctgctaatcgacaccaattccaccacagcgtcgacccactcagcgtcgcccagctcgttcttgccgattgtcccgccgaggaacaatttatccagccagatcagcatcggcggcaagagcaatagccaaaagatggacgagctgctgctgaactcggattccgatagtgatttcgatccgcgagcggatgagacgcaggagatcggcggcactggtcgcagtgcgataagcaatatgttcggcttcgagccggccaatagctttggtcagcatttgttttccaacaacaatgatcacaagctgcaaaataataacagcagcttactgataacgagcaataacaacagcattaacagcagtggcttctccagcgagctgaacataacgccgccattgttggccccaccgccaaagattgccgctcccaggcgcctaaactcggtgacaacgggcaacggcctgaatggcaacacagatctattcggttcggatcctttcgaattgaacaatggaccgaacattttcaagcaaaatcagcttaaccttgacgacttctcgctggagagtttggatcccctgcgaaagtagagcggtgctaccaaggccattttcacacttcaacatgattgaaactttatgacatcccaaaagtttgtctcatcgtttatccttctatgtttctccgattcgcatgcattccaatccaattgcaattcgatttatttaatgtgtattattgtttatatattgtattgtatttattatcattgattttttgtcga

SEQ ID NO: 28752 - protein, 517 aa, DROSOPHILA
MPYQPANSGGTSGGSKAAAKMAQLKFWNKQNSSKQQQQDKDKDAADGGNNTSGGGTGSNSNGDAKSEAKNGKRNWLHTPEQLISGHAVYLVKFFGNLSVDQPKGIEVVKEAIRKLQFAQQMKKAETGTQEKFKKLEITISIKGVAIQEPRTHKILHQFPLYNISYCADEKGVKKFFSFIAKTVKTQDGSDPTSNGHANGNGDGSAKVEESHECFVFISNKLASDITLTIGQAFDLAYRKYMDSTEKTNLSKAQQQINHLQQTVNVYKERLREVSAKLPKAELDALLFNLGIKDILEAPTTEPQNGIEVASEALSNGKLDDDKLLIDTNSTTASTHSASPSSFLPIVPPRNNLSSQISIGGKSNSQKMDELLLNSDSDSDFDPRADETQEIGGTGRSAISNMFGFEPANSFGQHLFSNNNDHKLQNNNSSLLITSNNNSINSSGFSSELNITPPLLAPPPKIAAPRRLNSVTTGNGLNGNTDLFGSDPFELNNGPNIFKQNQLNLDDFSLESLDPLRK

SEQ ID NO: 28753 - DNA, 21451 bp, DROSOPHILA
caggaccaaaaggaatggccagcagacaggcgacgtcagcacaattgatagcatacttctcagggcagcggcagctgaggagcagcaaaggtgagtcccttgccgagcacttggctccactgcactccttagccacaatagaatgtacccactttgaatttgtagtaaacacggaagcacacttttgaatttataaacatataattagctacaaaaaaattgcatttagttgctaagcttaccgccaagtaaaaatcataaaatttaaactttagcagttattgccaatgtatccaaaaatgtaattctcatatttatctcctacatacaatatttcaattaaataattatagtcgtctagttattgtaccttatgtgctcatgttttcgggctatataaatcgcagttttaagccaataacattttcagcaacgatttcccctagtgaattaggaaatagtaattgattttatgcgattgattcactgctgcaccagtaaaaagtatctgcctgaactaaggaagtataattaaattagttttaaactggaaagtaaccgaatcaacgtggcaagcaagcggaaaacttcatttgtagctgggaattggccacgtgggtgggcggtgttccttggttggttcgggggggagtgggaaaaaggagagctacgtgagagttacaagggcacgcacgcagacacacgggcacagcgaaaagcgaaagcagcgagagaggaaaatcggagatgacgaaaaacagcaacagcaacggcaatggcaacagcgactaagcaaaacatgggccaaaccaaaacaaaaacacacgatttgccggcaaaatgcacgtgacacatcctttggcgagcttcgtcgagtgcgatccttcgtcgagtgccgaatgcagccgattgcagccgaacgaagcagagccgaagctgcgcagaatccaacgagaggtataaaagcgagacgctcgccgcactcgtggcattcgattgtcgtcgctcgagaggataggtgcccagcttcgaaaaggataaaaccccgcaaaggactctaagtaaaagtgaaactttaaagccaaagagcacacacacatacacatacacgcgcacacgttgcatacagtttggcgcgagtgtgggttactgctggcggtacgccagtgtgtgtgtgtgagttggccaagtggatttctatttttggcccattaagaagtcaactcgtgaagtgcagtggtgttaaattcgttgctatttgaaaggactcatcgggttgcttaacaaacgaaaacaaaacaacgccgaaactctggcaatcgcaatctgatccttggacatgtggagcaggcagcgaatgcgccataagccgctttgggccctaatatccttgaccgttttgctgctggtcctggacaaaagcaatgccaacacggagcccgtcgagaccagcaccacatccgagccaggtgagtcctaattgccccgcacacacgtgggctcctccgtttgaccttcactcactggacggacgaaaagcgtaaataaattatgacgggccgcctcgaactcggtcactttattaaatggccttccacgcatccatggaaatcggacagttcacagcttccagctcccagcgattatcacacacgctcgaacaaaaaggatataaatccggagtagaaatgaattcgtaaccgggaggggaagctacagagcgcaagagcaaataactggcagcaaatgaaatatttcacggcatctgcggcacaaaggcaatcaaagcgagccgagagcccatgggcaaccttaatcccaatcagagtcaacaaacaagcaagggcatcgcgaaaacggggcactgcggaaaatatttggcaacaaatttttaggttgcttttcatattaaattataaaagacatgcttataaggtgcaaggataatggcttttattatgaatcattcaaagcaagacatcatgaagtctttaaagttagttttcaaacgcaatcacaaacattatttttcagtaagaataaagaaaaacatgattgtcatgtatgacaaatcgaaataaattttcgtatagcattcacataaatatttaaaatcattatgtatttcacaccttgtaaaataattatttaacctttatttcgagcgtattatgataatttattaggtaagaatttaatgataaatttagttatttttgatcaaatatattttcaattacatatgtatatttatacattataaattatgattactgaacattttgaacatgtgaaatcattaataaggcgcaaacttaatgcatacttttgattgttagacctttgctcctaaatctcaacgaaacttaattccgctggcagtcaccaataatttctctcagtgcactaggggaaggggagctgaaaggtagctcgggcaagcggcaattgcacgaaagtccgtaatgaagtatggcaggcaggccgtccgaggctggtaatagaaattaatagcgtcatgtgtgagttttgcgaaagggaaggaagactttggacgggggaatgggtggatgtggggtacaagggacaagggaagtgggaaaaaggatacaggggaagtgtaaagtgcccgacagcgacacgcagatgcgcataaagtaattaattcactctgcctccatcggcatcgccatcgccatcgccatccctccagtcggttgccttctaatttcccctggcaaatcgacaggaccagctgttgagctgctgagcttttggggtttcgtccttcagtcaggcaaaagtgcgtcgcacttatcttctttttttttcttttgtggcggatattgcgacttcttatttcgccttttggtgcgcagtttggcagtcagtcaggtgagaggggtgccgattcttagattttctgagatccaaacgttcgcttgacacatgtgaaagcgagggaaatttaatttacatgactcacaaatggaatccatttaatgttgacttatggcgacgaagcactagcgcacagagcactaatgaaatatgcagtagccgagtagcagctaaaaccagagctgcctttcacccatttccatgtgctgtcccataaatcctgggtccccaggatggatgatgatgttggaacgagttgggcgcacactaaaaaatatgcgtttacgataattattttcaatagtagagtagtagtaagccacatataaaagagaagctaactaaaaatatcccttcgaaacatgatataaatatttcataaaataaataggaagccaaagatagatggaacttatttcagtgcaccacacacagtgcattttgcgagcccatggtcacccatgtctttttgccacattttatgtgcttagaacaaagctgagtctgcattatgcatgcaaatggtataactgagtaacgaactgtcaaaatcgcagttaaagcaaaaaggagtcgttgggaaagggatgtagcctcggcaggaggaggaaaaccaaatgacaaaaagtcgccagcgcattatgcatttgcattcccatatatgtgagctaaaggacagagattacttgacttttcctgggctgcctcaaaaataataggaggggtaggaaatgacagggagctcccactgtgtgggaaatgggagttggaattgtaatagctgctggaaaagaagaagagaagtgcttctacccgccagggcatgaatgatttatagggcggcagctgtcgagatgccaacgattatcggccataagctagtcacaggacatttttgcaccaagagaaagaagaaaggagtctttggatgaaactattgttcactgtgcactttatgactaacagagttccgtgaacaattccattccgttaaagctgcctcattttcttctcacgagcttcacgtgaatctggttcttggtccgcagtgttagtccagtttgaaaaacaatagttttcggatcgatttctggtagaatttggaactgcttcagtagggccaccattagggttttcatctcctgcatggcaaatttttgacctacaaagaaaatgatatgtttatccaatcattccatgagagtaagcaatattacatacctatgcaattcctctgaccagcactgaatggaatatatgcgtaggtgtgacgattctgcgagttttcgggcagaaatctctccgggcgaaactcttcgggagaatcccagtactcgggattgcgatggatgtcgaagacatggacaaaaatctgggagccctttggcaagatgagaccgttgctcagctcagtttcccgcgtagtttccctacccatggcgggaacagaaggaaacaggcgcatggtttccttgataaagtattccagattcttcaatttgttcaactgcccgatgttcaagatgttaagctcatctgaaagattttatatgcttatgaaatcgtaagtttactaatttcagctcatttcaccatctatgttagcttggatctcttggtagcatttttcttgctcctcgggatataaagacatgttcattagtccaaacatgagcccaattgaggtagtatcgtagccctcaaacatcaaagtgtccacctcctcacaaattccaatgtgatcgatgaggccatccttttcggcaagaataagggtgtccagcatggcaaagcgctttttactggtaaatctaaagtaatcggtattgttatggacttatggacgactgtcaaatgccttacaattcatcttcagcggtctgagtgtttcctctgctatctatctcatcattcagctgatctctcctcttggcaataatctcgctggaaaatccgtggaccacatcgagtgcagacgcgtaatccttttcggcaaacatcttgaatagtgtatcgctccatagaagtgggttgctcatgcgacgaatgaagcattcttcgatctgacggaagttctcccggtaccgatcccccttctcggccatctcgtccagcttcacacccatggccgtctctgcagatatgtttgtggttttataattaacaaaacttttaaaacgtattgcatctcaccacaaatgctattcagggtaaatctgggaatgacttcgtttaacgagatgattgcctcatcattgcctttgaattgctctaggaacttcagactctccgttctagtaaagttcattttttttttttttgaatagttactacgttagaaatccaaactcacataaaaatttcctgaaactgatttaagatattgaaatggaatgttggggaaagcatcttgcgtcgtgcatgccatttttttcctaaaaagcgtgatagcgttgtaaaacaaatgaagcatgtgctaatccaaactcacccgtggatgtcaacagtccagttctcagaaatggatgaagaaaatcgtaaattgttcccttgtttattagatttggatcattaagcacacgttccgcactatctgcgtctataacattgtagatggccgttcccattgcatattccgcgtagcttttgcccagtttttttgcacagtcacgcgagtgttcaaaaacaccagctgattgtataataagaataacagccatgatatgatgtcattagcatagataagccagcaaagctccccccaaataacttacagtgatctttgccgtacaaatcgaagctgttggcaaatatggtactgcccttcactaatggagcaatgctctccggattctgtccattcttggttcgaatcctcttggcaaagaatccgagaatgcagtagtccctgttcagcctatagatccactgaattagaacaataaaagctcccacgagccacagaattaacatttttagagaaccgcatccgcagatttgtcttaccaaactgatcgctgagatcactagcagccggttttatgaacaaacaattccggtataaaaagcgaaactgattagattgtctcacacaatttcagttcacaagcgaatgctatgatatgagtttggttatctaggtacactgaggaatacattgtgctagtacatgcaataaatattttataaatatacaagttagctgtttattgatatgggtgtaattaagtgattcagatcttcatgagtaacatctagttagaccgaactttaacaaatgattaaataagtcacgttcgcctcacaagctttacgcgaatcttgtcttgggtgcgcagagttatacccgtatggaagacaatcttctgcggatcgatagccttcaaaaccttgaactgcttcagaaggaccaccatcagcgttttcatctcctgcatggcatactttttacctgcaaaataaaagcaatcattagaaagtcattggatagagaaaaacgtgaccttcgcttaccaatacaatttctttgtccagcactgaagggaacataagcgtacgtatgacgatcctgcacattttcgggtaggaatctctcaggacggaactcttcaggcgaatcccagtacttggcgttgcgatggatgtcaaagacatgaatggttatctgggcgccctttggcaggatcagtccattggccagttcagtctcctggacggcttcacgacccataatcggtaccgagggaaacaggcgcgtagtttccttcatgaagtactccagatacttgagcttattcaactggccaacatctaagttgctcaggtcatctgaaaacgatctcataagaggtttctttttagtgctaagtgcagtgggcttaccatctatgtgctcttgaatctcctggtaacataactcttgcttgtctgggtttagggacatgttcattagaccaaaaatgagcccaattgaggtagtatcgtagccctcaaacatcagagtgtccacctcctcacaaatcccaatgtgatcgatgaggccatccttctcagcataaattagggtgtccagcatggcgaaacgcttctttgagacaaatctagtgttacgtgtataagtatatattcaacttgcaaattatttccccaatttacgtacccatcatcatcagcggtgcttgaacttttgtccagctcatcctttagcaagtccctccttttggcaataatctcgctcgaaaatctatgaaccacatcgagtgcggaagcgaaatccttggcagcaaacatttcgaaaagcttgtcgccccataaaagtgggttactcaagcgacgaatgaagcattcttcaatctgactgaagttctcccggtatcgatcccccttctcggccatctcgtcgagcttaacacccatggcggtttctgaagatttgaaatacacaagaatttatagggtgaatctatgaacttaaggtattgacaacccaccacaaatactgtttagagtaaatcttggaataacatcgtgtaacgttatggttacctcatcttgaccctcaaattgtagcaggaacttttgactctccgttctaaaaacgaaagccattggtttcttaagataataaatagaatggaggtatcttacttaaagatctcctggaactggttcaatatgttgaaatggaatgtcggagtgagcatcttgcggcgagcatgccattttttgcctgtaaaaggagtacggtagtatgaagaatagcgccgagtgatgaatccacagtccaactcaccagtcgatgtcagcaagcccgtccttaggaatggatgtaggaagttgtagacgagccccttggttatgagattcggatgattcagcacattttccgcgctatccgcatcgataatgttgtaaatcgcctttccaaagacatattctatgtagctagtacccatttccttagcacgctcacgcgagtaattgaaaacaccagctagacagtcattacatcagccaaatggggtccagcgttcggcttttgctattactcaccgtgatctcgcccatacaagtcaagggtgttgccgaatattgtttttcccttggctatgggagcgatgatctccacaggggttccatcctttaatcgaattcttttggtgaagaaggacaggatgtggtaatccttgttggctctgtggagccagtagagcagggcacttagggccagaatcagccacaagataatcattttggcacaaccgcgttgacggaactctcgtttcacactgattgcacctatcgcagatttctatataaacagctcatactatcagccggttttgtagcaaaaattacacctaaaagctgcttgaactgattagattgcacggtggcgttcccgctgttggcgttcgactagctacgatttgtggttgaattcatctaacaaaaacaatgaatgacttgctagtttgtttgaatgaaagcttgtttcatttgaatgtgggataaccggttttattgttaacaatattcgtccaatgtatggctccaagctacgacgattagcactggagagtcagggttaattagtcatctaatatcaacaacgcacttaaatcaatttagcacttagtaagcatgaataaggaatatcctaaaatcgataaacactaaacgcaattccgcctcacaagcttgacttttattttatttttgaagcgcaaggttatgcccacttggaagacaatggacttgggatcgataacaggcagaatcttgaaatgcttgaggatgaccaccatcagggtcttcatctcctgcatggcgtacttctggcctttgtggttaaaagagatagataatacacatatgtatgagaaccgtatattttgaagacttgtactcttacctatgcagttcctttgtccagcactgaagggaatgtaggcgtaaggatgccttttcaggcagttctgaggtaggaatcgctctgggcggaattcttcgggcgattcccaatacttgggattgcgatggatgtcaaagacgtgtatattaatctgagagcgcttcggcaggattaggccattctctagttccgtttcctggagtgtctgacgacccatgatgggaatcgaaggatacaggcgcatggtttcctttataaagtagcccagataatttagtttacttagttgacttaggttcaggttgctcaggtcgtctagaacggtacgaagaataaaatttatgattctcacgattacgattgcagcgaactgatttacccagaatgtgctcctggatctcttggtagcacagttcctgttcagcggcatatagagacatattcattaggccaaagaccagaccaatggatgtggtatcgtaaccttcagccatcagcgtgtccacctcctcagaaatcccaatatcgtcgattagtccatccttttcggcgcaaatcaaggtgtccagcatggcgaagcgtttctttctaatcacgcatctggttttcgagagaggaagtttattaatgtgaataagtaatttcaaaataagctcacatatcatcgtcagccgtttgagtggctcttctattttccagctcctcttcaagtagtactctgcgttttgcgattatctctctggaaaattcgtgtaccacttttagagctgcgttgtacttgtgtcccgtgaacatgttgtatacacaatcgtcccaatagagcgggtttactatgcgcctggtaagtccttcgtcgattatgtgaaagttcgccctgtagcgatcgcccttctctgccatttcatccagtttgattcccatggcagtttctatgtaagaaatcactgattgttaaagagccactataaacattaaatctttaggtaccacaaatgctatttagggtaaatcgggatatgcggtccttcaaagaaaccacaacttcattttgtccttggaactgacttacgaacttcaagctctccgctctgaaaaaagaaaatttataaaagtttaattgattcattcataagtatgtaagcctgttcatacaataaggaaaataacacaaatgtaagacaaagatgactgcttatccaaagtccataatattgtaaaataaaaattgttacgaaaggcacttacataaagatttcttggaactggttcaatatatccaaatggaatgtcctagtgagcatactgcgtcgcgtgtgccatttcttttctgcaataaagaattttagatccagcattccatttttcagatttcgtttctcacctgtcgctgttagaacgccagttcttaggaaagggtgaagaaaattatatattacacccttcgttatcagattaggatgattcaatatgttcgctgcattatgcgcatctataacattgaagttggaaaaccccatggagtactgcagataactgtctccgctgttcttcgccaactggcgtaagtgagtaaatacctggtctacttatgcgaatagaccaaggggaaaagaagtcttataaagataagaagcccgatgtcaatgttcaccttctacgaaccagtgtcttttcctaagagatcgaagcagttggcgaacacagttcggcccttgatcatgggcactaagctgtccaatggtttgccatccttggtttgaacccttcgggcgaaaaaggccaggatattgtagtctttgtttaccttatagatccagtggatgaccacaagtatggccaccgaaatccacagaagacaaatcatcatgtgggcgaactggatcggtgggcttcgctctcagcactgttttggtcttgtttttttagttccccgctctcgatccacgcgagctttttactatcagcaacgcagagaaccggcacagaattgattagatttggatctattttataaagttagtataaatagtgtacccatgtatgaatatattttttttttttgtgtgctggtttcttcgctccgctggtcgatatttaatctcacgttcacccaataagcttttcattggtgtctaattttaatcgatacactagaatgttcacatttatttattaaagctcaatgtgctttgcaataatctttagtagtgaataatttatctctaaatcaaacacatttctcacaaccgataattgggcttataaattcaaaatctgtaatttcccagctaatttccatcgagatgcctaacaaatttacttcaaactcccaccagctgagtaacaggaatctaatagtcgaggaactgactatatttatttacggtacaaaacgtaaatcttgaattgaagtcaaatgatcattaaagtcgttttggtcgacagcgtgctaaagtcatttgcagtagtaagaaaacccgtataaaatatttttttttgcctttaatgggccatttaataactcgaaagcagagcttgtgaaaaatgccaaaaacatcatcggagtactttaatgaaatgatacccaatccacattgaatatacaagatctgaggctattttcatgaactgttcaagaccacagctatgagataattattaacttaataaacttaacttatataccataaaatgttatgtttgttagcttaactgaataaacatgaatgcagcaaaaagttctcattgcatgattgcattgcaattttactttataaaacatccagctaaaactctcgctttaggtaacattaaacttttgttaaaagtatttcatatagatggcatatttaaaaagttaacttgtatctttcaccttaatcaactgagtggcagtgtccgatgcccttagctcatttttcctttgtcattctgttgcatttgcccggactgctaattggcgattgcaattcatcaattacatggcattctgtgattttatttgccagcgccattatacatcactcgacctactttccgacaaagtgcatgacacgttacggacaaaaggaaaagtgtggaaagggcggagctgggctgggaaaactttaattccaccgtcggcgattaccgaaggccgactggagatggaaatggcggaaaacggaaaatgctgccacgactttagagctctccgctgcagctgactgaaatcctgattttgattccgattccgactctgactctgactctgtttctgctcgagttcctcatggcctccatctctcatgtaaaattgaaacttgagctgtgcgtttgggccacgaccttctgcgccgcccactccgcctcctgattacttgcctgcattccaaatgcatattggaaatttgcaatttcgatggcactcaaagtctggcgacgtcaagtggaaagttcttcccagccaggccaagttatcaaattagatcacatatgaaatatttatggcaagagtttctggcaaacttgaaattgcattacctccagtcaagccaaagtcttgggtgaattcgtttggcaaaccctcactgaggcaaactagcgattattgaatgatttattcaatggattgagacattgttgcctctgctatataatttcattacttctaaatggcaattttgtttgcctaagtgatattataatgtctattattataaataattactaacatatttactttaacaccaattaaagcccatttagcaaaatctatttacatttttctcatttataagtgataatatgcattactgttttttcccagtgttcttatttcccgctttcattatccatccgcagatgcctcgccaggctgtcgggcgccggatgtgcgcttcacgattgtcaagccggaagcgacgacggagcagccgctggccaaattcgagaccacgcagatctacctgccggaggacttcaccacggcggatgtggagttcgtggactcggtgccgcgtcaccccaacgaaaaccatgcggccgtaatcaatccgtactcgctggacctgggcgacgaccacttgcatgtgggcgatgcggccgccagtttggttggcgacgatgatctgggtgacgaggacgaggaccaccacggggacccggaggataagcgcttaaatgccaatcgcaagcagggcaaacgaaggcgcgcgggctcaggccgtcggcggaggattgagaatgaaaatggacagacaggcaggggtcgtggcagtcgatataagcggcatgccattctccatgacacggaagcctcaccggaaacggatcgctgggcgggcagcaagctggcagccgaaggggatgtgtactatgtccacatagccgatatcctgaagagccgtgagccaaatcgtgaattgaaatcgaagctgcacaagctcaaaatgaaggccagactgaacaagtgcctggcggaaggtggcaaggagaagtgcacaaggctcctcaagaagaagcccaagaagaaggtcgtcgagaaggagcagaccctgaagaaggagaagaagttccccaaagaagaacagtccaaggaaaaggtacccgagaacggacaaacaccaaaggaggacgaactggaactggaccatccggagaccgctgctgctcatcaccgccgccgcggggacagtcacgctgcagagctcgaccagcgtgaccggagcccgcgatggcgccgccggcgcagcaccgagttcaagggcgatctcggccagctgccaccggagtccggaatcgggccggagccggaaccgctagcggatcaggatctaaaggatcttcagcagtacggaaatcagtcgagcagtgcacgagtggccctgttgtggcaacgtgttaagcgcaagtccggcaagaccacgggtgcactgagccgtccgaagggtggtggcgactccagctccaagaccaccagtcgcaaggacaagggtgagtgtgcgcccgcacggcggccagacactggcaatgccacagtgcccaatgcctttgaagccttgatttgccgtcgctgtcgctgtctcgttgtctgtctgtccgtccgtgtcgcgctgtccgatctcgcagagatctcacggagggcggaatcatccgctcggaaatcccttgcaaaggttgaagggtcgccgaatggcagtacaagtccaggagtggtccgttacaagaacacgcctgttaactgttggttaacaaaataaaaaccatctttaactttcaaatcttttgacgatttaaatatgcttcaaatgactaatattttccagagcttggtgttaatataatattaatattttaaaatataccatcaggatgtaaatggttttatctatacaataatttttaaattacgcatacgcacagttgaatagttataccttttaaatgcaaaattaagtatacgaccagttagccagccattgaagagtgaaacccatgccagctacgactcccaagcggctggccagcagcctaggcgccgcctcatcatgccctcgagctttataatgtggcaacattttgacaatgtctagcagcgagtattgaaacgcttttgcaagggcatttcagccaacagcagcacacatgagtacacacgaacacccaaacattaacggaagttgagagcggatgacacaccgaacatactcgtaaaagctaatcgcagtcacagccaaagccacagccatcgcatctaacaatagcatcctatccagccatggctcatccccctatcaaaatcacaccttcacccaacacccaaaacgccaccaaaagcccacctgttctggcattttccaccctctccgacggcttttcattaccccatttccgccatcggtgctgcgtggtcatggtttatttgccagtccatatctttgtcatggttagagttcagagttgagagttgtccgctgccggttggccgtttggccctttgttctggccggaatgattttccttttggctcctttgtttgccttgggcttcagctggggctcctttgtccgagtccttctcggcatcctttactgctttattcatctttttttttctattttctattagccagcataatattatctttggtgttatctctgccttttcacatctcccttattttagtgccgtcttttgatggggtttctgggaaatgaagttgtatcctgttaagtggccacttcgccagccttctggttttcttttaatgcatatctaagcacttggagcggcccattgaagttttcagctggcagcacttttcgcacgtctcgtggtttctcgatggcttctccttggcttaatgtgtgtgcccaaggggcgtacttgaggattttgcagcctctttcgcacttttggcgcaacttggagtcgagttttgggtcaacttggatgggcattaagatcgctcattgtccaccggcacttcattagcatactcatcttcatctacatctgcatctgcatcagcatcttcatctgcatttcattcgcatgccgttcaacggctcattagatgcttgctctatttgctctatccccctctgaacgtctatctaccccctcccctgtttcttggcatggtacattgcccatctcacgacgcccacaccttctgctcttctcgtcccgcctcgaatatccaggtatctacgacgaggaggctggctacacgcccatccatccagatgacccggagttcgacgaggaggaggaggaggacgaggaggtcgacatcctgcagcagttcaccgaagtgtcggagattcgcttcccgggcgaaatcggacccatgggcgatcggcggctatgcaagatccgttgcgtcaagggcaagtgggtgggtccgttgtgcgccaccaacgaggagggtaagtgaactactcccgcctgcaacaactcacgcccacgacaatgcaccatcaaatattgaagtattgacatacacacaaatacttagttgcagttgcagatacatagctccaattacagatacacttaagccacacaaacagttgcgaattcatttatttacatacgtgcgcaaataaagactacacaatcagtacacaagcgaatacagcacacaatcagattgttgtttcatttaaacccaattaatattctcgccaattaaagttacgcggcgaaatggaaacgtacgtcgatattttatgcacttaaattttctatcataacaatattccactcatcattcggattttgaatcgctatatctaacctgtaaaagataaattcatgctaaactttgcactttacagcaaagttgacataaaatcaaacataaattatatttatgtatttattacgaatcttcaattttatatcttcagttatatatacgagtttcttaagtttggaccccaaaaaacactttttcagattcttagattcttaagttgttgtagattaatcataaaaacacgccacactctaaacatattggctaagaatctgtacaagtaaacatttggtatgatatctcttatccgtgcggctctgcaatctctagacgataatgggaatgtgaagtttcagccgctctacaagagctgtcacgtaaaccggataccatcgcacttgctgctcagctaccgcaacatttcagtggtaagtggttagaggtcgaaggttctcggatccttgggtcagctggctgccgcactaccaccaccacaaccaccaccacaaccaccaccaccaccactacagcacaagaacacctacatgcaacgcacacgcacacaccggtacacccagaactcgtacatgcatacgtttttagatttccggagattgcccgcgttcatgtctttaactctaactggactgcttttgcgagaggatctcagctcagctcagctccgatctcaatttcgatttcgatatcgaattcgatctcgactccgaccttgatctactatctctctctctctctctcactctctctgcctgcgcctctgcttgtctctgtctactcgcacctgtctatcgctctattctcatatctcagcctgaaaatctcacctaagaattcttaatatcgtaatactcgtatcgcaatttcgcaatatctcaagaccagcgaccaagccatctgcatgggtgaaatacaaacgaaaacgattctctacagtatgtgtgttttttggtactctctgattctctctcttgcagacaccgatcccaccaaatcgcggctggcgtaaaacgcgattatccaaatcgacacttctctcaaatacagaaattgtgagtcgtcgtagtagctgtgtagtattgtgtagaattgcacccaaaagaaacccacaggcaaagcaccgacacacacagaaacacccaaaagataccacccacaaacacccaccactagcagggagctaacagataaaagatacagttcacaagatacaacatagtacaagttgaacgtaacaagtttcaacataccagatacagatacccacactcagatactcgcacacggagaatgttaaatgcgaggactgcacgccagagcaaccagcgccactttcccagttcgcgggaacgtctgattatttgataactttctccactttctctctctctctcttcctctttctctcggtgctatctctccccccatcccgacctccaaaatacctgcaaaataaatgcaccctttcgcttttcctcaccgcttgcttgcgttttgctccttctgcagaatgtgggatgggatctgccgcacggacactctctgcaggcacgctgccaggagctgggcatctacaagctcctgggagagtcgagggtcctctgctccaacggcctgtgggcaccgcggatgcccagctgcgtccccaccacggtgctgaccaactactcggaggacagcgccccatcgatccgcatcaagatcttcaatggctcccactcctttgagccatccggcgtcatggccgttccgccgcacagcacagtgctcatggactgcatgtatccgagggttaggggcactccggaatggagctggaccagctggtacatgcagtattctacaggtaagccgacctcctactgttgtacttaaagagagtgacttctaggaaaaagagcgagagaaaacgctttaatcgtgttttgagtaccgagtctaaaaacactaacgagaaaatatggtccttcaactgcttgataactataatactccgattagtttcagattaaaaccattgcagtgtgacatcgctctgatttttcggaaaaattacctctcccttttacaggatggtctccagcccaggaggagaaagcggtgcgctaccggctgagcatcaagaatatcgagaacaacgactccggcaccttcacctgcacctcgccgcgcggactgaccaacagcattgccgtcgtggtggccacttcgacgtgtccgcagctaacagagccgctggcgccgctcaagctgcgcctcgagggcaataagctgggccagcgggcgcactacgagtgccccgagggcttccggctcgacggcgcctggaacgccacctgcctggcctccggcaattggtcatcgccgacgccgacctgccatgccattcagtgtccacgtctggagctggacgacccgcacctcagcctgatcgagctgaacacctcggcatgggggcgggcggtgttcaaatgccagtggggcttcaagctgaccggaccggcgcagctggactgtgagccgtcgggcgtctggagtggccccgttccgcgttgcaaaggtgagcgatgcactcgaaactttcttgataaggaagtatgtaactatcttagtaactttcgttagggggccttataaactggctaaatataagcttatattttatgggtactataaatttgccatctgcaaatcacttaatcccccatacagctgtctaaaagtatgcaatgaagaatctcgtttttgtattgcccacttttcgacaccttttaaagttgctcccaattctcctggcatatctgtgcttttctgttactaactttcgaataacctctgttgctggtgcacccctctgctgaccgctgccccccccccgcagtcattcagtgcgtgatgccagtggcgccgctcaacgggcgcatcgggggcaccagcctgagccagaggcgcctcaccgtgggcgccctggtcacgtttagctgcaacgacgggcacagcctggtgggcgagtcgagcatcatctgcacggagaacggacagtggtcgcactcgccgccattttgtaagtagactcgctactcactcacacactcactgacatagacacgtatatgtatatgcgtgcgctgcgagagattgccggcgcaccgcaccgctccaccgttccaccgatcctcctcctcctcgtgggcccgctcacagatcaacccaattaatgactcttgtgttgtatttccgccgaacaaacgaccgatttcgataccgatcacgaatcatcattaacatacctgatacctgaaacctgaaaccacctgatacaatccgtacacgcacgcatgacatgcccactgaccatccacgatctcaggcaaatcgcagtgcccctatcccggcgatccgcccaacgggctgatagcgccgctcaagttcaactacgacgccggagactacctgagcgtccagtgccggcccggatttgtccagagttacgagggtccacccgagcggcccaaatgccagccggatggccggtggtccggtccgatgccgaagtgcaagagctacgaggaggtgtaacctccaggaccaccagagattgaagccaagggccaaggattcgccgccaagtcagcattacgggtcctccatctgagcggatgctgtaattccgaatgcagatcgaaaccgagtgatatttagattaacttagtgagaggtatcaaaattaatagatattttatcagataggttcaattcaaatcattgtctttctgtggcccacgaatctttcaagaactctccttttgaaactatgtatgtatgtactctaaacagatcaagttgatcttgcacactctacagatatttgttcttcagattgaataaactttgcgcttgcatttcattacgaagtatccttgtactaacactaactatttaatgaaatatataatcaacatctgcgtacaggtatttatgtattacgtattctggttgcaactaaaagttacataaatgtaaatgtttaaacgaaagcaagcgaaaatcttacccacagtgcgaataaaaaccaagaaaaagcatatagatatattatatatatatatacagattaacgattctattccaccatataaatgtattacactgacagaaatgcggattgcagcagcagttgttggacgagtgttgattagttaggagctaagaaatgccaagctaagtggccctttaaagtcatatccataaacgattccttgagaggcagaggagcacacatatgtaggtattgcatagtgtattgtaggcagctgcaatctttgtgtaaagtaaagaccgttttaaataaaatacgatattgtgtaaaatgcaattctcggccttaaactctcttttgcctgttggctgtgggacttctctgaagatgtaatgtatccgttagctccgcgaaagtgtgccaaggaaatccatgtgcacgtgtttctctttcgcctaagccagctgctaatgcgagcacacaggagtaacatcccctgcagcaacaacacatacagttgcagcatccacagcagcagcagcacctactgcagcagcatctacggcagtaacatctacaccagcaaccaaagcaacttcataagcgtgagctgcactggaaaaaaagctttgtaagcctgtgaagtgtattgcaacttagaatgtttaatcttctatcttcattttccaattcatttttgttttggatttcatgtgaccttttatatgaaaaaaaaccaagtgtgacaatgtaatctaaagtccgacctcaattaggaaattatccataaccctagattaagtttacattacacgaatctaaattatttggattatgctttaaaatgctgaaatcactttagttttgtcctgtgcacttcaccatttccgaacagctgaatggcagggaaccaaacggaagtgaaattcatttaaaagttgagaggggcttggaaatttagttggtaatcttcccaaggtttccccttcatatgcgcgcgtgtggcatacagtttgccagcggagcccgcaatgtgcacctggaaaattaatttgttttgttgctttgcacctcggaacgattgaggcttcatttcccgccgccagctcattttccacacatggccacagaaacgccattgtcgtttattctcagccacgccttcgctcatttaatggcaatttggttgtggatatggatgtgggatgtgagggcgaatcgatgtctggatgtctgtgtgctgtgtggcctggtgctcctgatgggaaaaggtgtccaaattgaggcgccccgttgtcacagcagcagcaacttgtgtgcgctgctatgtgcgtaa

SEQ ID NO: 28754 - DNA, 3937 bp, DROSOPHILA
cgtcgctcgagaggataggtgcccagcttcgaaaaggataaaaccccgcaaaggactctaagtaaaagtgaaactttaaagccaaagagcacacacacatacacatacacgcgcacacgttgcatacagtttggcgcgagtgtgggttactgctggcggtacgccagtgtgtgtgtgtgagttggccaagtggatttctatttttggcccattaagaagtcaactcgtgaagtgcagtggtgttaaattcgttgctatttgaaaggactcatcgggttgcttaacaaacgaaaacaaaacaacgccgaaactctggcaatcgcaatctgatccttggacatgtggagcaggcagcgaatgcgccataagccgctttgggccctaatatccttgaccgttttgctgctggtcctggacaaaagcaatgccaacacggagcccgtcgagaccagcaccacatccgagccagatgcctcgccaggctgtcgggcgccggatgtgcgcttcacgattgtcaagccggaagcgacgacggagcagccgctggccaaattcgagaccacgcagatctacctgccggaggacttcaccacggcggatgtggagttcgtggactcggtgccgcgtcaccccaacgaaaaccatgcggccgtaatcaatccgtactcgctggacctgggcgacgaccacttgcatgtgggcgatgcggccgccagtttggttggcgacgatgatctgggtgacgaggacgaggaccaccacggggacccggaggataagcgcttaaatgccaatcgcaagcagggcaaacgaaggcgcgcgggctcaggccgtcggcggaggattgagaatgaaaatggacagacaggcaggggtcgtggcagtcgatataagcggcatgccattctccatgacacggaagcctcaccggaaacggatcgctgggcgggcagcaagctggcagccgaaggggatgtgtactatgtccacatagccgatatcctgaagagccgtgagccaaatcgtgaattgaaatcgaagctgcacaagctcaaaatgaaggccagactgaacaagtgcctggcggaaggtggcaaggagaagtgcacaaggctcctcaagaagaagcccaagaagaaggtcgtcgagaaggagcagaccctgaagaaggagaagaagttccccaaagaagaacagtccaaggaaaaggtacccgagaacggacaaacaccaaaggaggacgaactggaactggaccatccggagaccgctgctgctcatcaccgccgccgcggggacagtcacgctgcagagctcgaccagcgtgaccggagcccgcgatggcgccgccggcgcagcaccgagttcaagggcgatctcggccagctgccaccggagtccggaatcgggccggagccggaaccgctagcggatcaggatctaaaggatcttcagcagtacggaaatcagtcgagcagtgcacgagtggccctgttgtggcaacgtgttaagcgcaagtccggcaagaccacgggtgcactgagccgtccgaagggtggtggcgactccagctccaagaccaccagtcgcaaggacaagggtatctacgacgaggaggctggctacacgcccatccatccagatgacccggagttcgacgaggaggaggaggaggacgaggaggtcgacatcctgcagcagttcaccgaagtgtcggagattcgcttcccgggcgaaatcggacccatgggcgatcggcggctatgcaagatccgttgcgtcaagggcaagtgggtgggtccgttgtgcgccaccaacgaggaggacgataatgggaatgtgaagtttcagccgctctacaagagctgtcacgtaaaccggataccatcgcacttgctgctcagctaccgcaacatttcagtgaatgtgggatgggatctgccgcacggacactctctgcaggcacgctgccaggagctgggcatctacaagctcctgggagagtcgagggtcctctgctccaacggcctgtgggcaccgcggatgcccagctgcgtccccaccacggtgctgaccaactactcggaggacagcgccccatcgatccgcatcaagatcttcaatggctcccactcctttgagccatccggcgtcatggccgttccgccgcacagcacagtgctcatggactgcatgtatccgagggttaggggcactccggaatggagctggaccagctggtacatgcagtattctacaggatggtctccagcccaggaggagaaagcggtgcgctaccggctgagcatcaagaatatcgagaacaacgactccggcaccttcacctgcacctcgccgcgcggactgaccaacagcattgccgtcgtggtggccacttcgacgtgtccgcagctaacagagccgctggcgccgctcaagctgcgcctcgagggcaataagctgggccagcgggcgcactacgagtgccccgagggcttccggctcgacggcgcctggaacgccacctgcctggcctccggcaattggtcatcgccgacgccgacctgccatgccattcagtgtccacgtctggagctggacgacccgcacctcagcctgatcgagctgaacacctcggcatgggggcgggcggtgttcaaatgccagtggggcttcaagctgaccggaccggcgcagctggactgtgagccgtcgggcgtctggagtggccccgttccgcgttgcaaagtcattcagtgcgtgatgccagtggcgccgctcaacgggcgcatcgggggcaccagcctgagccagaggcgcctcaccgtgggcgccctggtcacgtttagctgcaacgacgggcacagcctggtgggcgagtcgagcatcatctgcacggagaacggacagtggtcgcactcgccgccattttgcaaatcgcagtgcccctatcccggcgatccgcccaacgggctgatagcgccgctcaagttcaactacgacgccggagactacctgagcgtccagtgccggcccggatttgtccagagttacgagggtccacccgagcggcccaaatgccagccggatggccggtggtccggtccgatgccgaagtgcaagagctacgaggaggtgtaacctccaggaccaccagagattgaagccaagggccaaggattcgccgccaagtcagcattacgggtcctccatctgagcggatgctgtaattccgaatgcagatcgaaaccgagtgatatttagattaacttagtgagaggtatcaaaattaatagatattttatcagataggttcaattcaaatcattgtctttctgtggcccacgaatctttcaagaactctccttttgaaactatgtatgtatgtactctaaacagatcaagttgatcttgcacactctacagatatttgttcttcagattgaataaactttgcgcttgcatttcattacgaagtatccttgtactaacactaactatttaatgaaatatataatcaacatctgcgtacaggtatttatgtattacgtattctggttgcaactaaaagttacataaatgtaaatgtttaaacgaaagcaagcgaaaatcttacccacagtgcgaataaaaaccaagaaaaagcatatagatatattatatatatatatacagattaacgattctattccaccatataaatgtattacactgacagaaatgcggattgcagcagcagttgttggacgagtgttgattagttaggagctaagaaatgccaagctaagtggccctttaaagtcatatccataaacgattccttgagaggcagaggagcacacatatgtaggtattgcatagtgtattgtaggcagctgcaatctttgtgtaaagtaaagaccgttttaaataaaatacgatattgtgtaaaatgcaa

SEQ ID NO: 28755 - protein, 933 aa, DROSOPHILA
MWSRQRMRHKPLWALISLTVLLLVLDKSNANTEPVETSTTSEPDASPGCRAPDVRFTIVKPEATTEQPLAKFETTQIYLPEDFTTADVEFVDSVPRHPNENHAAVINPYSLDLGDDHLHVGDAAASLVGDDDLGDEDEDHHGDPEDKRLNANRKQGKRRRAGSGRRRRIENENGQTGRGRGSRYKRHAILHDTEASPETDRWAGSKLAAEGDVYYVHIADILKSREPNRELKSKLHKLKMKARLNKCLAEGGKEKCTRLLKKKPKKKVVEKEQTLKKEKKFPKEEQSKEKVPENGQTPKEDELELDHPETAAAHHRRRGDSHAAELDQRDRSPRWRRRRSTEFKGDLGQLPPESGIGPEPEPLADQDLKDLQQYGNQSSSARVALLWQRVKRKSGKTTGALSRPKGGGDSSSKTTSRKDKGIYDEEAGYTPIHPDDPEFDEEEEEDEEVDILQQFTEVSEIRFPGEIGPMGDRRLCKIRCVKGKWVGPLCATNEEDDNGNVKFQPLYKSCHVNRIPSHLLLSYRNISVNVGWDLPHGHSLQARCQELGIYKLLGESRVLCSNGLWAPRMPSCVPTTVLTNYSEDSAPSIRIKIFNGSHSFEPSGVMAVPPHSTVLMDCMYPRVRGTPEWSWTSWYMQYSTGWSPAQEEKAVRYRLSIKNIENNDSGTFTCTSPRGLTNSIAVVVATSTCPQLTEPLAPLKLRLEGNKLGQRAHYECPEGFRLDGAWNATCLASGNWSSPTPTCHAIQCPRLELDDPHLSLIELNTSAWGRAVFKCQWGFKLTGPAQLDCEPSGVWSGPVPRCKVIQCVMPVAPLNGRIGGTSLSQRRLTVGALVTFSCNDGHSLVGESSIICTENGQWSHSPPFCKSQCPYPGDPPNGLIAPLKFNYDAGDYLSVQCRPGFVQSYEGPPERPKCQPDGRWSGPMPKCKSYEEV

SEQ ID NO: 28756 - DNA, 21451 bp, DROSOPHILA; identical to SEQ ID NO: 28753

SEQ ID NO: 28757 - DNA, 4243 bp, DROSOPHILA
cgtcgctcgagaggataggtgcccagcttcgaaaaggataaaaccccgcaaaggactctaagtaaaagtgaaactttaaagccaaagagcacacacacatacacatacacgcgcacacgttgcatacagtttggcgcgagtgtgggttactgctggcggtacgccagtgtgtgtgtgtgagttggccaagtggatttctatttttggcccattaagaagtcaactcgtgaagtgcagtggtgttaaattcgttgctatttgaaaggactcatcgggttgcttaacaaacgaaaacaaaacaacgccgaaactctggcaatcgcaatctgatccttggacatgtggagcaggcagcgaatgcgccataagccgctttgggccctaatatccttgaccgttttgctgctggtcctggacaaaagcaatgccaacacggagcccgtcgagaccagcaccacatccgagccagatgcctcgccaggctgtcgggcgccggatgtgcgcttcacgattgtcaagccggaagcgacgacggagcagccgctggccaaattcgagaccacgcagatctacctgccggaggacttcaccacggcggatgtggagttcgtggactcggtgccgcgtcaccccaacgaaaaccatgcggccgtaatcaatccgtactcgctggacctgggcgacgaccacttgcatgtgggcgatgcggccgccagtttggttggcgacgatgatctgggtgacgaggacgaggaccaccacggggacccggaggataagcgcttaaatgccaatcgcaagcagggcaaacgaaggcgcgcgggctcaggccgtcggcggaggattgagaatgaaaatggacagacaggcaggggtcgtggcagtcgatataagcggcatgccattctccatgacacggaagcctcaccggaaacggatcgctgggcgggcagcaagctggcagccgaaggggatgtgtactatgtccacatagccgatatcctgaagagccgtgagccaaatcgtgaattgaaatcgaagctgcacaagctcaaaatgaaggccagactgaacaagtgcctggcggaaggtggcaaggagaagtgcacaaggctcctcaagaagaagcccaagaagaaggtcgtcgagaaggagcagaccctgaagaaggagaagaagttccccaaagaagaacagtccaaggaaaaggtacccgagaacggacaaacaccaaaggaggacgaactggaactggaccatccggagaccgctgctgctcatcaccgccgccgcggggacagtcacgctgcagagctcgaccagcgtgaccggagcccgcgatggcgccgccggcgcagcaccgagttcaagggcgatctcggccagctgccaccggagtccggaatcgggccggagccggaaccgctagcggatcaggatctaaaggatcttcagcagtacggaaatcagtcgagcagtgcacgagtggccctgttgtggcaacgtgttaagcgcaagtccggcaagaccacgggtgcactgagccgtccgaagggtggtggcgactccagctccaagaccaccagtcgcaaggacaagggtatctacgacgaggaggctggctacacgcccatccatccagatgacccggagttcgacgaggaggaggaggaggacgaggaggtcgacatcctgcagcagttcaccgaagtgtcggagattcgcttcccgggcgaaatcggacccatgggcgatcggcggctatgcaagatccgttgcgtcaagggcaagtgggtgggtccgttgtgcgccaccaacgaggaggacgataatgggaatgtgaagtttcagccgctctacaagagctgtcacgtaaaccggataccatcgcacttgctgctcagctaccgcaacatttcagtgaatgtgggatgggatctgccgcacggacactctctgcaggcacgctgccaggagctgggcatctacaagctcctgggagagtcgagggtcctctgctccaacggcctgtgggcaccgcggatgcccagctgcgtccccaccacggtgctgaccaactactcggaggacagcgccccatcgatccgcatcaagatcttcaatggctcccactcctttgagccatccggcgtcatggccgttccgccgcacagcacagtgctcatggactgcatgtatccgagggttaggggcactccggaatggagctggaccagctggtacatgcagtattctacaggatggtctccagcccaggaggagaaagcggtgcgctaccggctgagcatcaagaatatcgagaacaacgactccggcaccttcacctgcacctcgccgcgcggactgaccaacagcattgccgtcgtggtggccacttcgacgtgtccgcagctaacagagccgctggcgccgctcaagctgcgcctcgagggcaataagctgggccagcgggcgcactacgagtgccccgagggcttccggctcgacggcgcctggaacgccacctgcctggcctccggcaattggtcatcgccgacgccgacctgccatgccattcagtgtccacgtctggagctggacgacccgcacctcagcctgatcgagctgaacacctcggcatgggggcgggcggtgttcaaatgccagtggggcttcaagctgaccggaccggcgcagctggactgtgagccgtcgggcgtctggagtggccccgttccgcgttgcaaagtcattcagtgcgtgatgccagtggcgccgctcaacgggcgcatcgggggcaccagcctgagccagaggcgcctcaccgtgggcgccctggtcacgtttagctgcaacgacgggcacagcctggtgggcgagtcgagcatcatctgcacggagaacggacagtggtcgcactcgccgccattttgtaagtagactcgctactcactcacacactcactgacatagacacgtatatgtatatgcgtgcgctgcgagagattgccggcgcaccgcaccgctccaccgttccaccgatcctcctcctcctcgtgggcccgctcacagatcaacccaattaatgactcttgtgttgtatttccgccgaacaaacgaccgatttcgataccgatcacgaatcatcattaacatacctgatacctgaaacctgaaaccacctgatacaatccgtacacgcacgcatgacatgcccactgaccatccacgatctcaggcaaatcgcagtgcccctatcccggcgatccgcccaacgggctgatagcgccgctcaagttcaactacgacgccggagactacctgagcgtccagtgccggcccggatttgtccagagttacgagggtccacccgagcggcccaaatgccagccggatggccggtggtccggtccgatgccgaagtgcaagagctacgaggaggtgtaacctccaggaccaccagagattgaagccaagggccaaggattcgccgccaagtcagcattacgggtcctccatctgagcggatgctgtaattccgaatgcagatcgaaaccgagtgatatttagattaacttagtgagaggtatcaaaattaatagatattttatcagataggttcaattcaaatcattgtctttctgtggcccacgaatctttcaagaactctccttttgaaactatgtatgtatgtactctaaacagatcaagttgatcttgcacactctacagatatttgttcttcagattgaataaactttgcgcttgcatttcattacgaagtatccttgtactaacactaactatttaatgaaatatataatcaacatctgcgtacaggtatttatgtattacgtattctggttgcaactaaaagttacataaatgtaaatgtttaaacgaaagcaagcgaaaatcttacccacagtgcgaataaaaaccaagaaaaagcatatagatatattatatatatatatacagattaacgattctattccaccatataaatgtattacactgacagaaatgcggattgcagcagcagttgttggacgagtgttgattagttaggagctaagaaatgccaagctaagtggccctttaaagtcatatccataaacgattccttgagaggcagaggagcacacatatgtaggtattgcatagtgtattgtaggcagctgcaatctttgtgtaaagtaaagaccgttttaaataaaatacgatattgtgtaaaatgcaa

SEQ ID NO: 28758 - protein, 866 aa, DROSOPHILA
MWSRQRMRHKPLWALISLTVLLLVLDKSNANTEPVETSTTSEPDASPGCRAPDVRFTIVKPEATTEQPLAKFETTQIYLPEDFTTADVEFVDSVPRHPNENHAAVINPYSLDLGDDHLHVGDAAASLVGDDDLGDEDEDHHGDPEDKRLNANRKQGKRRRAGSGRRRRIENENGQTGRGRGSRYKRHAILHDTEASPETDRWAGSKLAAEGDVYYVHIADILKSREPNRELKSKLHKLKMKARLNKCLAEGGKEKCTRLLKKKPKKKVVEKEQTLKKEKKFPKEEQSKEKVPENGQTPKEDELELDHPETAAAHHRRRGDSHAAELDQRDRSPRWRRRRSTEFKGDLGQLPPESGIGPEPEPLADQDLKDLQQYGNQSSSARVALLWQRVKRKSGKTTGALSRPKGGGDSSSKTTSRKDKGIYDEEAGYTPIHPDDPEFDEEEEEDEEVDILQQFTEVSEIRFPGEIGPMGDRRLCKIRCVKGKWVGPLCATNEEDDNGNVKFQPLYKSCHVNRIPSHLLLSYRNISVNVGWDLPHGHSLQARCQELGIYKLLGESRVLCSNGLWAPRMPSCVPTTVLTNYSEDSAPSIRIKIFNGSHSFEPSGVMAVPPHSTVLMDCMYPRVRGTPEWSWTSWYMQYSTGWSPAQEEKAVRYRLSIKNIENNDSGTFTCTSPRGLTNSIAVVVATSTCPQLTEPLAPLKLRLEGNKLGQRAHYECPEGFRLDGAWNATCLASGNWSSPTPTCHAIQCPRLELDDPHLSLIELNTSAWGRAVFKCQWGFKLTGPAQLDCEPSGVWSGPVPRCKVIQCVMPVAPLNGRIGGTSLSQRRLTVGALVTFSCNDGHSLVGESSIICTENGQWSHSPPFCK

SEQ ID NO: 28759 - DNA, 18559 bp, DROSOPHILA; identical to SEQ ID NO: 18745

SEQ ID NO: 28760 - DNA, 3795 bp, DROSOPHILA
tttaaatttaccggtaaggcgggattttttagtaccagatgtggcttatcgagaacaaacggggttaaagctccttcaccatctggtaacactggttgcaatttttaaattgttttcgatgcgtgagtagatttctgcacaagccgtggaatagaggcagttcaagtattttagcaaacgtgggtggcacgcattgagtgaaaaggcatttgctgcaatgggaaaaaatcaattgtcagcaggaaggttgattgcaaacgccagaacaacacacccacacgcaggaaggggagagccatcatcggcattcgagcaagtcgcaagtgtgtgtgtgagctatagaggcagagagagtcaaagagagagccgcggcgaaggagaaagaaaataatatcgtggcaaaagcgaaacggcgaaaaagttcagaaacaaacttaacgtgatttgagaacgttgtgcgccattccgtcacttctgcgggcgccaaactaacttaagcaaaaagttactaaaaacaacattgaaacgcagtttatgaaatacaactcactatcgtattgtgtagctgcgaactagcctctataagaaaggtgaaactacaaactgaacatctggagaggaacaactgacatcatcctattgtattattgttgcgtccattgttcgtttgttcttgccattaatcagagctgggctcttttggaggatacgcctcacacccaccattttcactaccgatcaaaaaacactcatttaattcatagatcggacaagtagagaaaaggcagcaagatgttcatcgaagacgatgcgcaaatggacagcttctgggtgcagagcgctattggcgcgatcaaggcgatcgcctttgtctacgacatcatcacccttccggtttacttggtgctgcagaagccctggaaacgccgtcaggactcgcgtcgcgtgaaggcaaagatcgtgcggaatgatgacaatgagctgacctaccggaccacggatccaccacgggatgtccacgtgaagatgctgcaagagaatatcgataccctggagaaggtattcaactatgtggccaaaacttacacgtcgaagcgttgtctgggcacccggcagatcctcagcgaggaggatgaggtgcagcagaacggtcgagtcttcaagaagtacaacctcggtgactacaagtggaagacgttcaccgaggcggagcgcacggcggctaatttcgggcgcggtctgcgagaacttggccagaaaccacgcgagaacattgtcatctttgccgaaacgcgagccgaatggatgatagctgcccacggatgctttaagcaggctatgcccattgtcactgtctatgctacgctgggcgatgatggagttgctcattgcatcaccgaaacggaagtcaccacggttatcacctcccatgatctgctgcccaagtttaagacgctgctcgacaaatgcccattggtgaagactattatctatattgaggatcagctgcaaaagacagaaaccactggcttcaaggagggcgtcaagatcttgccgtttaaccaagttgtcaagacaggacaggacagtaaatttgcctcaagggtaactccttcggttatcttttcctcgtctctttcttgcttagaggaatatgtgcgatacgcccgaaagatgagaacgccgcagtatacgccaaatagtgtaaaaaatacggagcagcttctcggctttcctgatgttgagcctaagcacgttccacccaagggagatgacattgccattatcatgtacacttccggatccactggcacacctaagggtgtcctcctctcgcacaagaactgcattgcgacaatgaagggatttgttgatatggtgcctatctatccggatgatgtactgatcggattcctgcccctggctcacgtttttgaattggttgcggaaagtgtgtgtctcatgactggcgttccaattggctactcgacccccttgactctgatcgacactagcagcaagatcaaacgcgggtgcaagggcgatgccaccgtcctgaagcccacctgcatgacttcggtgccgctgatattggatcgcatttccaagggtattaacgacaaggttaactctggctcggcgttcaagaaatcactcttcaaattcctttaccagtacaaagtcaagtgggtgcagagggggtacaagacgccgctgattgataaactggtgttcaagaaggtggcaaagctaatgggtggcaaagtgcgcattatcatgtctggcggagcgcctctgtcagcagatacacatgagcagatcaagacctgcttgtgcttggagctgattcagggctatggccttacggaaactacgtctggagccactgtcatggactaccgtgatatgacctatggacgcactggaggaccattaactgtctgcgacatccgtctagtcaactgggaagaaggcaactaccgcgtcacaaataaaccttatccccagggtgaggttctcattggtggcgagtgtgtctcccagggatactacaagttgcccggcaagaccaacgaggatttctttgaggaggatggacagagatggtttaaaaccggcgacattggcgaaatacaagctgatggcgtacttaagattattgatcgtaagaaggatctggttaagctgcaggccggcgagtatgtttcccttggcaaagttgaatctgagcttaagacttgcggaatcatcgagaacatttgcgtatacggagatccgacaaagcagtacacagtggcgctggtcgttcccaaccaaaaccatttggaggagctggcacagaaacatggcctgggtgataagtcctttgaggagctgtgctcatcaccgatcatagagaaggctattctcaaggaaattgctgagcatgcgcggaaatgtaaattgcaaaaatatgaggttcccgccgccatcacactttgtaaggaggtctggtctccggacatggggctggtaaccgccgccttcaagctgaagcgcaaggatatccaggacagatatcagcatgatattaaccgcatgtacgcctcatgaaagtcaatgtactaagccagaggtaccagatgcagcaacgacaacaacacgcaaacattaaagcagcagcaatgaagctagtgtgtactaattgtttttagtagcaccccacacagcataagcatgcatacgaaatccaaaaccaaactagcttaagtcctaaaagatctaaatgccgagcagtacatgcaggaaccgattagccacattgcgcatgtaaagacagacagaatgttctcatttgcctttttcgtttcgttttatcttatttgctagaaatcgaaaattactcgtttctcattttaataaagttcgcaaagacttgcttggcagatatgtagctgaagctgagtttggtttggaaatgcgctgtgtatgtgctaggaatgctgttcaaccgattgacaatgataatggtaatgataactgaatgccgatgatgagaaggaatattgtatactgtacagttttcggtttatagtacattgtgtggcaaatttatattgcagaaaaatacttatttttatattaagcttaagtggttgcctattaattatgtacatacgatatacacattcatataaaagcatatatgtgtaaaataaatctaatatttagtgtacttctctatgctaagttaaatgtatggaattcttgaagtaatgaaatgtagacagcagcaatgaaagcgacttgattatg

SEQ ID NO: 28761 - protein, 766 aa, DROSOPHILA; identical to SEQ ID NO: 18747

SEQ ID NO: 28762 - DNA, 5271 bp, DROSOPHILA
taacacaactaactactcgagacgacacgaataaaagacacgggacgtaagcaaagtgttttggtgtgagccaactgaaaaaaggggcagcaacaatctggccgatgggggagcacatggattcattcgggaacaggggaccctctcctacaaaacctgtctgttatgcctgcgtcctgcaacacaagaattacaagcatcagttggtggctcgcgattgatagagtatgaataatgaggtgatgcaaggcggcgaatcgaacgccgaagaatagcctctaaggtaatatgtggccgtgcgccaccggaagtgaaaccgaaaacagaaactggacgggccaatatagggaccataacagtaagagaccgcgagccgcgagatgtgcgattaatgtgtgtgggatgtgggtcctgcctacgggccggcattctggctctggccggaggacgccgtggcagctgcagcagccgcaaccgcagccagatccaacagttggaagtgcttttgatccgcgaccgcagcagccagggattccaggagggaggcatggacggctgccgtcgctggctgctcgtgctgttgctgctgcagttgctgctctgagactgtctgcttctctggcgattggcggctggcctgctgttctggggattctacgagttgcatcggcggcagcatggacgggtcacacaaaaagatcaggggaagaagagaaagagagagagagaaagaaaaaagacaaagaaatgcacaagttacttgaattagtttagttattatcatcatataaccttgggtttaggttaacacaacaacaatcggaaaagaggctctcaacaaaaaccttcactaacaaactggcatgatttattaaaattatcacttaaaataagagtacatatcgtgaaataatttagattcggtgacaacagaaaatacattgaaaatgaattaggacaaatggtggtataaaaccgaaaaatactctattaactttgcttagccgacgtttgggcgccttgagctctctggcttgggttttctgtaagaatgttctgattaagtatgggattcttgttccaaacccgaaccatttcacaatcgatcgacggaaaacataccgtgggcgcagccaaactcctaaatgaacacgcttgtaaagctcctccgctttctgaggttttttaaaaacattaccacctacaatacaagcaacgaaagcggatagagtcaatttatagcctacttagtctatacaagttttggctaggggattttacgaaatctacggaaaccttttcgatgctggactccgtagatctaacacaaaattatcatgataaatagcccttctggtcacttttttgaaacataaacatatgtttgtacatactacacgtaaaattgggttaattttaactgggtgtactcatactaaaatcaaatgatgcactaaagtcataagcggaatcggggacctaattatatttgaataacaataagtgatgatgaagtcagaatcatatgtaacatatatgtaattttcattttggacaatgtgaatactctttcgaacttttgcagttaaaattttctaatattatttaagacaattgatgcaccaaaaaaatacttttacgttaaatgatgtcctagaggtgtgccgtaaaaggtgaaccgaaacctaaatgcttgatcttgttaggatttcattcctttgtctaaattattggtgccgaagcgtggttgagtcagtgtggatgtatgtaaatgggatgtgtatggattcttataactactttaccctagggtctacaattagcaatttgtaaacataaagatttcttggctatacagagatataattctcgttactggcttattgcaaaaagggatccaacgtaccggattgctggggctgctgtgccggggtataggcacgttggccgccaccgctgccgttcgacgtggaactggcgacggcttgcttggcgggcggacgacgcttagccagcggcatgtcgtcgtctgaatcgcttaacgttaggtcaacctgttgcgcagacagaatacagtcatatgataagacagtttggtaggttgtagattggtgctctctacttacagtttcactgtttgacgttgatgtgggctgttcgtcctgtgctggggacaaatccctctttactggcttggcgtcatccgagataagttctggtaatgtccgaaaaacttgattaatgtcaaaacaatttaaaaggttgcgtgttaggcgattacctatgtcatccgatataacctcaaccttttgggcgggctttgaaggcgtatcaaggatctgcgtctcgctccgtagtcctggtgtgctccaagatccatcctgatgaagttgaatctcagtatcatcactctttagaagcgacgagcccaacacctcctggaagtagctggaaaacagagtttaatcagttacaaatatgctaaatgaaatgacatttcttacccatctatgaccaggttgtcataaatggccggcttgtcgcatacagggcagttccacgtgggcttacgctcattcatttgcaggtagagactggcatcgaagcattgcagatgcgagcaggttgatgctcgacaaggcagcaacattttcatcttgcccaacgggcagttaagggaaaccttcagcatagtggtggctatttcgcagtcagcatcctcagtcagcttctctttgactttaaaaaaatggtatttattattaagtttgcatcattggagcacagaaaactcacttaagcctcgcgtgtagtccgctggttttacgcccttcgtcttcattcgctgcaaaagctgtgttgaggtgagcttctttaccaggtatacggccagacagtagctacgagtgtagtccggacaccactgaaccgttatggtgttggtgacggtaggcgacagctttacattggacgtgacattaacgggtcgcggcggacgcttgggctccacatttggtcggtttgtaggaatgacattctgcattggaataaagagcaggatattataccaggtcctgattggataatcggataatacttacaggcagctgacagagtttgttgttcactttgacgtttacgttcggcgggaagcagtcctcctggtcgcacgaagtctccaccaggcaaaagcgcagttgaacctgaatggcgtgctccaccttggagctgttgcgaatgtcgcgattagaggcaatctcggtggcctgctgcggcgtgagcgtgaagtagaaaggcacctcttggacgcgctgagtgttgcgtggcaccagagttgaaggcttaattagcgttccgagtacatcgtagaaggctagctttttcagccgcacatcggggtgaataggcagctggctgttgatgctgtgtgtgtggaggaagggtgcgccgccgaccacattcatctggccgccgggcacttgcacaccttggccgctgcccacgaggcccacgggattgggctgcacggtgggcggcagctggatgtgcgagtacatcctggttgggtcgatgtactgcagcgtggcgttttgttcctgcacggactgggcgtagacttcctggaccttcggggcaagcagttccaagttggtgcgcaagaacgagaggatgcggctctgcaggtcagtttttcgtccagcgaatgagatgttcagaaacgacaggattttttgcagctcgaccactcgaagcatctgcaccatttgctcacattcctgaagagacggaaatggcatggcgaacaatgaaaattttgtatttcggaaaattgggaaggtgtctatgtccaaatagcgggacttagcaccaagcgtccacacgaacacacacacaagcgcgctctatatgcaaatatcgcgttttcgcacatatgtacacatgcgtatgccttgtgcggctttatgcagaaaaaatcataaattcgctctacattatatgccaagtgattgcttgacagtcggacaaaagcctggcttccacatttttcccatctgtggataatttactggtccgaaactgccgcatgccaccaaatcattacctagatgctcaaacatggcgttctcgcaaaaagtttcttttcgtggaaccgatcgggtttcagtggcttttaacgttggtatatgcagaaaatttggtaaggcttgtgttcgccactggcagccttccttctttcgcaaattgcacttaaacaaactaccgcaaaaatgcccccttttttgtcacacgaattttgttttgtccgcacggtctgaagaaatatggcggatgatagtgttgttaagcgccggcggatttggctggcaaatcactctgttcgtgggtggggaagggtacagacaccatttttttctgcggtcacactgcttatcaataaccatggcccccatatttatgaaaaattctttggactgaataaactgagactggcggaaacataccttgtacttggtggaatcaaagggattaactgctattggcgctgacgaagtcgactggtgcccggggctcgaagatgttgcggcattttccgcctgcgtgcgagccgtctgagagcgggtctttcgcatcactattattttctattcacggtggcgttaggcgttcggcaattgaagtcgcggactcgtttgcatttgcctgggacgcgcaccacacataaaaacaagcaattgccgctgtttttcaacgaatgcggagaaacaaaaatattttacgcggcgtcgtcgctgtgggccgactagagttgacactatcgatcgacactgcggaaatctctaccgcctggccgagtcttgtctcacgcagcccgaaaatgccctaacgcgtgcgtttgtttactttgttagcaaccgttactttcgtagattcctaattcgctaggcatttatttaattgtacaaatatgggtctatctatgcaagaatagtataaaaggggcccgccgcttggcgtgggcctagaaaaagtccatgtccccgcaattgacgtccagaaagtcgtggtcgtagctgattaaatccttcagcggcgctccctgagccgccgccgctgctttggatgtggagggaagttccgcattgtccacaagatttatattgatctcgtgggtcctgtactcagggctgtcgtgctcctgctcagcgccaacaggggagggtggcgggttggacactgaaatagtcaaaatagtcacataggagatttaac

SEQ ID NO: 28763 - DNA, 2172 bp, DROSOPHILA
catttttgcggtagtttgtttaagtgcaatttgcgaaagaaggaaggctgccagtggcgaacacaagccttaccaaattttctgcatataccaacgttaaaagccactgaaacccgatcggttccacgaaaagaaactttttgcgagaacgccatgtttgagcatctaggtaatgatttggtggcatgcggcagtttcggaccagtaaattatccacagatgggaaaaatgtggaagccaggcttttgtccgactgtcaagcaatcacttggcatataatgtagagcgaatttatgattttttctgcataaagccgcacaaggcatacgcatgtgtacatatgtgcgaaaacgcgatatttgcatatagagcgcgcttgtgtgtgtgttcgtgtggacgcttggtgctaagtcccgctatttggacatagacaccttcccaattttccgaaatacaaaattttcattgttcgccatgccatttccgtctcttcaggaatgtgagcaaatggtgcagatgcttcgagtggtcgagctgcaaaaaatcctgtcgtttctgaacatctcattcgctggacgaaaaactgacctgcagagccgcatcctctcgttcttgcgcaccaacttggaactgcttgccccgaaggtccaggaagtctacgcccagtccgtgcaggaacaaaacgccacgctgcagtacatcgacccaaccaggatgtactcgcacatccagctgccgcccaccgtgcagcccaatcccgtgggcctcgtgggcagcggccaaggtgtgcaagtgcccggcggccagatgaatgtggtcggcggcgcacccttcctccacacacacagcatcaacagccagctgcctattcaccccgatgtgcggctgaaaaagctagccttctacgatgtactcggaacgctaattaagccttcaactctggtgccacgcaacactcagcgcgtccaagaggtgcctttctacttcacgctcacgccgcagcaggccaccgagattgcctctaatcgcgacattcgcaacagctccaaggtggagcacgccattcaggttcaactgcgcttttgcctggtggagacttcgtgcgaccaggaggactgcttcccgccgaacgtaaacgtcaaagtgaacaacaaactctgtcagctgcctaatgtcattcctacaaaccgaccaaatgtggagcccaagcgtccgccgcgacccgttaatgtcacgtccaatgtaaagctgtcgcctaccgtcaccaacaccataacggttcagtggtgtccggactacactcgtagctactgtctggccgtatacctggtaaagaagctcacctcaacacagcttttgcagcgaatgaagacgaagggcgtaaaaccagcggactacacgcgaggcttaatcaaagagaagctgactgaggatgctgactgcgaaatagccaccactatgctgaaggtttcccttaactgcccgttgggcaagatgaaaatgttgctgccttgtcgagcatcaacctgctcgcatctgcaatgcttcgatgccagtctctacctgcaaatgaatgagcgtaagcccacgtggaactgccctgtatgcgacaagccggccatttatgacaacctggtcatagatggctacttccaggaggtgttgggctcgtcgcttctaaagagtgatgatactgagattcaacttcatcaggatggatcttggagcacaccaggactacggagcgagacgcagatccttgatacgccttcaaagcccgcccaaaaggttgaggttatatcggatgacatagaacttatctcggatgacgccaagccagtaaagagggatttgtccccagcacaggacgaacagcccacatcaacgtcaaacagtgaaactgttgacctaacgttaagcgattcagacgacgacatgccgctggctaagcgtcgtccgcccgccaagcaagccgtcgccagttccacgtcgaacggcagcggtggcggccaacgtgcctataccccggcacagcagccccagcaatccggtggtaatgtttttaaaaaacctcagaaagcggaggagctttacaagcgtgttcatttaggagtttggctgcgcccacgaaaacccaagccagagagctcaaggcgcccaaacgtcggctaa

SEQ ID NO: 28764 - protein, 551 aa, DROSOPHILA
MLRVVELQKILSFLNISFAGRKTDLQSRILSFLRTNLELLAPKVQEVYAQSVQEQNATLQYIDPTRMYSHIQLPPTVQPNPVGLVGSGQGVQVPGGQMNVVGGAPFLHTHSINSQLPIHPDVRLKKLAFYDVLGTLIKPSTLVPRNTQRVQEVPFYFTLTPQQATEIASNRDIRNSSKVEHAIQVQLRFCLVETSCDQEDCFPPNVNVKVNNKLCQLPNVIPTNRPNVEPKRPPRPVNVTSNVKLSPTVTNTITVQWCPDYTRSYCLAVYLVKKLTSTQLLQRMKTKGVKPADYTRGLIKEKLTEDADCEIATTMLKVSLNCPLGKMKMLLPCRASTCSHLQCFDASLYLQMNERKPTWNCPVCDKPAIYDNLVIDGYFQEVLGSSLLKSDDTEIQLHQDGSWSTPGLRSETQILDTPSKPAQKVEVISDDIELISDDAKPVKRDLSPAQDEQPTSTSNSETVDLTLSDSDDDMPLAKRRPPAKQAVASSTSNGSGGGQRAYTPAQQPQQSGGNVFKKPQKAEELYKRVHLGVWLRPRKPKPESSRRPNVG

SEQ ID NO: 28765 - DNA, 6124 bp, DROSOPHILA
aatcctctttggccttagccatacagttttcgtcattatcctctgcaagtaaagaaaaggtttcaggtgggctcaattagaaacgggatgctgaatgaaaaattgaaaaatcagtttaatcttaaaacagagcttgacccccgttggtaaataaaacgacaggtcttggttgaaaattgtttaatcgtatagttaaagtacacatctccttgtacattgatttcatatttgttcgttcagatatttagggggtttgcatcatgtcatagtcaaagcattgttcaattttaaatcttaacatataaatccgtggtggtacggtttgagcttaaatacgccaacaaaggccagggaggtcatataaactgagcgtctagctggacgacatacataacatacataatccgtcgtttccaatcgatttgcattgataaaaacggcttcgattgctttcaatactatggacctttaatgccatatgccattccgccctgtcttgcaacgtaacttaaatgcgaggactgcaacaccctccaactgcacacagcaccgcctccaatccgtacagaatccgtagtttaactaaaataacttaactactttaaattttggtgccgcgactggccgccgcctggcatgcatcctttcatttcgctttcctcatagtgttcattgcgctgaccgcttcaatggaaaataaattaattgcgtttcctatagtaattgctaattaatgctggtgctagtttgtgtatttgcaatatctaggaatatttcagttgctgtgtggtgtggcgtgtgttgctgagagcgctggcaaagcgtaacacaactaactactcgagacgacacgaataaaagacacgggacgtaagcaaagtgttttggtgtgagccaactgaaaaaaggggcagcaacaatctggccgatgggggagcacatggattcattcgggaacaggggaccctctcctacaaaacctgtctgttatgcctgcgtcctgcaacacaagaattacaagcatcagttggtggctcgcgattgatagagtatgaataatgaggtgatgcaaggcggcgaatcgaacgccgaagaatagcctctaaggtaatatgtggccgtgcgccaccggaagtgaaaccgaaaacagaaactggacgggccaatatagggaccataacagtaagagaccgcgagccgcgagatgtgcgattaatgtgtgtgggatgtgggtcctgcctacgggccggcattctggctctggccggaggacgccgtggcagctgcagcagccgcaaccgcagccagatccaacagttggaagtgcttttgatccgcgaccgcagcagccagggattccaggagggaggcatggacggctgccgtcgctggctgctcgtgctgttgctgctgcagttgctgctctgagactgtctgcttctctggcgattggcggctggcctgctgttctggggattctacgagttgcatcggcggcagcatggacgggtcacacaaaaagatcaggggaagaagagaaagagagagagagaaagaaaaaagacaaagaaatgcacaagttacttgaattagtttagttattatcatcatataaccttgggtttaggttaacacaacaacaatcggaaaagaggctctcaacaaaaaccttcactaacaaactggcatgatttattaaaattatcacttaaaataagagtacatatcgtgaaataatttagattcggtgacaacagaaaatacattgaaaatgaattaggacaaatggtggtataaaaccgaaaaatactctattaactttgcttagccgacgtttgggcgccttgagctctctggcttgggttttctgtaagaatgttctgattaagtatgggattcttgttccaaacccgaaccatttcacaatcgatcgacggaaaacataccgtgggcgcagccaaactcctaaatgaacacgcttgtaaagctcctccgctttctgaggttttttaaaaacattaccacctacaatacaagcaacgaaagcggatagagtcaatttatagcctacttagtctatacaagttttggctaggggattttacgaaatctacggaaaccttttcgatgctggactccgtagatctaacacaaaattatcatgataaatagcccttctggtcacttttttgaaacataaacatatgtttgtacatactacacgtaaaattgggttaattttaactgggtgtactcatactaaaatcaaatgatgcactaaagtcataagcggaatcggggacctaattatatttgaataacaataagtgatgatgaagtcagaatcatatgtaacatatatgtaattttcattttggacaatgtgaatactctttcgaacttttgcagttaaaattttctaatattatttaagacaattgatgcaccaaaaaaatacttttacgttaaatgatgtcctagaggtgtgccgtaaaaggtgaaccgaaacctaaatgcttgatcttgttaggatttcattcctttgtctaaattattggtgccgaagcgtggttgagtcagtgtggatgtatgtaaatgggatgtgtatggattcttataactactttaccctagggtctacaattagcaatttgtaaacataaagatttcttggctatacagagatataattctcgttactggcttattgcaaaaagggatccaacgtaccggattgctggggctgctgtgccggggtataggcacgttggccgccaccgctgccgttcgacgtggaactggcgacggcttgcttggcgggcggacgacgcttagccagcggcatgtcgtcgtctgaatcgcttaacgttaggtcaacctgttgcgcagacagaatacagtcatatgataagacagtttggtaggttgtagattggtgctctctacttacagtttcactgtttgacgttgatgtgggctgttcgtcctgtgctggggacaaatccctctttactggcttggcgtcatccgagataagttctggtaatgtccgaaaaacttgattaatgtcaaaacaatttaaaaggttgcgtgttaggcgattacctatgtcatccgatataacctcaaccttttgggcgggctttgaaggcgtatcaaggatctgcgtctcgctccgtagtcctggtgtgctccaagatccatcctgatgaagttgaatctcagtatcatcactctttagaagcgacgagcccaacacctcctggaagtagctggaaaacagagtttaatcagttacaaatatgctaaatgaaatgacatttcttacccatctatgaccaggttgtcataaatggccggcttgtcgcatacagggcagttccacgtgggcttacgctcattcatttgcaggtagagactggcatcgaagcattgcagatgcgagcaggttgatgctcgacaaggcagcaacattttcatcttgcccaacgggcagttaagggaaaccttcagcatagtggtggctatttcgcagtcagcatcctcagtcagcttctctttgactttaaaaaaatggtatttattattaagtttgcatcattggagcacagaaaactcacttaagcctcgcgtgtagtccgctggttttacgcccttcgtcttcattcgctgcaaaagctgtgttgaggtgagcttctttaccaggtatacggccagacagtagctacgagtgtagtccggacaccactgaaccgttatggtgttggtgacggtaggcgacagctttacattggacgtgacattaacgggtcgcggcggacgcttgggctccacatttggtcggtttgtaggaatgacattctgcattggaataaagagcaggatattataccaggtcctgattggataatcggataatacttacaggcagctgacagagtttgttgttcactttgacgtttacgttcggcgggaagcagtcctcctggtcgcacgaagtctccaccaggcaaaagcgcagttgaacctgaatggcgtgctccaccttggagctgttgcgaatgtcgcgattagaggcaatctcggtggcctgctgcggcgtgagcgtgaagtagaaaggcacctcttggacgcgctgagtgttgcgtggcaccagagttgaaggcttaattagcgttccgagtacatcgtagaaggctagctttttcagccgcacatcggggtgaataggcagctggctgttgatgctgtgtgtgtggaggaagggtgcgccgccgaccacattcatctggccgccgggcacttgcacaccttggccgctgcccacgaggcccacgggattgggctgcacggtgggcggcagctggatgtgcgagtacatcctggttgggtcgatgtactgcagcgtggcgttttgttcctgcacggactgggcgtagacttcctggaccttcggggcaagcagttccaagttggtgcgcaagaacgagaggatgcggctctgcaggtcagtttttcgtccagcgaatgagatgttcagaaacgacaggattttttgcagctcgaccactcgaagcatctgcaccatttgctcacattcctgaagagacggaaatggcatggcgaacaatgaaaattttgtatttcggaaaattgggaaggtgtctatgtccaaatagcgggacttagcaccaagcgtccacacgaacacacacacaagcgcgctctatatgcaaatatcgcgttttcgcacatatgtacacatgcgtatgccttgtgcggctttatgcagaaaaaatcataaattcgctctacattatatgccaagtgattgcttgacagtcggacaaaagcctggcttccacatttttcccatctgtggataatttactggtccgaaactgccgcatgccaccaaatcattacctagatgctcaaacatggcgttctcgcaaaaagtttcttttcgtggaaccgatcgggtttcagtggcttttaacgttggtatatgcagaaaatttggtaaggcttgtgttcgccactggcagccttccttctttcgcaaattgcacttaaacaaactaccgcaaaaatgcccccttttttgtcacacgaattttgttttgtccgcacggtctgaagaaatatggcggatgatagtgttgttaagcgccggcggatttggctggcaaatcactctgttcgtgggtggggaagggtacagacaccatttttttctgcggtcacactgcttatcaataaccatggcccccatatttatgaaaaattctttggactgaataaactgagactggcggaaacataccttgtacttggtggaatcaaagggattaactgctattggcgctgacgaagtcgactggtgcccggggctcgaagatgttgcggcattttccgcctgcgtgcgagccgtctgagagcgggtctttcgcatcactattattttctattcacggtggcgttaggcgttcggcaattgaagtcgcggactcgtttgcatttgcctgggacgcgcaccacacataaaaacaagcaattgccgctgtttttcaacgaatgcggagaaacaaaaatattttacgcggcgtcgtcgctgtgggccgactagagttgacactatcgatcgacactgcggaaatctctaccgcctggccgagtcttgtctcacgcagcccgaaaatgccctaacgcgtgcgtttgtttactttgttagcaaccgttactttcgtagattcctaattcgctaggcatttatttaattgtacaaatatgggtctatctatgcaagaatagtataaaaggggcccgccgcttggcgtgggcctagaaaaagtccatgtccccgcaattgacgtccagaaagtcgtggtcgtagctgattaaatccttcagcggcgctccctgagccgccgccgctgctttggatgtggagggaagttccgcattgtccacaagatttatattgatctcgtgggtcctgtactcagggctgtcgtgctcctgctcagcgccaacaggggagggtggcgggttggacactgaaatagtcaaaatagtcacataggagatttaacaataataatgggatcttcttacagctgcc

SEQ ID NO: 28766 - DNA, 2231 bp, DROSOPHILA
aaacaaaattcgtgtgacaaaaaagggggcatttttgcggtagtttgtttaagtgcaatttgcgaaagaaggaaggctgccagtggcgaacacaagccttaccaaattttctgcatataccaacgttaaaagccactgaaacccgatcggttccacgaaaagaaactttttgcgagaacgccatgtttgagcatctaggaatgtgagcaaatggtgcagatgcttcgagtggtcgagctgcaaaaaatcctgtcgtttctgaacatctcattcgctggacgaaaaactgacctgcagagccgcatcctctcgttcttgcgcaccaacttggaactgcttgccccgaaggtccaggaagtctacgcccagtccgtgcaggaacaaaacgccacgctgcagtacatcgacccaaccaggatgtactcgcacatccagctgccgcccaccgtgcagcccaatcccgtgggcctcgtgggcagcggccaaggtgtgcaagtgcccggcggccagatgaatgtggtcggcggcgcacccttcctccacacacacagcatcaacagccagctgcctattcaccccgatgtgcggctgaaaaagctagccttctacgatgtactcggaacgctaattaagccttcaactctggtgccacgcaacactcagcgcgtccaagaggtgcctttctacttcacgctcacgccgcagcaggccaccgagattgcctctaatcgcgacattcgcaacagctccaaggtggagcacgccattcaggttcaactgcgcttttgcctggtggagacttcgtgcgaccaggaggactgcttcccgccgaacgtaaacgtcaaagtgaacaacaaactctgtcagctgcctaatgtcattcctacaaaccgaccaaatgtggagcccaagcgtccgccgcgacccgttaatgtcacgtccaatgtaaagctgtcgcctaccgtcaccaacaccataacggttcagtggtgtccggactacactcgtagctactgtctggccgtatacctggtaaagaagctcacctcaacacagcttttgcagcgaatgaagacgaagggcgtaaaaccagcggactacacgcgaggcttaatcaaagagaagctgactgaggatgctgactgcgaaatagccaccactatgctgaaggtttcccttaactgcccgttgggcaagatgaaaatgttgctgccttgtcgagcatcaacctgctcgcatctgcaatgcttcgatgccagtctctacctgcaaatgaatgagcgtaagcccacgtggaactgccctgtatgcgacaagccggccatttatgacaacctggtcatagatggctacttccaggaggtgttgggctcgtcgcttctaaagagtgatgatactgagattcaacttcatcaggatggatcttggagcacaccaggactacggagcgagacgcagatccttgatacgccttcaaagcccgcccaaaaggttgaggttatatcggatgacatagaacttatctcggatgacgccaagccagtaaagagggatttgtccccagcacaggacgaacagcccacatcaacgtcaaacagtgaaactgttgacctaacgttaagcgattcagacgacgacatgccgctggctaagcgtcgtccgcccgccaagcaagccgtcgccagttccacgtcgaacggcagcggtggcggccaacgtgcctataccccggcacagcagccccagcaatccgaatccccagaacagcaggccagccgccaatcgccagagaagcagacagtctcagagcagcaactgcagcagcaacagcacgagcagccagcgacggcagccgtccatgcctccctcctggaatccctggctgctgcggtcgcggatcaaaagcacttccaactgttggatctggctgcggttgcggctgctgcagctgccacggcgtcctccggccagagccagaatgccggcccgtaggcaggacccacatcccacacacattaatcgcacatctcgcggctcgcggtctcttactgttatggtccctatattggcccgtccagtttctgttttcggtttcacttccggtggcgcacggccacatattaccttagaggctattcttcggcgttcgattcgccgccttgcatcacctcattattcatactctatcaatcgcgagccaccaactgatgcttgtaattcttgtgttgcag

SEQ ID NO: 28767 - protein, 593 aa, DROSOPHILA
MVQMLRVVELQKILSFLNISFAGRKTDLQSRILSFLRTNLELLAPKVQEVYAQSVQEQNATLQYIDPTRMYSHIQLPPTVQPNPVGLVGSGQGVQVPGGQMNVVGGAPFLHTHSINSQLPIHPDVRLKKLAFYDVLGTLIKPSTLVPRNTQRVQEVPFYFTLTPQQATEIASNRDIRNSSKVEHAIQVQLRFCLVETSCDQEDCFPPNVNVKVNNKLCQLPNVIPTNRPNVEPKRPPRPVNVTSNVKLSPTVTNTITVQWCPDYTRSYCLAVYLVKKLTSTQLLQRMKTKGVKPADYTRGLIKEKLTEDADCEIATTMLKVSLNCPLGKMKMLLPCRASTCSHLQCFDASLYLQMNERKPTWNCPVCDKPAIYDNLVIDGYFQEVLGSSLLKSDDTEIQLHQDGSWSTPGLRSETQILDTPSKPAQKVEVISDDIELISDDAKPVKRDLSPAQDEQPTSTSNSETVDLTLSDSDDDMPLAKRRPPAKQAVASSTSNGSGGGQRAYTPAQQPQQSESPEQQASRQSPEKQTVSEQQLQQQQHEQPATAAVHASLLESLAAAVADQKHFQLLDLAAVAAAAAATASSGQSQNAGP

SEQ ID NO: 28768 - DNA, 6809 bp, DROSOPHILA
gtttaatttttaatttatttaagatctgatgctccaaccggtttccacttacgcggagacccactatgccaagcaattgagtaggtttcaaaaacttcaaaagctctagggtttccattttgttgtatcctaactttaaatcttactttcaggaattgcatatgcccgtggcaatgccaatttgaggacgaaacaaggagatgatatctccggaaaccacttatatggcggcggtgtggtttggcaccacggcaatgcagtacagttcctcaaggacaagataagcaacagccactacggggacgactttcacaactacaccatgatctggcagagggataagattaccctaatggtagacgatgaggtttatggggagctgtacgacggactgccattcttcaacgagaagtgctttattatctttggcgttacggtgggcggcttcctgaacttcgacgatagtctattggccaaggatgtcaagccttataaaaacagggaaccccgggctgccctctcattttggcagcaccgcgatgcttgggcccccacttggggcaggcacagcgccatggtcatagactatgttagggtttatgcggagtagctgtggcatttgtcaccaaaatataaataaagtacttaaacatcaatcatcgcttcatattcaaaaaatgtttctaaagtcgaaagacatatcgattatcgataccaggaattgtgttcttactgcaaaagttgttaacaagtaaatgcttttcagaattaacttatttccttcacaatctcacagtgtaaaaagtgaacgaattgaaaatttacacgaaaaacatttgcaactccttaccacattttccatatcgcacactgcaatcgattgtcgccggcagcggcaatgtgcatcgtatcgaactgctagcccaagcggcatcgatactatcgaacgcacatcggcccgaaagccagctctagttttttttccccgagaggagcagacaagcgaactggactgggaaacagcagcagcagcagcagtcgtttgaattgaatatcattccccatttcgagctaaacgtcgttgagagccaaccaggaagaatccaacggcgcaccatgccttcggctgcaaataccgctactgttaccgctgcaattgccaccaccgtcgccgcctcagccagcaacaccaacaacaacagcgtcagcaaggagaagcgctcctccatcatttcgctgggcggttcggtaatcccaggaacagcagttgcagctggagccggagtcgcaaccaccaatggccagagcaacagcagcgcggcagcgacagcggatggcagccaaacggatttggcgagcagcaacaacaatggaaacgctgccaaatcgaaggcgaatgctgtgtctgccgccgccgtcgttccagagccgtacaatccgctcaagcagctgctggtgaccatcgagcacaagattcggaacctggagaagcgcaaggtcagtgtttgggaaagtgccgcaaaggatccctttatcggcagcatggcccaccatttttattttcattcctccgtgttgctttgtttcgttttgcgcgcaccccttgcccccttcctaccccttggcctaagttctcggggctggcagatttttcgcgacgccatgttttctagagcacagggttgccggatcgcacggagcggccggcatgtcaattagaaccagtcaaaaaattacatgctccgatgtgctgggttttttaagctgctaccttgctcagcagaaaacgttattacattttatagcacttttattccagaaagttcttgcattcaaaagcacacactgtcgacagctgtgttgctgacgggggtggcaacgttatttgccggctcgttttgtttatagattcgcacaattaatatgatgaaaataaaaagtacatttcagcacgggcaagaaatagaaataaaataggatcatgcaactatttggtacgaaattgagctcacgtgtaatttctttttgttactactgatactaccttctttaagttgaaatgcagattgttttaaagtttaaggttatttggtcactgatccgcgacagcgtcaactttaataatttcatttggcaagttgttgacgcagtttaaatatcgtccacgtaaagttctaccacatcgaattggaacatttaattaaaaacatcaaatagtaaaaaccgcaaatcttacgaagagggcatttgtagccatacaaaatgtttgaagctcaataaaatgtaatttataatggaaaaccataaaacttttcaaagaaaaaatgaatgcattaacgacagcaataagcttgtaaagctagcacatttcacatatatagtatatatttctgattataaacgctgcagccaaacaaatgtgactaaaactgactcatcaatccctcttatctagaccaaactggagtcctatcgcgctatacagagcagcggaaaggaactgagcggggaccaagcttcggcagtggccaaatacgatgctgtcctggccaatctggagtttgcccgtgagctggccaagcatattcagcagcagtccaaggaggccgaaaaggagcagaagaagcaggcgcgcaaggtatgctcgttaaatttctaattttcgctgatgttcattttaaattctacctaaggataacctggcaaagacaattgctgaaacggccaagattcgggaggttctgatcattcagaacgtgctcaactgtttcaacgacgatcaagtgcgcagcgattttctaaacggcgagaacggagcgaaaaagttggaaaacaccgaactggaattgctggagaagttgtacgcatcaacacgcacattaaacgatttccctttggtatatattaagccgcaatccatttcccttttttttttttagtttcattgagacgcaaacacgccgtccggaaaccgctgacgatgtaagctttattgccactgcccagaagtctgccgaactcttttactcgaccatcaatgcgcgtccgaagtctttcggagaagtgtccttcgagaagttgcgatctctcttccagcagatccaggatagtgggtacctggacaagtattaccttgttccactggccgagaacgcggtagccaacagcacggatagtggaactggaagtggcgatggagaaagcggtgacttgttgaacgatggctcgggggaactggacgcggaactgccatctgagccatcggctcgaaactctttggaggagggactagacaagttgcatttgggcgtgcaagcagaactggaccagcatcaatcgtaccagcaacagcaggagcgtccgagccatcttctggagccgcagcaccagagagctccatccctggaacatcagcagaactcgatggtgcagcaggtgtcgacccaggtctaccaggcagctcctcaggccggaggaaccaccacgccagtgcatgttctatacgctccagcgccaccagcccagcagcagccccagcagccgccgccgcatcctcaccagctgttaagcagccccgtgaatctccaggccttgcaaacaggaacagctgctccaccagcacaacagcagcaaccacacccaacccactttgctccaaatgtgagggccgtggagcaaaactatttcaagcagccaccgcagcatcctcaaggtcctggaatacaggcaccacaaacgccccagcagcagcagtttatgcagcattcgcgccccttggcggaggtcttgggcacaggacgcttccattttctgcaggacagtgaactggacaatcctgaggctttagcaccgccgcctccgaccaatcagggattggtatttgagcagcagccgcaacagcccaaccatgtcgaagaaccaacgcaggccatactgacgctgaccttcaccaaccaatcgttcccatcgcagcagccccagccccagcaacagggtccgcagcagcagcagcagcttttctcgccggtgctgatccacgagcaacgtcaacagccaccacagcagcagccgcaaccaatgctgattatgccgcgtctgccaacccaacaaccgcagcagcctgctcctcagggcattggcatgcaggcgggcgatgtgacctcagggttctcatacgaaaatgctgttgtttcctatgaacagcagatccagcagcagctgaaacagcagcaacaacaacagcagcagcagcagcaaaatctacagcagctggatgagccgtcatctgtgaacagctcctcgagtgtcggtgctggtggagatgtcgagaacaatgaatggcatgcccgtaataatgatacaaatgctgccgccacagcagcactgacgaatgtgctcaaaggcgagaccacccaggccacgccaccggcaccgccaaccaagtggagctcggagatgaatgccatgagtagcgccgcctccaatggcagcagcaacaccagccacaagcaggagtgggccacgcccagggaccacagcactggcggaggcaatagcggttatgccgataacaacgagagtaacaaccattggaacaactcgcaaggagacggacgccgcaactctggcaattatcagcgtcgtggcggagacagggataaccgggatcgcgatcagggagggcgaggtgacgagcggcgcaacggcggcgacaggggcaactaccggtcgcgtcaatacggcaactcatctaacacgaacggacgcaattcgggcaattcgagcggtgtgtacttccgcaacaatgagtcgggcaatggtggaggcaacaactactaccagaacggaggaggtggcggtggcacctacaacaaggagtcgcgctacgaatcctccggcggcggcggtggaagctatcgaggccagcgcggtggcaaccagcagcgtaatgtaaatggctcgtatggcggcggcaggcccatgggcgatcgtggtcgtggcggagcgggcaaccagggaggtggtggtggtggctacataaaccgtcagaaccagtcgcaacgcatgccactcgggctggagaacaaaaactgagcatacaatacgtattaaccccgcaaacaaaacacacatacaattcatgcaaaccataaacacaacctccatacagaaaacaaggaaaccaatcatcaacatgcaagtaatggccacgtagacgtacaattattgttacgcaaaccactctcaaccataagaaatggaaatctatcaaaaagaatcctttataacgcaactagggaatcgaaaatgaagccgacacacaaatcaattcgtgcgcatttttcaatacgatttatacctatttcccttgattttggtttattcgataatgtattaataataaaacaaaatagttgttagaaacacgaaagaattacaactaaatacaggaaagtaagcgctccaagggtttctaaaactcccagacaggataggacaggacacaacactacttcgtccaaggaaaacaaacgacagatgggcaaaacttgtatgtaacttggatctgccatttcttgcttgattttactttttgtctgtttggctgcgttgaagctgattgatgattacagatgtcgagagaaagaatataaaaagtatttatacgtcttagcaattaaataacgattctgaattataaaaattaattactattacctatatatataaacgaagggataaatatatttatagtttgtgctcttactgtcatgctctatcccatttcaacacctttttttgttctgccaaacttttacacacaaacgatgaaaacaaaaatacaaaaccacgtaaaacataatagttgtaattattgccgcgtgaatgaagaagcgtgcacactaacagtgcattataaatgaaatgaaaactatgtatttgcaaaacagtacatacattaaacaaaagtatataaaccattcgtttttttggactaattggggttcccaacatttttatattttaaagttacaaatggaaaattaagtttctttaactatttttatccctgcttcagaaagttatatggcaaatgaaaaatgtgtataaaagaagctaatcttaagcaaatcccattcctactattccattttgtcctgcttttcggactcgactgttcctccgtcgcaaagaaaccaaagaccagccagaatgagagttattccgatgccagatagtactgtcagtggctcccgataaacaagcgcacctaggacaaactatataacgaacagtaatcataattgaacaaatagatcggtggatcacctaccgataagacataattcgaagcggcagttaaaacgacgcacgttaaagtttgttcagtcatttgcagggccttcaaaaagaaacgcaagttgcaaacgttgcatgttaccattaacactagtggcagcagctgaagtaatgctatttctaataaataaaataaaattttataaatttataaacattttgcttgtttgaagaaatcacaatcttgcctaaataagaaaagtcttcatttatttgcgaagtattcagtagtttttgggcgctcaggtggctgggaagttttccgaaaaagcttcctgcagctgcgaaggagccagccaccaaactgtatcgatattttgcgagtgattccattaggttagatctttaaacttataagtttaaaccaataaaaatgtaaacaaaagtcgaacgaggcaacagctgatgcgcaaagctgccaacttacttccatatgacaagcttgcggt

SEQ ID NO: 28769 - DNA, 3717 bp, DROSOPHILA
aagcgaactggactgggaaacagcagcagcagcagcagtcgtttgaattgaatatcattccccatttcgagctaaacgtcgttgagagccaaccaggaagaatccaacggcgcaccatgccttcggctgcaaataccgctactgttaccgctgcaattgccaccaccgtcgccgcctcagccagcaacaccaacaacaacagcgtcagcaaggagaagcgctcctccatcatttcgctgggcggttcggtaatcccaggaacagcagttgcagctggagccggagtcgcaaccaccaatggccagagcaacagcagcgcggcagcgacagcggatggcagccaaacggatttggcgagcagcaacaacaatggaaacgctgccaaatcgaaggcgaatgctgtgtctgccgccgccgtcgttccagagccgtacaatccgctcaagcagctgctggtgaccatcgagcacaagattcggaacctggagaagcgcaagaccaaactggagtcctatcgcgctatacagagcagcggaaaggaactgagcggggaccaagcttcggcagtggccaaatacgatgctgtcctggccaatctggagtttgcccgtgagctggccaagcatattcagcagcagtccaaggaggccgaaaaggagcagaagaagcaggcgcgcaaggataacctggcaaagacaattgctgaaacggccaagattcgggaggttctgatcattcagaacgtgctcaactgtttcaacgacgatcaagtgcgcagcgattttctaaacggcgagaacggagcgaaaaagttggaaaacaccgaactggaattgctggagaagtttttcattgagacgcaaacacgccgtccggaaaccgctgacgatgtaagctttattgccactgcccagaagtctgccgaactcttttactcgaccatcaatgcgcgtccgaagtctttcggagaagtgtccttcgagaagttgcgatctctcttccagcagatccaggatagtgggtacctggacaagtattaccttgttccactggccgagaacgcggtagccaacagcacggatagtggaactggaagtggcgatggagaaagcggtgacttgttgaacgatggctcgggggaactggacgcggaactgccatctgagccatcggctcgaaactctttggaggagggactagacaagttgcatttgggcgtgcaagcagaactggaccagcatcaatcgtaccagcaacagcaggagcgtccgagccatcttctggagccgcagcaccagagagctccatccctggaacatcagcagaactcgatggtgcagcaggtgtcgacccaggtctaccaggcagctcctcaggccggaggaaccaccacgccagtgcatgttctatacgctccagcgccaccagcccagcagcagccccagcagccgccgccgcatcctcaccagctgttaagcagccccgtgaatctccaggccttgcaaacaggaacagctgctccaccagcacaacagcagcaaccacacccaacccactttgctccaaatgtgagggccgtggagcaaaactatttcaagcagccaccgcagcatcctcaaggtcctggaatacaggcaccacaaacgccccagcagcagcagtttatgcagcattcgcgccccttggcggaggtcttgggcacaggacgcttccattttctgcaggacagtgaactggacaatcctgaggctttagcaccgccgcctccgaccaatcagggattggtatttgagcagcagccgcaacagcccaaccatgtcgaagaaccaacgcaggccatactgacgctgaccttcaccaaccaatcgttcccatcgcagcagccccagccccagcaacagggtccgcagcagcagcagcagcttttctcgccggtgctgatccacgagcaacgtcaacagccaccacagcagcagccgcaaccaatgctgattatgccgcgtctgccaacccaacaaccgcagcagcctgctcctcagggcattggcatgcaggcgggcgatgtgacctcagggttctcatacgaaaatgctgttgtttcctatgaacagcagatccagcagcagctgaaacagcagcaacaacaacagcagcagcagcagcaaaatctacagcagctggatgagccgtcatctgtgaacagctcctcgagtgtcggtgctggtggagatgtcgagaacaatgaatggcatgcccgtaataatgatacaaatgctgccgccacagcagcactgacgaatgtgctcaaaggcgagaccacccaggccacgccaccggcaccgccaaccaagtggagctcggagatgaatgccatgagtagcgccgcctccaatggcagcagcaacaccagccacaagcaggagtgggccacgcccagggaccacagcactggcggaggcaatagcggttatgccgataacaacgagagtaacaaccattggaacaactcgcaaggagacggacgccgcaactctggcaattatcagcgtcgtggcggagacagggataaccgggatcgcgatcagggagggcgaggtgacgagcggcgcaacggcggcgacaggggcaactaccggtcgcgtcaatacggcaactcatctaacacgaacggacgcaattcgggcaattcgagcggtgtgtacttccgcaacaatgagtcgggcaatggtggaggcaacaactactaccagaacggaggaggtggcggtggcacctacaacaaggagtcgcgctacgaatcctccggcggcggcggtggaagctatcgaggccagcgcggtggcaaccagcagcgtaatgtaaatggctcgtatggcggcggcaggcccatgggcgatcgtggtcgtggcggagcgggcaaccagggaggtggtggtggtggctacataaaccgtcagaaccagtcgcaacgcatgccactcgggctggagaacaaaaactgagcatacaatacgtattaaccccgcaaacaaaacacacatacaattcatgcaaaccataaacacaacctccatacagaaaacaaggaaaccaatcatcaacatgcaagtaatggccacgtagacgtacaattattgttacgcaaaccactctcaaccataagaaatggaaatctatcaaaaagaatcctttataacgcaactagggaatcgaaaatgaagccgacacacaaatcaattcgtgcgcatttttcaatacgatttatacctatttcccttgattttggtttattcgataatgtattaataataaaacaaaatagttgttagaaacacgaaagaattacaactaaatacaggaaagtaagcgctccaagggtttctaaaactcccagacaggataggacaggacacaacactacttcgtccaaggaaaacaaacgacagatgggcaaaacttgtatgtaacttggatctgccatttcttgcttgattttactttttgtctgtttggctgcgttgaagctgattgatgattacagatgtcgagagaaagaatataaaaagtatttatacgtcttagcaattaaataacgattctgaattataaaaattaattactattacctatatatataaacgaagggataaatatatttatagtttgtgctcttactgtcatgctctatcccatttcaacacctttttttgttctgcc

SEQ ID NO: 28770 - protein, 961 aa, DROSOPHILA
MPSAANTATVTAAIATTVAASASNTNNNSVSKEKRSSIISLGGSVIPGTAVAAGAGVATTNGQSNSSAAATADGSQTDLASSNNNGNAAKSKANAVSAAAVVPEPYNPLKQLLVTIEHKIRNLEKRKTKLESYRAIQSSGKELSGDQASAVAKYDAVLANLEFARELAKHIQQQSKEAEKEQKKQARKDNLAKTIAETAKIREVLIIQNVLNCFNDDQVRSDFLNGENGAKKLENTELELLEKFFIETQTRRPETADDVSFIATAQKSAELFYSTINARPKSFGEVSFEKLRSLFQQIQDSGYLDKYYLVPLAENAVANSTDSGTGSGDGESGDLLNDGSGELDAELPSEPSARNSLEEGLDKLHLGVQAELDQHQSYQQQQERPSHLLEPQHQRAPSLEHQQNSMVQQVSTQVYQAAPQAGGTTTPVHVLYAPAPPAQQQPQQPPPHPHQLLSSPVNLQALQTGTAAPPAQQQQPHPTHFAPNVRAVEQNYFKQPPQHPQGPGIQAPQTPQQQQFMQHSRPLAEVLGTGRFHFLQDSELDNPEALAPPPPTNQGLVFEQQPQQPNHVEEPTQAILTLTFTNQSFPSQQPQPQQQGPQQQQQLFSPVLIHEQRQQPPQQQPQPMLIMPRLPTQQPQQPAPQGIGMQAGDVTSGFSYENAVVSYEQQIQQQLKQQQQQQQQQQQNLQQLDEPSSVNSSSSVGAGGDVENNEWHARNNDTNAAATAALTNVLKGETTQATPPAPPTKWSSEMNAMSSAASNGSSNTSHKQEWATPRDHSTGGGNSGYADNNESNNHWNNSQGDGRRNSGNYQRRGGDRDNRDRDQGGRGDERRNGGDRGNYRSRQYGNSSNTNGRNSGNSSGVYFRNNESGNGGGNNYYQNGGGGGGTYNKESRYESSGGGGGSYRGQRGGNQQRNVNGSYGGGRPMGDRGRGGAGNQGGGGGGYINRQNQSQRMPLGLENKN

SEQ ID NO: 28771 - DNA, 4621 bp, DROSOPHILA
agactgaaaaggttcagaggcggcatgccaggctcagctcccttcataaatcctgcgaaaatgagaattggtcaaaatcaatgtcggtccatttgatattaccccgctgcttcttcttcccagccgcgtgtagattacaaaaaacatgaaccacaacttacccaaatacagcacaagaggcacgaatccccagtggaatccagtctggacgactccaaccacaaatcccaaacgatccttaactccctcggatagcttcatttcgtacggatattgaatttagctccttttgcgaattatgaaatgataacttgtctgactgcaaacgaagtgttggaaaacagcacttttttcgatataaaacagctgacagaaactttttgttaggttactcgttcaatttatattttcttgggatggctttgtcgcaggttgctgggcctgaaataatttaccaatttaaagaatcagtaaaattatttcgaatacagatttctgttggtgtggcaacattgacatttgagcgcaaaatttaaattcgcttctaaaacggtcacaccgttttgccctttgggttttaatctgatattctttaatttatattttccactataaaggtttttaactaccatttcaccgacaagttgtctattggacacatatcatgaaaagaaaaaagtgtgcttggtctgaaaaataccttttcgtatttttaatgatcccgcaatatttttgcatgtgtactcccatcaactttaaagatgttacatttccaaagtttcaaattctgaaagcgttggaaatgcaacaagaatttgaagtaaggaaacttctttttaacgctcaaagttttcgttgatttcttaacaatatgaagcataaaaataaaaaatacccctgctatctctcgcagcaggcaagtgctccgtagatcgatactatcgcagccactcgaagtcccatctctaatctcgagtccctttcgcacttgcccgctactcacatgagttctagatcgtttagttttcttggttttcatttgctcgccaaattttagcaacgttgctggtttaatcggctgcacctgcaatcgcggttaatcagagagcgccgagcactaaagttcccattgccaaacgaaacgtaagtgataaagaacgccagcaatgagcgaacaagagcaaagcgcacgcagtcggggaaaaatcaattgatgttatgtaagctcgaataaccggataccgtgtctactactgttgcaggtcccgatttgctcgatttggaactggaacggaccatgaaaacaagcaatctcggcctgtacgctttccgtttaaccttcggtcaggtgagcacacgcacattaaaccaggcagccaaacggcagaaacagcatgcgcattctgggggaaacctctgagtttttcggccgggcaaaccaaggaccaccacaatcgtcgttgagaatgcagcgactgcagccgggagacgagtgtctggagtgccagagtgaaggcaggaatcacaagctgcgctacttttacattaatctcgaggagcagctgctgaagtgcgagtccaggagctgtttgtggccacacaacgatgaggtctcctctgatgaagatctgaactcggaggcagcacttcccatcactgctccacaatctgaactttttgaatctcctgctgctacgctaccttctcaccctgcggccttaacgtccaaacctcctccaaatgatgacgaatttatattggaactgctgcagcaattgacttctgccacagaaaccccccttaagacaaatgtgagttccagttccatgccaaatctgcactcgccttcagaggaaaaaccctgcccacaactggagcttcccgacttaagctttctggaggagaacagtaccgtatgcaaggaacccccacaagcattgaaatcagagctgggagtaccttcaactgtcgtcttacccgacagattaataagtccgcccaaggcaaaagcagtacaaactgaggacaccaaagccaaggaacatgtggctcatctgaagggagctacgtcccaaagctggcaaggcaaagctgaaataccattactacccgcttgtgtgaaggcaagtgtgaggatgtctcctagcatcaaatctaaggggtctcccttcagcagtccgcccaagaaagcaaccacccagccgcaaggtcagtcaccaccgtcaacgccgcctgccgtcaatattattatcagtgttccggagttaaacacgggaatgaacggcttgtttctagacgccattaaacgccattccacagaagccaaacccgcgctacgtggcgtagggagacgccctaagcgactggccaagggaaccaccagcagggggggcattcgcacacaggatgtaatgcacttgatcgagcatttggaaaccaccacagaagcgaaacttacgacaccacggacgtaataggctggcatttagcttactcaagtatttgaaataaatttgcatatgaaataatgcatgaaacctccggataagaattcaagttcgtttatttataaacaagtccgttacgctatgtttttttttttttttggcaactcaaattgtggattactaattcgcggcacgcgtctagagcatgttcaagtggacaggagagatagcgctgccgacaagagagcgtgctatcagtggaagtgaactttggaaaggaggtcgtggcaactgcgtcacgcggagatctgtttcaagccgcgattagctgttgagctgcagagactgactgataatgcagttgaacgtcatctaagcgctgtgacagtgattgcgatagtgatgtcagtcacgataatatggcattacatcgaccctttgcaatcagttcaataatcgtgcgaccatgtggggtaatcgcattcgtgtggacggccggggcacttgaacctagttgccaactgccggcgtaaattgtttctgctgcgtagttgcctgtgtgggcgggggccgtcgggcagtgggccaagtttattgtttgtttggattgatatatataaaacgagcgaaaaactaaatttgtctccctatcttatctcccgcaggcgccgacgttgtccacacaggccacgacgcactgcagccatggcttcaccaccagctcgtcgtcgcccaaccgtgtggtgacccgctctgccaccatgctggcgctcttcggcatcgcgctgtcctcgttcagccttaagcaactgctggccaagaagcagaagcaccagggcctgcgcaagctctagaatggagctatagccagaaagattagagcgatgccaacgccaacggttgaagcggcgatgaggagccagagcgccatgtcctgaggtcacacattcgatattttcatcatccgccatcatcgtgtatatttgcctaagttaagtcacccactcaccacagacccaagcggaactcggacatggaggcttgttttgtaatattctgttcgataaactaactgatcggaggcgaggatctgtgcgcatatatagatatattttcttgtttacacatgcacaccatgcgtcgccaactaaaaggaataaatttgtgataaatcgtgtatgaaaaaagcccatcggcagacaaactgaacgaaggagcgatggaggagaagattcgctgagcttgcgggaatcccaaattttcctatactcttttgttgcccgttttagtaatatttattttatgtgtaaacaagtctattatatacgtatatttatttacaagttatttgcaaaccagagaaacgactaagtagggaggtataaaacaataatgacttcgttggactgcagatcgccgagcaggctgtgtcagtatccaagaaacaaactagttctagttccgtattcaaataaatgcattatattcaattcgaaaatattgatttttatttctagtttccgttaaaacatgcatgctaaagcacatatgaatattaagccagcacctagaggttatgaataaaacatttttaacattttcctatagttcctagtctaatataaaaaataattatttgttcctcgggttagtgactcgttgatgatttgcgtgaaaactaagtactttaaaagaatcaacagcataacataaactttcggctgtcaaggcctagatactctatacccttgaaaagttatatttacgttaaaatagcttatccaccatccgtaagttcgctgtaaatccccaatctattgaatagtttcttttttcttgtttatgcaaataaatactttaattcccaaaaaataatgttgtggttattaataatattaatattaataagccaacatattatctaaaaatatataatatatggttcgcctaaaattctttaatttctttatcacttctaaaataataaagtgccaaggacagtttccgaagaattgctttagcaattgcatttcattgtagaggcgttaatgtcttgaattacatttttaggacatttatatggacagcacataaacgtgtttcaacatccgaaggttcaaaaaatttagtttcagcttcaaaaatccgcatttgaattttgcgccacatgtgac

SEQ ID NO: 28772 - DNA, 738 bp, DROSOPHILA
cacatgagttctagatcgtttagttttcttggttttcatttgctcgccaaattttagcaacgttgctggtttaatcggctgcacctgcaatcgcggttaatcagagagcgccgagcactaaagttcccattgccaaacgaaacgtcccgatttgctcgatttggaactggaacggaccatgaaaacaagcaatctcggcctgtacgctttccgtttaaccttcggtcaggcgccgacgttgtccacacaggccacgacgcactgcagccatggcttcaccaccagctcgtcgtcgcccaaccgtgtggtgacccgctctgccaccatgctggcgctcttcggcatcgcgctgtcctcgttcagccttaagcaactgctggccaagaagcagaagcaccagggcctgcgcaagctctagaatggagctatagccagaaagattagagcgatgccaacgccaacggttgaagcggcgatgaggagccagagcgccatgtcctgaggtcacacattcgatattttcatcatccgccatcatcgtgtatatttgcctaagttaagtcacccactcaccacagacccaagcggaactcggacatggaggcttgttttgtaatattctgttcgataaactaactgatcggaggcgaggatctgtgcgcatatatagatatattttcttgtttacacatgcacaccatgcgtcgccaactaaaaggaataaatttgtgataaatc

SEQ ID NO: 28773 - protein, 79 aa, DROSOPHILA
MKTSNLGLYAFRLTFGQAPTLSTQATTHCSHGFTTSSSSPNRVVTRSATMLALFGIALSSFSLKQLLAKKQKHQGLRKL

SEQ ID NO: 28774 - DNA, 3743 bp, DROSOPHILA
ggctccgtctcgatgactactcatgggcggctattccggggcgctttaactcggtgtgtgctgcctgagaactttctggcaatttagttccggggattctgcgaagaattcgagatttgctttgtgaaagtacgggcgaaatgcaagaagacaagcggcggtcaggtaaaaagaaaatggcggcgccccgcaaacaaagaaaatcgcgttaggcggaaaaattctaaaatcagagcaattcagatcgtttttagagttcttaccacttccggcttttttggatgtttatttttaagtgctagtttactattaagtcgcggatattccacaaattcttcaatttcctccggctttgcaaattctgtatgcgtcgaaagttaactgcggtattcgataacgatacgtgtttgctatcgccattgatggtcccgttcatggtatcgagccatatttgtccattttatagccaaacgtttgattcatttttatataatgacatagttataatcatatataatttcaatgtagtttttaataggtttctatttctgtaatatatttcggcgaacttagatataacaataaaagtttttaagttttaagatcataaatctttaaaacacgcgagattaagacaacgcgatatacgttttgtaaaggatttttttatgaggtggagaactttaagttggcattactgttcaaaatcgcgaccgacttaacatttgccgtgttattgccgatatatgaccacaaatgttggaaaaagtcatcgaatataatacgtccagatgggacttcattcgagccagccgtggcgtcatagtccagaaatcatatataaaatgtactgtcgcaagactatctttctgataaataaaattcattttgatcgaataatccatcgttgtttaactgcaattgataaatgttagttgaagctgctttaatcgatatagtcgcgcagaactgtctcgatagacaactgaggcgggcaccgcatttaaaatcgtcaaggctgcaggtaaaaggaatcacaggtagaaaactcttagatacagtttaattctcggtacgccaccagatgcaggaaaatccaaatggcttattaagaaaaacgactagggtttacacaggctgcacatacgagaattccgggtataaagagtggcgcctgcgctgggtcgtgacattattctaacgaaagcactggcgaaatggttcatttagtgactgaaaagaagacgcaggaggtggcaaccaaagtccccaggctccttcaactcggcggccacgtggggttcgacaccctaccggaccagctggtcaacaagagcgtccagaatggctttagcttcaatatcctatgcatcggcgagaccgctctcgggaaatccactctcatggacacactgttcaataccagttttggatctacaccgagcccgcacaacctgcccaatgtgaagctgaaggcaaatacatacgagctgcaggagagcaacgtccgcctgaagctgaccgtctgtgacacgatcggatacggagatcaggttaataaagcggacagctacaaggctttggtggagtacgtggacagccagtttgaagcgtatttgcaggaagagctcaagatccagcgagcgatggccagtgctcatgatggacgcgttcacgcctgcctgtacttcatctgtcccacgggccatggtctgaaagctatggatttggtgtgcatgaagcagcttgacactagggtgaacatcattcccgtgatcgcgaaggccgacaccatctccaagtcggagctgtcggggtttaaggaacgcataatggacgaactacggcggaacaatgtgagcatataccagtttcccatggacgacgaaaccgtgtccgaaacaaatgctgcgatgaacggccatctaccctttgccgttgttggcagtacggagtttgtaaaggtggccggaaagcaggttcgtgcccgccaatatccatggggagcggtgcacatagaaaacgaggcgcactgcgactttgtgaagctgcgcgagatgctcattcgcactaacatggaggatctgcgcgaacagactcacacacgccactatgagctcttccgccagcggcgcctacaacaaatgggctttgtggacgtggacagcaacaaccagccggtctccttccaacagaccttcgagtcgaagcgatccgaccatctggcttgcctacaggccaaggaggaggaagtgcgccaaatgttcgttcagcgggtcaagcagaaggagaacgagctgaaggacaacgagaaggaattgcatactaagttcgaccggctaaaacgggagcatttggaggaaaaggcccaactggaagaggcccgtcggcagctggaagaggattgccaggagctacagcgtcgtaggctccagatggccaatggttcgcacactctcaccttgggcaggggcaagaaaaagtagttaagtttagaatgttttcgattttactaaaactgcctatgcgattaaatttctacaaaccttacctatgactccactcctataccaagaagtatactaattttgatattttatttctttttattttaacgatctatgatttccaattaaacagtttataaataaattatattgaaagaattttaatttaggttacgagttccagtaattttagttgtataattaaatacaataaaaatataaaaaacaatattgaatgcgaatatgtctagcatatgaaaaagagtatacatttttcagtaatttaaaaataccaaaatatagaacgtttacatatgtatgtatgtatgtacataatgaaggttatgtttggacagcgttctctataatccagccctaaatatcgtaattaccagactaaatatgaattaaatgggatacttttcgcggaactgttttatgacggtcataacgcatatgtctcttcgaaatttgatcgcttggaaaccctggattagtcgaaacagctgtaaacgaacttcaggtttttcagccctttccgctggccgcttcttctgtggatgtggacccggctgatagcgatagcaatagctagctctccgctgttctcgccgcctctcgctcgttctctggcacgccaagtggaaaaatgggaaacaaaattataaatatgccagcagcgcggatcggaacgcaatggttagtcattctgtgtgtagcgatggcagcgagcggtactaacttggacagtggaatatgcccggtggctggggactccggctgccgcggaaatcctccagaccaggcgcgctacgacaactaccgcatttacaacgtggagttcgagaaccaagagcagatagaacttttccagaagctggaggagcagagcgacagcctcacattcatcggccatgctcgcgaggttggccagaagttatccattctggtagcggcgcatcgcgtggcagatatcgctgatctgctgaagacctacaaggtcaagcatagagtgttggtgagtttctagaaatggtaaccaatgaattaaaaactaaacgattctttccttgtcagacctacaactttcaggagaagatcgaccgcaatctggccgaagttcaaccggaaagcattgatgcctctcagctcgactggcagcacttcttccacctgaagaccatctacgagtggctggacaaaatggtcgagaagtacccaaatcgagtgaccgta

SEQ ID NO: 28775 - DNA, 1743 bp, DROSOPHILA
catttaaaatcgtcaaggctgcaggtaaaaggaatcacaggtagaaaactcttagatacagtttaattctcggtacgccaccagatgcaggaaaatccaaatggcttattaagaaaaacgactagggtttacacaggctgcacatacgagaattccgggtataaagagtggcgcctgcgctgggtcgtgacattattctaacgaaagcactggcgaaatggttcatttagtgactgaaaagaagacgcaggaggtggcaaccaaagtccccaggctccttcaactcggcggccacgtggggttcgacaccctaccggaccagctggtcaacaagagcgtccagaatggctttagcttcaatatcctatgcatcggcgagaccgctctcgggaaatccactctcatggacacactgttcaataccagttttggatctacaccgagcccgcacaacctgcccaatgtgaagctgaaggcaaatacatacgagctgcaggagagcaacgtccgcctgaagctgaccgtctgtgacacgatcggatacggagatcaggttaataaagcggacagctacaaggctttggtggagtacgtggacagccagtttgaagcgtatttgcaggaagagctcaagatccagcgagcgatggccagtgctcatgatggacgcgttcacgcctgcctgtacttcatctgtcccacgggccatggtctgaaagctatggatttggtgtgcatgaagcagcttgacactagggtgaacatcattcccgtgatcgcgaaggccgacaccatctccaagtcggagctgtcggggtttaaggaacgcataatggacgaactacggcggaacaatgtgagcatataccagtttcccatggacgacgaaaccgtgtccgaaacaaatgctgcgatgaacggccatctaccctttgccgttgttggcagtacggagtttgtaaaggtggccggaaagcaggttcgtgcccgccaatatccatggggagcggtgcacatagaaaacgaggcgcactgcgactttgtgaagctgcgcgagatgctcattcgcactaacatggaggatctgcgcgaacagactcacacacgccactatgagctcttccgccagcggcgcctacaacaaatgggctttgtggacgtggacagcaacaaccagccggtctccttccaacagaccttcgagtcgaagcgatccgaccatctggcttgcctacaggccaaggaggaggaagtgcgccaaatgttcgttcagcgggtcaagcagaaggagaacgagctgaaggacaacgagaaggaattgcatactaagttcgaccggctaaaacgggagcatttggaggaaaaggcccaactggaagaggcccgtcggcagctggaagaggattgccaggagctacagcgtcgtaggctccagatggccaatggttcgcacactctcaccttgggcaggggcaagaaaaagtagttaagtttagaatgttttcgattttactaaaactgcctatgcgattaaatttctacaaaccttacctatgactccactcctataccaagaagtatactaattttgatattttatttctttttattttaacgatctatgatttccaattaaacagtttataaataaattatattgaaagaattttaatttaggttacgagttccagtaattttagttgtataattaaatacaataaaaatataaaaaacaatattgaa

SEQ ID NO: 28776 - protein, 422 aa, DROSOPHILA; identical to SEQ ID NO: 1422

SEQ ID NO: 28777 - DNA, 11277 bp, DROSOPHILA
agtctcatatgtgtcagcggacagaaggacaaggatgtctgcgttggtgacggtgggtccatcttggtttgttcccctgacgcaatcttcgctagatatcaccaggtcgggatcgtggcctggggcgtcgattgcggcaggccaaacgtttcctcgaccttcaaaaatgtgtccatgttcaggaagtggattgatcgcaactttccaagcaactcggtggaaccgcttaggaactgtattcctatccacccaagaatttcgtcctataaaatgagatacatgttgctttaaatcaccaaacttagctaatgtaattacatatattgtatcaaatatatgtatttatgaaattaaattatcaaacggagtcgattttaaccacctgctgaacttcaggttaaattatttttaaattgaagcttaagtcttgggtataaatatttatcaactaaattgttattttttggtcgaggaatgtcataatattgggtgcaagagttttttctcttagactaccattctgctgattgaaagtataatatatatcattagtcaaatgcagtatgagatatttaccccaggaaataagcacatttgtttgatttgttcttgtgttcatttcatttcttcattttcattacagtgaccttattaagattttaattttttatccgtctacaattagtcttattgttgctggttttatattttcttaaccaaaatagtggaggctagtcaatgctatacaaacttgtcacgaaaacttaagttcctttaaatctggtaagtgcaccttaaccgccaaaatttcaaactcaccgaaaatgttaagccacaagtactcaataggcccgattgtcagcatcgatggcggcattcgatgtttccccaccgcgaacagagtggctggccacactggcgctcagctggcgctcagctggcgcagttgttgttattcttgcatttctacagcgcgaggtccgaattttcgagcgcagcgcggccacaattttccgggcgttagttaaccgagacgactagtttaattagcggaattgtgcgacgacgtcgtggttgaaattcaatttgaacgcccaggcggtagatcggtaaaatcgcgacatcaaagcacgagagtgagtgaaaagagaaccctggaaagtggtcaatgtgtgtgtatttggcgagcagtggcggagcactgaaaaaaccagttagctggcagtgaaagagattcaataacgtgttggtgggcaaaagaagaacaaattgtttcgagtgtgcgaggcgacgacgacgacatccaactggtccggtacgaagaagtccgctttcctcgctcattagcggcgctttcctcgggcccacgatctggaagtctggaaatcggcgatacctaaaaccgggccatagccaccactatcattatcaacaaattgatatacatatgcaattgcagcagcgcgtcatcagcacagcgcccatcgcctagcaggtgcgttccgtaccgtccgtcactttcgacattatattggtctgatcgggtttctctctctctctggtgcgtggtatcttctatgtatatactataactatgcatactatatatgctccgtaacaacacactgcattgtctttcgggaattgttaacaccccgccccggtggtggagcatctttggcatccattcagtcggttgcccattcatttgcctaacagactcttttctgcgccaaccgacgaacaagtaaagtgaaaggcggcggcacgcgttttcccatcttttgtattgaatttcgcttcggcagcgaggaaagcgaaatcgttcttagtcatcaggacgtgtggtgagaggaggagggtgggccaaatcaacatgcaaccgcctggcaacaggcaatgcgtcacaaaaaaacaaggaatttcaatttccaagctgggattactagttaactaaagcagactgtagtgcaggggaaggtggtgttaccggggtagaaattgaaggaaatcaaaggcgatcgataaaataataatatcgataaacaacatttgatgagacgaaagaaaagattcgtggttcaagttgttttactttcagccaggcatttttaaaaacttggatgcatttaaaaccggcaagacaggccaaaacgctgttgacccacggaccttatcgatttttgcagctgctgggcggctaatcattggttttgtggcgtgacaagtgtttcggcaccacacccactgtctgtatgtcagaggaaaaaagcgtaagcggaagtgatttcatagaccgaaactcaccccgaaaactgaaacgctgaaaggggcatttccgtgctttgtggccattgcctgccccaagtcgctagttcattttccgctattatgttgaggttaggactttccaaatccatgtgatttcccagggtgccggcttctgtgcgtcgtcgcaaaaatatgctgcacttcgggggtgcaaacagcatgcttttcgttttcgttgaagtttcacggccgaattgatttttccagcctagacattacaaaatgcctcgccgaagtggcgataataaagcgccttttcagttttgcagccagcacgcacatcggggcatttattaccgcttttccgttttccctcttacaaaactgtgaagttaatgcggccagcacgtgggtctacgcactgagttttccgttcctcagttttcatctggccaagcacttctcagctggccgccgaaaagaaaggggcaacgaaagacgcaaccatgaccaaagaaactcaaaactccaaacttgagcaatttgtaggcaaattaaggtgttaactaaccgtgaagttggtcagtgggaaacccatcgaagatgctctagcttaaagctcatacagagcaataaacaagtgtttctttgaagatcttcgatctgctcttataatcttagataagaaactagcaaagttgaacttaactgaggcagataagtatctctaggtttaacgagttatgatttctggcatatttctcgctgtgtattttcggcagacgagcagctcggaaattgtttgatcgattcgattccttcgtccgcttccgctccgccgctatcggctgttgccttttacccgcccattcgccacttgctaacagttgttttcgtacgtgagcagcgctcggataggcagatactccccgtcagatacacaagatagcttcctcttctgcctggatgcgatgcactgtgtccgctccgcgctctccgttctccagctcaccaagcggaagcaactccatttatgtaaattgcttgcgtgacatttcaatgcgacggggcgctttatgaaaagctggagcggcatggtccgagcgggatgagcggtggctgggaataatgggttgaagaatcgtgggtctggtctggtctggtagctagggctgccacgggctgctccgtcatgccaacagttggcaatcagtttaactgtgctttttatggccgtactttgcgctttttatgcgcactcattgccgcacatgtgcaatattactgcactaacgtttttgcaatcagtatcagatgtactcggaactggtgtgaatgaatctgcatgttttccatctgcgtgatgtttctactccgctttaattatccacagttcctcagtcgtttcatatcattaatacatgattgggcacagcgatcaatctttttgcacactaaatacttgtctttgcctacaatcagaagtaatagaaagatcggattttattgtttatcagatacaaaaactggcgcttatgtacatatatctacaattattgtttttttttgccacttccagttttaattatcccgaatttccgctccgatttcatcacccgtaatttgtgaactgatgaaaacaatacagccttcggattaacatattttggagaaacgttacaaagagataaaattcatatttgagtttagattgtcgggcggcgtaaacttggcccaaaacaaacattgccacggcttttcggctataattcgtttgcttaatttgctttttcgagctcgcagttcagcgaggtgaaacggttaaatgttttcaaaactgccccaatgttttcccttcgccatacgtagatacttagatacatatgtatatacatacttgacgttgcgtgtggtgctcattgttgtttggctgtgcattatgctaactagaccctaatgtcggtgcccgggtgttttgagtgctccacattagtagtttttgtggaatatgccccataaagggccattcgatatgtttcagccagggctgcgagttcattgcactggatcatcgaatcgtggagcaacgactctggttcgggaccatgccaaatgcaaaatgtcagcaatttatgaataatgtagtgagaaacacaggaatcgcagaaaacgtgatcggaaaatgccacaaaaacagtgcataaataataccaacatataattgggcagggcgaagcgacatttaagctttcgcttcgcccacagtccatctgaattatctgtggaaatagcaaattggatacttgtttatattagcagtgggtcgggtcttcgttcgccaactacaatcttcggtttgtttgtaatttagactaaccgctcgatgtcactgtttatttatgcattagcatcacgacacagggagatatttttatatattgtctttctaaggtttcaagctcgaataagcgattattacctacaacactgattaaaatgtcataaatataaaggcaaaacttaagtgatttatattagtatacataatatatgaatgtcaaaactgatggctgttccactggaaatcaatagaaatggggaaagtaaatctctcttcgaatacgccagatattattacatattcattttataattatattataaattttgcatttttcttaaccaaacggacaacaataaagtttaaactggattaataaaacgaacagctttaaactgaaatttcagtttgaatatgtttaacctatgctgagtatttttccagtgcagcgttttcttcgatttcattagatatggcaagctcaattttctgcttgtctcagtgcctttgcccacaaaatgttgacttttcgaattaagtttcaccgttagcaaagatcatgcggtctttcgctggattctcgcctttcggcagcgctgccggcgattttcgcattgagtcgaaaaaattgacctagtcaacgaaatggagatctccccaactgataactagtttgaagagcttttgcaagctttacaaaagcttttgcgctctctttgcaaagagaaaatgctcttaaaaatcaaaactattttctcttgcgctctctgcacctctagttttggcattggaatacactacttttggttttgtggatactacaaacaaacattgaaaataactataaccaacctttgggttcccaaggtttacgaacaatcaaaacctatactttggggatgactgttgagcacagatgtacgaagtggaatggcgatgggtacttaaatcaaggttcacctctagttgagggctcacctttcccctcatttccccctttagtaaaaataatattaagcagataattacgttgtttacaaacctacgaaaacaaaaaacaactcgggtgtttgacagtgcgctctaatgaataaaaacaagtgcagcgtcgattgcagcagaaaacagctcaattgataataacaactttatcgtgcattacgcaaatgaaaaatgtaataccattctctgatactttatgcctactttgtaatttttgatacaccctttaagcaaatacatacaatacagaaaacctgttaattgttggttgtgcaaaatgtatttttaaacatctccgtaaattattggcggcgaagttttgatgatttagacttcattattcacaaatttttcattggaaattccctaattgacttcacataaactacagtgtactttaattcaaaacagttgtttcaatacacaaattataaaatgatgattaggtatttttgagggaccaaaagtattattaacttcactaacaaagttgaaaggattttttcttaaggcgacactatatgcaaagtgatattgatcgaagtgagtgtagatgcttgaggaaagaaattcactaacaattttcgataaatagatataaagcttgttataaaccatcaaataattattttggctgccttcagattagggttatattatgaatatcgagttaagaaagacatagtgagggtatcagaaacttggcgacccgaaatgaagtggctatccgatgtcccatgcgcgtgtcgatcgtgcaatggtgtgcgtagatatttggtcacatacatatgtgtggctttactttgctgtaacaaaaacaagttaataaaacggcttttaaaaacagagttcaatcatgtgcttctgaaactaactaaaactcgcagtcgtagatactcttacaatccccacacttgtgtatatcgcccccatccaatccgttggggcaatcaaactcacataatgttgtttacacatttgttatttttaagtgtgcttttctgcaattcgaccagaggcatgtgcacttgttgttgcggcctgttgttgtttacagcaaactaaagctcctttacatatccaacccaccgttttccacattctcagcgtcgagccctccgacggcgaccaatggcagccgagtaaacaagctgcgggcaaaacaaaacatacataagcagccggcaacgcggaagcgaatttgtttacgtcttatccaaacggcaattaaatatcgagccatatctgtatctacgactatttactggttttatcggcaaacgctcaaactatgcaggcatacgcagcaggaatggcttagtccttagacttgtcaataaagtaaaaccttttttttaagatacaaataacaatagaagcatacagtatttgtatctgtatatgtatagtcagaagcatctgctgcacacgtgccaaaaagattcaaaaatgttacttcttgtgctggttttaagcgtttatacctacgccattttaccttccacttgatacattatcaatttcgttactatgtaaaaagaaacataatcttgtgtaataaatcaagtccatgaggctaacaaaagccccattcatttccactcttcgcaccctttagtcatatgttttaaacaaaaacgagttgattgactgcagaaatagatgaaatgtcaacactgccccccagcaaatgaccctggatgttataatttacgataactctcgggcgtgttagttcatatgaagctctttttgccagaaacctaaagccgaagcaactttttcggatggcaaggtgattgctcgcaccggtttttttttttttttttttttttttttttgtcttcgaagggggcctgccctcccagccggcttccgcctttgggggcacactcaattctatgctatgctccaacccaactgcgtagttcgcccaaccggtgccatgtagtatctgccgatgtatgtcatgctatatgatcgctcctcctatatgtatgttcgcagattcttggtctgctgaggcgcgagcaagccacacgcgctctccaactatttcgaccttgatgggactagcggcattatctatcaactcgcggttgttttgcttgttgtggcaatctgaatatattacatatagaaccggatcgcacgaatgttgtacataaatatgtacgtatgtacatacatatatgggaatggtgcagatacatgtgaatgaaggggctcgtctcatgcttgggatgtgtgtaacgtgcttttaattaaagctgtgaggaaaaccagtttttgatggtgctgtggattcgaaaaacatttccagatctaagcataatcgttgatagttttaatagaacataaccatatcactgaaggtcttagggtcatattaatcaagttgtcaagcgtgtgaagccattgaacatctaattatcttcagggcgcaactcacactattcacgttgctttgggaacctgagtgccggtaaacaaatcgaagcaagtctgtgccttaaatttctctgggcctttttattcaagagacttctctaaatcgatcaaaatttaagtgtgtaaatgcaatttatcagatctatcagatcagtgtgccagcgtcattcccctcatgtacgtataattagcggagattcaaaaggttcatgaaccgcggcttttctccggcggaagtgcttacacatgtaactgcagaggagtggggcggggaagtggctgccatcaagtggccaccttcggccgctggtggctcagttcactttgacggactgctccggacggacgtggtgcgataaaccctcggttccaacccgtatcttttgccgagtcccttatcgtgccaagttttcttatcggacattggggcaatcttatcgccagcaccagaaagtcgggtaaaaagtggtggaaagcacctagctcagtgtgactaaaattggtcggaattcaatgtgttttttcgcagctcttcgctgttatgctgcctcagtagggtaatgatttatcgattgattaccaagttgactaaaagattataagtgagagtgtttatgttattaagaccccatctaagaactattcgtggaaaagagcccgctggcacgtgtctaacctcaaatatcaaacgaattcaataagtgctactgacctaaactttcgaccaagaccggtgataaggagtgaccaaagagcactacaagaatgtactgggctctcaatatcgatctgtccagatcgatttctgactcatcgctccataccagaggccttggtattttcacttcccgtttgcaatttacgaccgatttgaaccgacaaaccgattagataaacccgtagcttggttgtgggctgtactttacagtgttaactctgcgctgacatacacacacgcacacacacatctgccaattaatcgccactaactcacccaagcaatagccacataaactactaaacgcaacgcctaacaacgagtgtaatcgcctaatcgcaagagcatccccatttcttctacgcacacagatcagtaacaggatcaagagcaaggtaaccgtccaacactacatgtcctaaaactaggaacggttctccagcccaaggacttatcgaggacactatccaatcccagtcaatcatgccgctcttcacaagaaaatcacccaagcaaggacccacctcggatgggggctcccagttcggcagtcgctcctccatgaactccgggtcctcccagggcagccacattagcaataacaacaacaacagcattccggagaaaacaaagcccccgctggtcttccactgccaactggcccacggcagtcccaccggtctaatccacgacttctccagcgttcgagagctgtaccagaagattgccgagtgctttgacatatccgagaaggacattctcttctgcaccctcaactcgcacaaggtggacatgacgcgtctgctgggcgggcagatcgggctggacgactttatattcgcccatcgcaaaggtcggcccaaggagatcgagattgtgaagtcgcaggatgccctcggactgacgatcaccgacaacggggccggctacgccttcataaagcggatcaaggaggactcgatcatcgatcgcatcgagcacatcagcgttggcgatcacatcgagaagctcaacggccagaatatggtgggcaagcggcactacgaggtggcgcgcatgctgaaggacattgccaccggggagaccttcaccctgcgcctggtggagccagtgcgaagcggcttccagggcatcggaccgcgcagccagtcaagggcgtcgggctcggccggaggaaagaactatggcagcggcaaggagacgctgcggttcaaggccaatggcaatgcccagatcgagccgcagttcgatgaggcgactgtggccggtatcgaggccattaataacctgctggagtccttcatgggcatcaacgacacggagctggcgtcccagatctgggacttgggcgaccaaaagtccaactcaatggacttcgccgaggccatcgacaactcggacctagagtcgttcggcttcacggatgacttcatcatcgagctgtggggtgccataacggatgcccggcgcaagtccacgaccagtcccaagtaattgggtaaccataccagacgcttttccaataaatgaggagtgctattatctactatttgagaacgttttgttttagagcctagttttatttaccacatatcatgctacaatcccatatacaaacatatgtcgtctgcctttgccaattgtttagttatttgtattcttcacggtaacctatttattatatatatattttttgcgttcagatgaacggggggatgtgccgaggcatccctactatgcatatatttttggtacaatttgtttgatgtacatacatacatacgtataactatacttctttagttttatcctttaaacgatacaaatatatttaaattatttaaatcggatgtgattttggttattttggttttttatttcgattgttattgctctctgttttggtaagtttgtttatttgctcgggcctttaggtattatttgactcataaataagaactattagtttttcgtaggcgttgttatcttttgttggcacacagatcgcatggcattcggaaaatattccacagtccccaaatgtgacgaattgtttggctgcttttctctttgcgatttttctgtttttctataatttgcttgtatagcgacggtcctagtatacatatttgggccatggatcatttgaaatgtcattagtatattctcaagcagacgacttcctgtacgaaagaacaatctagtcagtgtgaaaacatctgcagtgacgtagatcgcaccatcccacagtgacgctctattcgggttccagattggatcagatcatacatataacacggattcctttatttattacatgtgcaaagcttttgattgcgcataaacagctgctgtttggcgtgcgagcagctgataagcacagttattaaggcttgccaaacgagcgggagagagagattggattttgcacattacactgacaaaaatctatatatacagcggaggtcaactgtgcagttgcttttgaagaaat

SEQ ID NO: 28778 - DNA, 1259 bp, DROSOPHILA
cggccacaattttccgggcgttagttaaccgagacgactagtttaattagcggaattgtgcgacgacgtcgtggttgaaattcaatttgaacgcccaggcggtagatcggtaaaatcgcgacatcaaagcacgagaatcagtaacaggatcaagagcaaggtaaccgtccaacactacatgtcctaaaactaggaacggttctccagcccaaggacttatcgaggacactatccaatcccagtcaatcatgccgctcttcacaagaaaatcacccaagcaaggacccacctcggatgggggctcccagttcggcagtcgctcctccatgaactccgggtcctcccagggcagccacattagcaataacaacaacaacagcattccggagaaaacaaagcccccgctggtcttccactgccaactggcccacggcagtcccaccggtctaatccacgacttctccagcgttcgagagctgtaccagaagattgccgagtgctttgacatatccgagaaggacattctcttctgcaccctcaactcgcacaaggtggacatgacgcgtctgctgggcgggcagatcgggctggacgactttatattcgcccatcgcaaaggtcggcccaaggagatcgagattgtgaagtcgcaggatgccctcggactgacgatcaccgacaacggggccggctacgccttcataaagcggatcaaggaggactcgatcatcgatcgcatcgagcacatcagcgttggcgatcacatcgagaagctcaacggccagaatatggtgggcaagcggcactacgaggtggcgcgcatgctgaaggacattgccaccggggagaccttcaccctgcgcctggtggagccagtgcgaagcggcttccagggcatcggaccgcgcagccagtcaagggcgtcgggctcggccggaggaaagaactatggcagcggcaaggagacgctgcggttcaaggccaatggcaatgcccagatcgagccgcagttcgatgaggcgactgtggccggtatcgaggccattaataacctgctggagtccttcatgggcatcaacgacacggagctggcgtcccagatctgggacttgggcgaccaaaagtccaactcaatggacttcgccgaggccatcgacaactcggacctagagtcgttcggcttcacggatgacttcatcatcgagctgtggggtgccataacggatgcccggcgcaagtccacgaccagtcccaagtaa

SEQ ID NO: 28779 - protein, 336 aa, DROSOPHILA; identical to SEQ ID NO: 4959

SEQ ID NO: 28780 - DNA, 3814 bp, DROSOPHILA
atgtgagcatataccagtttcccatggacgacgaaaccgtgtccgaaacaaatgctgcgatgaacggccatctaccctttgccgttgttggcagtacggagtttgtaaaggtggccggaaagcaggttcgtgcccgccaatatccatggggagcggtgcacatagaaaacgaggcgcactgcgactttgtgaagctgcgcgagatgctcattcgcactaacatggaggatctgcgcgaacagactcacacacgccactatgagctcttccgccagcggcgcctacaacaaatgggctttgtggacgtggacagcaacaaccagccggtctccttccaacagaccttcgagtcgaagcgatccgaccatctggcttgcctacaggccaaggaggaggaagtgcgccaaatgttcgttcagcgggtcaagcagaaggagaacgagctgaaggacaacgagaaggaattgcatactaagttcgaccggctaaaacgggagcatttggaggaaaaggcccaactggaagaggcccgtcggcagctggaagaggattgccaggagctacagcgtcgtaggctccagatggccaatggttcgcacactctcaccttgggcaggggcaagaaaaagtagttaagtttagaatgttttcgattttactaaaactgcctatgcgattaaatttctacaaaccttacctatgactccactcctataccaagaagtatactaattttgatattttatttctttttattttaacgatctatgatttccaattaaacagtttataaataaattatattgaaagaattttaatttaggttacgagttccagtaattttagttgtataattaaatacaataaaaatataaaaaacaatattgaatgcgaatatgtctagcatatgaaaaagagtatacatttttcagtaatttaaaaataccaaaatatagaacgtttacatatgtatgtatgtatgtacataatgaaggttatgtttggacagcgttctctataatccagccctaaatatcgtaattaccagactaaatatgaattaaatgggatacttttcgcggaactgttttatgacggtcataacgcatatgtctcttcgaaatttgatcgcttggaaaccctggattagtcgaaacagctgtaaacgaacttcaggtttttcagccctttccgctggccgcttcttctgtggatgtggacccggctgatagcgatagcaatagctagctctccgctgttctcgccgcctctcgctcgttctctggcacgccaagtggaaaaatgggaaacaaaattataaatatgccagcagcgcggatcggaacgcaatggttagtcattctgtgtgtagcgatggcagcgagcggtactaacttggacagtggaatatgcccggtggctggggactccggctgccgcggaaatcctccagaccaggcgcgctacgacaactaccgcatttacaacgtggagttcgagaaccaagagcagatagaacttttccagaagctggaggagcagagcgacagcctcacattcatcggccatgctcgcgaggttggccagaagttatccattctggtagcggcgcatcgcgtggcagatatcgctgatctgctgaagacctacaaggtcaagcatagagtgttggtgagtttctagaaatggtaaccaatgaattaaaaactaaacgattctttccttgtcagacctacaactttcaggagaagatcgaccgcaatctggccgaagttcaaccggaaagcattgatgcctctcagctcgactggcagcacttcttccacctgaagaccatctacgagtggctggacaaaatggtcgagaagtacccaaatcgagtgaccgtactggatatgggcagcagcacccagggcaacgcaattaagggcgttaagctgaccagcaatgctaataacaaggccatcttcattgagagtggaattcatgcgagggagtggatttccccagccgcggccacttatatcatcaaccagcttctaacctcccaggatcctaaggtgcaacaactggcccaggactacaactggattatcttcccttgtgtgaatcccgatggctataagtacacattcgagcacgaccgaatgtggcgcaagaaccgtcagctgtttggcacctgccgcggcgtggatctgaacaggaactaccccgaccactggaactcaacgggatccagcagcgatcccacccgctacgattttgcaggaccctccgctggaagcgaactggagaccaagcgcttgatagatttcattcgcgcaaatgcgggcaaagagcaaataaagacatacattgctcttcactcctactctcaaatgctaatgttcccatatggttacaccaaggagcgggtgtccaactacgatgacctgcaggagttcggcaagaaggcatcggcagcaatcaaagcggagaacggtagggattacgtgagtggtagtctgtttgagaccatctatccgtcgagcggcggcagcatggattgggcgcattcagaggcgggtattccgattgcctacaccttcgagctgcgtggtccgccagacagccaggacttgttcattctgcccgccgtggagatccagcccacggccagcgaagccttcactgccattcgtgccatcgtagaggcggcggccgagaagggctactacaagtaagcacaatgatattatgagcaagcattttgtacgttcaacgatatattactttatctttttaaaaataaacacacgtaaacgcgaaaggcaatgttgtggttacactttatagcattaaacgataaggatcaggcgggtatgtcgcttgtgcgtgatatatggtcagattagggtaattctaccccagtaaaattacggtttaacggccctggtgatgtggtttctaggcgagagccgaggatcgaatatggcctctatctgtacttgacaatctgcaagataaataatttgagtaccttatatactttgcgctaaaaagttgatttataccattttccattagaaacaggcagcgatcgtaaagaataatgctctccaccagcggagccatcattaatcgaagtgtgtagaatgagactatccgttgccagttggccaaatctgtttccgtctgctggttacttagagttcggctgtccagtgcttcaaagcgagtaccctgtacggctttctggaaatatctgcaaaaattggtttagaagtgtatatatgtctttggaattggtcttcttactggtgaaacgtcatgccgggtgagtactttacatttcgcagggcacagtggcgaagctctggaaactgatgcactattattcgctcggcggcggctcttagggagtgtatgcggagatgttggtaatcccccatcctcagacgatcgtgatacacctccatagcgtgacaggagatctcacgggcctcgtagctgagttggcattcgtttttatctttgagttcactgctcaacgggtacccatggacatgctccctgggatgggtggactgggtagtcatcttctggtagcaacagcccacaaaattgaggaacttggcctgcgggcagccgagaaacatgcgcatcagtgtcgggcccagattgccacagggatgcaggcctatcacaccaaatcggaaattgtcgtctgttagctgcagggcctgccgaatgctggataggaactgctctggcttagtgctgctctccaagcgatgtgtaaggtgtactggtcgctgaaagtgtgtggtttcat

SEQ ID NO: 28781 - DNA, 1755 bp, DROSOPHILA
tttggacagcgttctctataatccagccctaaatatcgtaattaccagactaaatatgaattaaatgggatacttttcgcggaactgttttatgacggtcataacgcatatgtctcttcgaaatttgatcgcttggaaaccctggattagtcgaaacagctgtaaacgaacttcaggtttttcagccctttccgctggccgcttcttctgtggatgtggacccggctgatagcgatagcaatagctagctctccgctgttctcgccgcctctcgctcgttctctggcacgccaagtggaaaaatgggaaacaaaattataaatatgccagcagcgcggatcggaacgcaatggttagtcattctgtgtgtagcgatggcagcgagcggtactaacttggacagtggaatatgcccggtggctggggactccggctgccgcggaaatcctccagaccaggcgcgctacgacaactaccgcatttacaacgtggagttcgagaaccaagagcagatagaacttttccagaagctggaggagcagagcgacagcctcacattcatcggccatgctcgcgaggttggccagaagttatccattctggtagcggcgcatcgcgtggcagatatcgctgatctgctgaagacctacaaggtcaagcatagagtgttgacctacaactttcaggagaagatcgaccgcaatctggccgaagttcaaccggaaagcattgatgcctctcagctcgactggcagcacttcttccacctgaagaccatctacgagtggctggacaaaatggtcgagaagtacccaaatcgagtgaccgtactggatatgggcagcagcacccagggcaacgcaattaagggcgttaagctgaccagcaatgctaataacaaggccatcttcattgagagtggaattcatgcgagggagtggatttccccagccgcggccacttatatcatcaaccagcttctaacctcccaggatcctaaggtgcaacaactggcccaggactacaactggattatcttcccttgtgtgaatcccgatggctataagtacacattcgagcacgaccgaatgtggcgcaagaaccgtcagctgtttggcacctgccgcggcgtggatctgaacaggaactaccccgaccactggaactcaacgggatccagcagcgatcccacccgctacgattttgcaggaccctccgctggaagcgaactggagaccaagcgcttgatagatttcattcgcgcaaatgcgggcaaagagcaaataaagacatacattgctcttcactcctactctcaaatgctaatgttcccatatggttacaccaaggagcgggtgtccaactacgatgacctgcaggagttcggcaagaaggcatcggcagcaatcaaagcggagaacggtagggattacgtgagtggtagtctgtttgagaccatctatccgtcgagcggcggcagcatggattgggcgcattcagaggcgggtattccgattgcctacaccttcgagctgcgtggtccgccagacagccaggacttgttcattctgcccgccgtggagatccagcccacggccagcgaagccttcactgccattcgtgccatcgtagaggcggcggccgagaagggctactacaagtaagcacaatgatattatgagcaagcattttgtacgttcaacgatatattactttatctttttaaaaataaacacacgtaaacgcgaaaggcaa

SEQ ID NO: 28782 - protein, 453 aa, DROSOPHILA; identical to SEQ ID NO: 5352

SEQ ID NO: 28783 - DNA, 11920 bp, DROSOPHILA
actcgtgtagcgtcgtctctagcgtccatgctatatgacccggagcgggtccatgaagttgttgataagttggaaatatgacaaatatacattggccgcaggtgaatggatagccatgcggcagcgactttgttgtcggaatcttctgtatattggtgatttatgcattttgattaacttgttaatggcccgaagagtttttcgcgtgcctgagaagatactaagcgagtcgaaaatagacaacacgtccatgagcagatgagccaatggcttaaagagcacttgcctagctaaataataagaatgtctagcaaaaggtatttagcatattttgctattcgaattgctggcatcaagatgaagcaatgatgtctcaaaaacacacattaataaagaactaatttattgggcattaaaaatcaagtatacgacttaatgctattaagtatacgcactgaagttatcaaaaattaagtattcgcgccatcgaattcggagaaagtttcgaaaagctttgagctttatagtagctagcttttgtatgtgtctatcaaagcgccgtatctacatttattatacatatcgatactatgtaaaattagcttactgtttttttgggtctttattgacatataccataatttgtgtaagagtataattaaaaataaatagattataagagttaattttttttaatttataagctatgtttagctttttaatttgacttttgttctatttacccactttccaggaggattagattcgcggaatagctttaaaaagtttaacagtaaaaagtttggcgcataacaaaacattttaatttggaatacattttttgaatatttttttatttttgttggacttgctgttacttaaaaatattgcaggcttaaatagctccatcgagttaattctatttggtcccactgctctgagcagtcgaaagtttaaagctgggccgaaagctttcgctaacttcagtgtcgaacgcggatttcagacgagcggtggccgagaaagagaagaagaagtgatttgagccgagaaactgaagcttgcaacacaccgaaaacacacacacgaacacggcacaccaacacacacacacacactaacccgaggagctgaaatcgaacgcgaagaacactgagcgaaacgtgcaagagaagtgattaaagctgctacccggagttggagtttgattcattgatcgacgaaccgagtgcgtaaagcccgtaaactttggattgcaaatatacacacacgcatacaggcgcagccaggcaagcacacactcacacgaacacaccgccacacgcacacactctcgcagagagttacctgaataaccgccgcgcctaccaccgtcgaccaactaccgcgttttcctttatctcactccacaccactccgcctaccacccaccgcccctcgcccgcttaacggtaaacggagtatctctatgtgtgtgtatctgtgtatgtttgcccacgcatccgcctgtgtgtgtgtttgtgtgtgagtgtgttgtcttttagtgttttcgtttcgaaaaagttgtgtgtgcattttccaaaacgagagaaataatagtcagtgaagtaacgaatagaaaagaaaaaaacgaagcaggcaaaaacaaggtctcgattatacaataaacagcattttgattttgtttctgtggctggtgaaaaagcgttcttttgtaaggagagggtgaatataaacacaaatacagaggcaattacgaagagacacgcgcacacactcacaaaataagaaacaaaaaaaaaaaaaaaagtgaaataaccttcaggagccgagcttgtgcaacttccacttctcggccatgccactaattatttatgatttcggtttagtagcgagctacgttaagttcattcagtgacaggtttattcaccaagaacacttacctcgtgccaccccaacgaacgccccccattttccgagcatttcccaaacaattttcccacccgctgcctcccgcaccactttgtacaaacgtgctgcaacatcggctgcgaatgcattagaaatttatgcgaaaatacataactaagcgagtgccggagcagcatttgaccggagcctaaaaactggcttttcctcctccctggattttcgtgcgctgaatttcaaatatacatatatgactgcagtttcgacggctttcccgcctgtcagccactcaagtcatcatcgaagccagctgcatggcccactggggattcgtgggggtcacagttaattgccagcacagcccaattatcaggcgatattgaaatggccatgggccatataatcgctcgctagtttagtccaaatcccacaaactaggcaaagttggtccttaaattgcaaataggctgttaaatattaacggccagctattggggtttttgctttaaaagcactaaaatgatattatctaacaacttagttaaccaaatgatgcaatactgcagagcattatgttgtagaacttaaacatgatagtcgaatccattatgatagatcttttagtttttaccatatactagactaacaaaaatttacatactttgccccactgtgcgtgtccgcttaacagaaactgacaattattaataagcgttttagcatttgccgccgcacaaatgtgtgtgcacacataagcacacagttgtgtgtgtggaatttccctaatagaaatgtaatttcccccaaaccccaagccgccccacaaactggagttattgttcgggcagttggccagcttattggggtcattggagttggccaggcacgacaagaacaacaatcgctgaatgagaccattgtcagggcatttggccattcacttaatgcttcagcaaaccggccattatataaatgcattctctgctctgctgtttcgtcggaagaagaacgagctgactgctgcagattataattattattcgaggactgtgcgacaattcgacacaatttagtcgaagataatgccgggaaaattgctgcaatttgcgctcaacaatggccaacgggaaattaatcccgctgacgtcaggtgaaactaggcccacagttgcgccgactaatagccaatgattgggaagctatagctgtagtagctggaggttaggccttgacgcctatgacgcatccgacatgaatataaacagcaaatatttgggcgacgctgactggaagatacacaaatcggaccgctttccgcctggcactgtttgttagctctgggattggaattcggaatccgggccagagatcagaaggcaaaggacaatgccaacaacctcgtgcagctcgcacggactggcgcacacacggcgtatacttaatgcatggcatctgaatgctcggtttcggtccgtgccaagcgcagcccagttggattcgtttgcccactccggcgatgtaatgccaatcctgctacggtagcaggagggctcctgagctccttctgtagtttttatggcaactgaagccaagtattttgtatgtattttcggctgtttctgacttgttttttttttttttttttggaagcagcctggctcggcaaaggccttggcatgtgggcgacaatttcgcatttattatgcaacagtttggcggattgagcgtgtagcgtaaacaaagttgctacgagcatttgctggcccaaattggaacggctggcgatgggggaatcgcatttattctagactcgttcggtgtccgactgaaaagtaccctggagagccaaccattgagctgaattcttttactgagtatattgcatatgtatgcttaaaggtataaccattctatttaattgcttttatctaacgcaatatatagttcgtatgtgctattcaatcaataacaatgtcacatgttaccttgcatatataggagggattatattgcgctggttgccaaacatcctgcctttcgatagtaaacaagttgtataatgtggattttaccgtctattgatcttaaactgtcgtctatcttaaaggcaatttgctggtcttttacgattatacatattccttatggcctttgcaattttctgcagttctttcaatacaaagacaataaccttcaaagatttccgtatcattgaaccaatatatgcggatgacccttgcccctgcgatatttacatttaagttgtttgcctcctcctgcaacttttcacaatttttccctgaaaaccccacacccccggaaaagcaggtgggtcggtgggggtggttgggctggtggggtaactcatgtcatgcagcacagttgaaataatgtaattgactcgggcacgccaactggcaagacaaatcaaggcgaggcgaaggaaaacttgggcttgggagtcacatgtgcgcccatttggactttagccagtgggtggtgggtggtgtaggtggtgtaggtggcttggcagtgatagctcaagccgaatgcaatacgaggaataactgcaaagccagttatcggccagcacccagtcagccacttgcaaccacatgcggcagcttaaaacgaatctctcggcagcaggcggggaaaacaattcaaaagtaaagtgccaggctgattggttctgatttaaagagaaaataattcaaaagtgctccaatgacttagccaagcgaatttgaaacgtattcagactaaatgtaatttaaatcttgtaatcattaatttgatcaatgctgatttattgtggccgttgtttgtgaatgatctctatacgttcttgccacattaaaaatatttatctaatgatgagtaagttggaacaatgaaaccacacgttgatgaccaatttcggtgctattccgccactatatgtcaacgccagtagcattttgtttatttgcattctacataaacgagttggtgtagcgaggaggttggcggttttccggcgtagctaatcaaaagccaacactgagctgagacgtaatttacgtatttctgttggccattataccttagagcaaaaacaacagaaccgaccgataagcaaacaagctgtaaaatatttgtcaattctgattgctggttagaccagtcggacttgtatacagggtgctcgtccgcccggtgaacgaatgaaataagggggtaaaccttatgcaaccccacgatcaacaaacgatcacgtaagcgctccatcactttccttgtccctctgatggatcatcggttggccattaggagcatttgaatgtgtggctaattgctatttgccggctgatctggcaattgccattgctgacgttattgctcttccatagacggaaggaacacccccaatgcaactcatccggcaatatatctgctttgtttacccgtcatcttatctgttttaagattctccgccgtttgatggtgtgggtttaagatgccaatttagattggacagattggcttcacaaactggcttttttcatttggggtataatagtttcgtgaatcagtttgcaatgcaatgattatgtatgatgaatagttattatatttcccctgtatctttcttgataacacagtgtatatgcaggaaatatctaaaacgtatctcactaaaatagtaagttggtttgaatatggtaagggaagagtatttgttttaagtatcttttaccggtagaaactatatggttttaaagcatatatagtaggttaatataaatattactagccctgcacttcctattgcttcaacgaattatgtctaaaattagtttctctctttcgtgggacgttgagatcagtatttatttctagaatgaccgtcattccgttcagataacagatattcccttcaaatccacgatgtttactcaagtgctagtggctgtggaaagttttgcattgtgcgacgatagccacactcgacacacatcgcaaagacaatagccgcgatatatatataaatatatatatacatatatatagtggctcgattccgaaagtgccaatttgggtcacattttgagatgggtcctcgctctgttcacctgagaggaaaagggcaaaggtcgaagggctcaactggtgggcagtcggtccgcccctgaagcgttttgatatggcaattaagagcgcagctgcagtttgcattcgccagcgttttagtagctgcttttgtttttgctgttgctttcaccattcacttggccagtgacgcacatgcagcaggtgagaacaagagggaggtgggtggtggatactttcgctgcattcggccttgcattacgacattctttagtcggagatgggtactatcataaaatatgacaaaaaaaaataaaaaacggttagaatacccataaatagcttatttaaatattgctcgaataatatagtgatatttaatatcaacagagatcaggcctgaatagcttctcactttgaaaaagttattagacttctggcactactgcagccctatctcgcaccctcaacacaaaacattttcagcttttccagctttttgtgtttacccgcgaattaagatcttccgtctacgtgatgacaactaacaatgacaattagaatgtaaatatttatagatttcattcgttgccctcgcagtcgcagatttgggcgaatgcgaggtgtcgctcggcaccattggtgattcattcgcggagttctgggctctgtgaacaccaaacccacgcacacaagtcgaaactggctaaagccggacaacgagttgattgtaaacaaattcaacgaccgaaatggttacggcggagaacaggttatgttgggtacaactaaatttagccagttgaagactgattgatggtcaagctaatggtgagcctgaaactaactacagcttttggtttattcgttacagagcaatgcgtctcgacacgaactcaaatgtggacttcaaagcattcgaatccagctcaagctcatgtgtaagtagtgccaagcaagcaaacgccttgaatagcagcactcacaattcccacctttagcctgtcaaattggataacctggccacctggggtggctcacagaaaacagacacacgactgccgatcacggactactccaatctgggcggaccccggcacaatcgcagtccctttccactctgcaaagatgtcaacaatcgcttcgtaatctggttagtaccaaacaaaatgatagattattttgatatatcatgatggaacaataagtatttcatttaatgtttttaactgccacaaattacatacatatatgaattaatagtgtaaacataaacatacaacttgatgttagattataaagaacttagaatgtagattagttacttgtcaatgataaagttgtatgcatatggagataaccaaatgaatatacctatatcgaccatgttgattacaatgccatgttttttcttgatctatcagggatggggacatgaccactctggaggtggacgccatcacaaacaccagcgatgagactctgactgaaagcaatagcatatcggagcgcatcttcgcagtggctggtaatcagctgcgcgaggagctgagcacaacggttaaaggtaagttgggtctgaaagaatgcaattctatataatatctgaaatatctgccacttagaatgccgcactggcgatgtgcgcatcacgcgtggatacaatctgcccgccaagtacgtgctgcatacagtggcacctgcctacagggaaaagttcaagacggctgccgagaatacgctgcactgctgctacaggtgagtctgaagttttgggaactttctactctctgcgtagttatatatccaaaattgaattagaaatagatcacattaacacttttctaaaaaatttaacttgagtttgttattatgtagaatattgattggtagtgtaaaagctgctcctaaaatgttgatccaataccgactgtctataaatgcattaacatgatgattagaacattttctgtgactaatagttgtagtctactttaagaaagggaattaacaggcaaatacttaatacagagatttagatttactcgaaacttgtatacttgcactcattgtgttgaacaggacaaaatgtttactcaataggacgatgtaagatgtaagatgtataagtattctagtatatattgtattatgtaacaaataaccatcggttgtaattaaatatgtgcttccctcttccccagaaatgtcctgtgcaaggcgaaggaacttaacctgcacaccatcgccctgtgcaacatcagtgcccaccagaagagctttcccgcggatgtggcagcccacattgccctgcgttagtaccaaaagatatacattcacaacccaaatctttgaactaatcaaaatctatttacccaatgtgcaggtaccattcgtcgctatctggacaagtgcaccctgcaggttgtgatattgtgcgtgggcagcagcgagcgcggcacttacgaggtcctggccccactgtacttccccagggatcagctggaggagcgcagtgccctgtggcagctgcccaaggacattggcggcgagttcggggagccgcaacatccggatcccgatcgccagatacgcatcatccgcaatccgcagcacagtgtccacatgcgtcatcatttaggtgagtaacgaagcacgaagtgtataagcaacttggcctttgatcccagaagtcagatttaaacataaatattttgtaatagaactgagtatatgcaacgagcagagtgtattagccagcgaaatgatagtgtatcttgcagtaaagatcatttctatggacatagcacatatcacatttctgattgtagctgtgcgattgtggctttcgtcactgctttctcaccggcggcttatcaatcggctgtcgatgataaagacggctatcaacatggcaatgattctacatgccgtatatacagttcctttgttgcctgtcgataagataagaacacagcagtggaacaagtgaataacgcatgaaacactagcgcaatatacgagaaattcgctattgtctgctatgttgactggcctttcgacttctatggcttcagttacgctgcaaagtcggtcgagtgcgggtcacttggcagtagttgcattcgtttggtcgcgcgaaagtcacaaggttttgatatttgggccaccctacccacaacatcgaaccaattataccaactaacgtgtttgtaagtgcttgccacgcagaaacttacctggctcacttggaatatgtgtcataaatccagtcaagagtaaaatgtcaatcttggtcaactaagttactgtgctagctgacaaaaagctgagtgctaggaatcgaacaaaatttcgttgcatactttcgggatggatttctgcttgtgaaagtgtaaattcccttgtagttctacaagtaaattatttaagggaaagcatacactaattaataattgtttaaatttactgtgacatttaattacatttgactttggtacttttatttttcttaactaaatgttaaaaatataattatatttctattattttaatctagttaaatgtttggaataaataattgacaatcgttataaaactcagtttattgtgtatgctgataattctttccgtttacaataagttccaataaaatttgtagattttggatatctagttccttttcaagtaaaatgctatttattatatagaaatttaaataatataatatcagtaaaatgcataattagaacttacctaataacccctatagaacccacaaaatcttgattagttaatcttcgactatatcgtcttatttgaacatgtaagcgaaagctaataacatttcgcattcgtcttacgttggcttatcatcagcagtttgttaacttgctctggccgctcttatcacgaggagtgttagtcaagtgttttggcctggccaagttccgttctgggcctaaatcatgtcgtcgcagtcgcgttatcagtcttatcagttatccgccgagagcgatgcaaagcgagcgctgaagagtgaattagtaggggagaggggggagagcagagggcagcatccagttttgctcaacgctcgtgcgtttatccgctccgctgctgtgccgtctcaaccgcccggagctggcattcagttcgactcacatttcgcatcgctgaagttcgcggattacagaaagcgtttgctctgcgggcataatccaaatccaaatccaaatcgaagcagaaatccagcgcagaatgataaacaactcgtttgagttctcgtgtaaagaccaaaagccacaacgcccccaaaagaaatacaaagaaaaattgttaaaagatcaggagttgcaagttaccagtctcagttcgatgaagataatgaatatatttaatacctcaactgatgaaacgttttcttgaaaatatcacaatatgataagtgtatttttagaatccctatataaagttgcatgtactttgagctaagtccttcctaaatcctaaatcctacaagtacctcaaactgatttcgttataaccatttattaaaccccatttaccatctgttatcttccgcagccgacgacgattcagacgtgagtccacacgacatggagggcaatagttcggatctggagtacggagctcgggatatgaacggtctcagcctgaattcgtacagcagcggattgcaggctcagcttcaggtgagttgcatttgagcatccgagctgaagttgatttgctaactcattcatggaattgatacccaatacccacaacagcgcgatctggaccggcagcacctgctcagtgatcgaccacgcaccggagtttacgagaatgtcatttccgagggagtcgagggcattgagcatcaggaaaggtaagcaattatttgatattagatgcaataagttcatttagctctataataggcctttactttaatattatattttattatttttgaaaattatcgcttttagatattagcatagaaaattctgattattcatattcccattagcatttaatcgagaaagtaaacaagctataagcaaacattactaggagtgaaatatcttgaattcgtttaatgagtgaatcatttaaattttgtaaacaaatttttctgtatcgcaatcgttgcgtattattgggtaaataaaatcaaatgtcggttgaaaggaaagattcagattaagcagaagtacgttaagtggagttcagagcttaactagcttatcacttgatcgcttatgttaccatatgacgcagtgcgtcacctaattcgctggagtgtggggaatctgcagctaataaagcggccggaaaagcacgcactagttggctctcccgctcctgctccgccaataaacacctcgtcagcgagcccttcctccagcgtttttattacaggagcatgccggaaatatcttaaccgtctggcaaatgcctttcctctatgtaaattccgccgattgtcgaaattttagaggcccgtggcacgcaacccggtggtagctcggctcagtttctggctaaaattgaatttagtggagtggtgaacggatcgtcctgcacaatgctaattgtactggccaagtgctttgtgaccttcttcatttgtgacgccaactgtgacgtaggaatattgagctgagtggcgtcatagtttgcgtgaaatcttgacaaacccagcaaatgaatatttacagctctgtggaaggtctaaaaaaagagttcactattctgaagttagcaggagttacacttgaaaaaagtgtaacacatttcaacctaaactcaagctataaattgaattattctttcaaatatatacttacatatgggatatacatctaagatactcttatcgcctgaaaa

SEQ ID NO: 28784 - DNA, 1321 bp, DROSOPHILA
tttcagacgagcggtggccgagaaagagaagaagaagtgatttgagccgagaaactgaagcttgcaacacaccgaaaacacacacacgaacacggcacaccaacacacacacacacactaacccgaggagctgaaatcgaacgcgaagaacactgagcgaaacgtgcaagagaagtgattaaagctgctacccggagttggagtttgattcattgatcgacgaaccgaagcaatgcgtctcgacacgaactcaaatgtggacttcaaagcattcgaatccagctcaagctcatgtcctgtcaaattggataacctggccacctggggtggctcacagaaaacagacacacgactgccgatcacggactactccaatctgggcggaccccggcacaatcgcagtccctttccactctgcaaagatgtcaacaatcgcttcgtaatctgggatggggacatgaccactctggaggtggacgccatcacaaacaccagcgatgagactctgactgaaagcaatagcatatcggagcgcatcttcgcagtggctggtaatcagctgcgcgaggagctgagcacaacggttaaagaatgccgcactggcgatgtgcgcatcacgcgtggatacaatctgcccgccaagtacgtgctgcatacagtggcacctgcctacagggaaaagttcaagacggctgccgagaatacgctgcactgctgctacagaaatgtcctgtgcaaggcgaaggaacttaacctgcacaccatcgccctgtgcaacatcagtgcccaccagaagagctttcccgcggatgtggcagcccacattgccctgcgtaccattcgtcgctatctggacaagtgcaccctgcaggttgtgatattgtgcgtgggcagcagcgagcgcggcacttacgaggtcctggccccactgtacttccccagggatcagctggaggagcgcagtgccctgtggcagctgcccaaggacattggcggcgagttcggggagccgcaacatccggatcccgatcgccagatacgcatcatccgcaatccgcagcacagtgtccacatgcgtcatcatttagccgacgacgattcagacgtgagtccacacgacatggagggcaatagttcggatctggagtacggagctcgggatatgaacggtctcagcctgaattcgtacagcagcggattgcaggctcagcttcagcgcgatctggaccggcagcacctgctcagtgatcgaccacgcaccggagtttacgagaatgtcatttccgagggagtcgagggcattgagcatcaggaaaggtaa

SEQ ID NO: 28785 - protein, 362 aa, DROSOPHILA
MRLDTNSNVDFKAFESSSSSCPVKLDNLATWGGSQKTDTRLPITDYSNLGGPRHNRSPFPLCKDVNNRFVIWDGDMTTLEVDAITNTSDETLTESNSISERIFAVAGNQLREELSTTVKECRTGDVRITRGYNLPAKYVLHTVAPAYREKFKTAAENTLHCCYRNVLCKAKELNLHTIALCNISAHQKSFPADVAAHIALRTIRRYLDKCTLQVVILCVGSSERGTYEVLAPLYFPRDQLEERSALWQLPKDIGGEFGEPQHPDPDRQIRIIRNPQHSVHMRHHLADDDSDVSPHDMEGNSSDLEYGARDMNGLSLNSYSSGLQAQLQRDLDRQHLLSDRPRTGVYENVISEGVEGIEHQER

SEQ ID NO: 28786 - DNA, 6365 bp, DROSOPHILA
agcgggcttaggtggcggctccgattaccattgccagcggaaaatgcagtccagaccaacacaccaatccaacgggaagccatgcagcgccagagtcatccaagcagccagctcggaaaaccgccgctggatcgggaaagccaacaaccagatgggaggcaattgtcttctctgttttgctacgcgttttcgcattttatttgactcaaaggcgaaccaagaaaatgattgatgaatacaagaaactgtaattctcacatttccacaagacgctttttctcaatgaagtatttttttgttgggtaaatttacgtatttttaatgagatcgtgtgccaatcagatttgaacttcatattaaagggctctggattacataggcttttttttattagctaaaataatgaataaataattttttttatgtggaaagagtcaagggcttgtctactttttaaattttaactaatatataaatgatttgaagcacgtttgaaaaatcattctttttaatctcaccatttgaaaggcgaacagaaagttgttctaaggaattgctgcatacttttgggcattccaaaataatgtatatatataatgtataaggtatatcctttgtaaaataaccgcatcaaagaaaacattttttttttaagataataacatttattttttatttgttcatcaaataattgtttaatgtataaaaatatatgtcattcctcagtaaaatttccggcatccaaggtaaatcaaaaacttcttggtaactgcaaaaaaaaaaagagaaaatagtatgtaatcagaaatggtcagcagcttatgggaaaaatccattcaaaacgtttataaataaagagtaataaacaaacgtcgttgaagctccgattgcaggtggaggccaatagaaaacgctctgtatcagcatttcggctgataaggcgagtttaagtggacggatctacaaccctctgggttttcagttgctatcgacctacatggcgatcaagtcgcatccgtgcggttaaatatttatgttctttggaacacaatatcagtggaaaataagtgcagcgtaataatgtgaaattcaatatacaaacgacacaaacagcacggcaaatcactgaaaataattattggagcaaatcgttgcccagtgtaataaatccaaatgaatgagtctttaattaaacttcataaacccttatcgatggtttttagtgctttactttgttgcacgtttctgatattgaaaaaacaaaaaattgatttgataatagattatggaaactgcataaatcccgactagacgctaattgaaattagttaaattatacaatcatacacgcgcaactaataaaatcaagaagtgagataaaaaaaaaccgattttgtgatatattccacaactgaagtgtagtttaataaatctaatctattgcaaaattaggaaaacaaataatgaatgaataataaatatattcacctaatatataaagcaaacaatcattgataagctgcaattgctaattgaacttattacctaagtaaggaaatttaactgctctctgcagtttcctatctcgtgataataatttcaaattttaatttaaatatgtttggttgaataattcacaaaattaaaaaatattctaatctaccccccatatctagggtaaaaggctagaagtctaatccaatgcaaatttaccaaaaatgctgattgatactggcagtgtaatctatttatacgctgcgtttggcggtgacattttgaattgcaaaagctaagcggtaaaaaaaaaaaacatctacagcataaaagctttcaccaccaaacctaacagaccagcatacttaacattaacagcgtaagagcgggtgcgcaaagtaaaaatgagtgtcacgggggtaagtgctttttattttgttttcgtttgcggcgcttctaaatgtaggctctaaattcaagaaaacacaaggtgtcactaaaaaaatactaaataaaatagttcgacttttatgcaattaaaaaattgaacaaattggaccgctgtgattcgttgaatgattacgtatggcaattgatgccaaaaaaacgcgcgaaacttgtagagaaatcttcgaacataacagacctgaccttgaatatagttattgtgcgtgcaatgaatcattattgattttaagttttccgtctggtttcacaaaacgcaaataaaggaaacattcgtaaattatatcattgtttatatcattgtttgtcacctacgaataataaaggtgtcagcatgtggtcggtattaatatgatgaagtgttggtgacttacgaatactcttttagtatgcaattcaaagctgtaaagaaaatgttaaaagaacttgttctgttaaattgttgctataagaaaatttatatgaacttgttcagttaaattgttgctataattacactaaagtcataagcagtgaacaacctcagtttctcttagttctagttggagcaaagagcacatttgggatgttaccatttagagtgcatcattaaacgattttttgaaatcagacctgaaattatttgagtaactaacaactgaacgatagcaaaagacattaatataatcaagcaattgttcagtgaaccaattgagaaactaaaccgaagggttgtagagcatctattgcttaaaacgagttttaaacgcacagcgtaagacgacgaacaagagacatcgaacgcgacctcaaggtgcccaaattaggagacaagctccagaacatcgcccaaaaatatatggaaaggcttaatgtacaccccaacagcctagcaaggaagctaggaactgcagctgtggtcaatgctgaccctcggactagagtcaaaagaagactcaagcgacaccaccctcatgacctccctaacctggttttgacctagaaagtcttagttttaaaattcattagaataatcaaataaataataattactatgttatatcaactattataattctccctatcatttttaggattaaaaatctgttagtcttaagtaaccaagacacattgtaaaataaaataatttaagcagatcaaattaagttgccgcatgggtaacagtgcgttgatcaaataataaaaacatcatcgaaataaaaaaagagaaaaaaagagaaaagacgacgagatcctctcttcgaaatctatggcattgccagcatcaaaacaatcacgcagttcgaataccaaaatccattgcatacttgcaggcacactccgaaaatgccgcacaaagacgaaacagtcggtctagtgagaacagtgaggacaatgaaaacagcgcgtccggcaccgttagggaacagcgtgacgaggcggcgggccgcaccgttctccagtgggcgtggcatgtggtcaaatccacatccgtggagcccacaatgttcctgtacatgttcgccttcatgatcacctcggtggtggagcagaacttcttcctctacaagtcctgtcgggttaacagaaatttcacggaggagatctgcaggaatctcaacaagccggagaacgaggagttccgaacgaaggcaatgttgaccaatgcctggttccttcagtgggagaacatttctgcccacgttttccccattattctggccctttttctgggctccttctcggatcggcggggccgaaagttgcccctgctcatgggactagtgggaaagtttttctactccacgatgatagtggtcaacgctaggatgaccacgtggccggtgcaaaacatcatctactcggcgacgttgccatcggcgttgaccggtgcggatgtggccattttcgcctcctgcttcgcctacatctcggacatttcctcgctgcagcagcgcaccattcgggtgaccattctggacgtgatctacctcagtgccatgcccatgggcgtggccctgggctcgcatctcttttacaacgtgttcaatcagtcctatgcggacatgttcaccgtaaacgcttcactacttgccctcgccatcatctacaccctgtgcgccctgaaggtaagttttggattcatcttagaaatcgaaacgttcaaaagaacatcgaataatatgcgtcttccataacatatcatcatatatccatataacttcatagtcctgtacctatgcacatccttaattacgcaacttcaactttcagtggcaaacgacgccgagacagcgatcgttgagggaactcggatgctgtggcttttggggcgacttctttgataagcagcatgtgaaggactcgttggcggtgttggtgaagccgcgaaagggtcatcgtcgcagctttctcattatccttctggtcagcatggcactgtacaccttccagcgtgacgaggggcagtatctctacatgtacaccctgggcaaatttgactgggatgtgagtgcgtacagcaacttcaagacattcaagtcatcggcctacgtgattgccatgctattggctgtgccgctgatgaacaagatccttggatggagggatacggtgagttcttattactagctattgcttggcaacgattatagtcttgtttattcaaatttaaaaggaattcagagattaccaagtagaaattaagttaatttttctatttccatttacgccaatcaaaaatccatttaacaactcaaatggtttcattcatagacaatcattttcattggcacctgggcccattcgatagcccgcttgttcttctatttcgccaccaatacggacttgctctacgccggagccgttgtctgcagcttgggcccaattgtgggtcccatgatccgggccatgacctcgaaaatagtgcccacatcagagcgcggaaaggtatttgcactgctatcagtttgcgataatgcggtgcccttcatcagcggtgtgtgctattcgcaactttataggcgcactcagaatacgaatcacggaggaaatgtcttcatcctaaccattgccacccaaatcgctgtctttgtgatgatactgtaagtgatgtcgcaatgtgactcttatttattttataaatgattttattggttgtattactattagttgcttacacattgttttgggcaaaaattcactggctgttccggaagttcctgagaaggagagcggacttatttcccaaacggaagctgtcctggaggcggaaattgaggagcacaagaactagcctgtgcaataactttaacgattcctaataaaaagacttgaacccagagcagatattgaatgcattgcattgaatattttgccaatgtaaatcattcccatcaacacattttgaataaaatgctaaacttttatatatttggacttatcatgaaatgtgctgattttacttcaatggatttttgttgaaatagaataggggtgcagcatttgtggtaagatctccttaaatagaaaaaaaggttttgaatatacaacttacccgagcggtcaagtgccaaatcacttgttcttggacagggtgcgctgcttctccgcatgctccaccacctgctcgtccacgaagaggcccttccttcgccggacactgtccatgtagaccttggctcggttggcggagtccgccttctcgccgaagtgcatcagctcctcctcggttgtcggcagccagaagggatcgatatcaatcacctgtaagcagacgcagggtgtaaattccgggaaatcatttaggcacttgagacgggacaatagaacgaggcgtcgctgtgtctatgcgcctgcgcctcgcactggattggatttgggttggttcggtttatggatacgagtatatgagctggttcggggtttattccttcaatctatgtctttttgggtctttgagcaggactctttgtctaagcagcagggaaagcgtgcattttcacatcttcattgtttggactcgagaggctgcgacaaaggactcgacgcttaatgactttcaaaggacgcagggacacgcattgcacgttacgtgataaggcaggctcgccaggatacgcagaaccggcgtaccgtagaacggggcatttcctcaatggcgtgaagagcgttccctgcgcttgattgatgattgcctcctgcgaggcgaaccacttgagaatctctggtgtgagatctgcattgttttgtttttcttcctccttttttttttattttttgcctccttccagcaaggactcgagacccagcgggcgggtgtcgagcggttcgctggaaaaactcagcactctcccactccagaatttcggttctacactttatgaattccctcatcaatgactgagcttgctcgagaactgattaag

SEQ ID NO: 28787 - DNA, 2030 bp, DROSOPHILA
gcgatcaagtcgcatccgtgcggttaaatatttatgttctttggaacacaatatcagtggaaaataagtgcagcggtaaaaggctagaagtctaatccaatgcaaatttaccaaaaatgctgattgatactggcagtgtaatctatttatacgctgcgtttggcggtgacattttgaattgcaaaagctaagcggtaaaaaaaaaaaacatctacagcataaaagctttcaccaccaaacctaacagaccagcatacttaacattaacagcgtaagagcgggtgcgcaaagtaaaaatgagtgtcacgggggcacactccgaaaatgccgcacaaagacgaaacagtcggtctagtgagaacagtgaggacaatgaaaacagcgcgtccggcaccgttagggaacagcgtgacgaggcggcgggccgcaccgttctccagtgggcgtggcatgtggtcaaatccacatccgtggagcccacaatgttcctgtacatgttcgccttcatgatcacctcggtggtggagcagaacttcttcctctacaagtcctgtcgggttaacagaaatttcacggaggagatctgcaggaatctcaacaagccggagaacgaggagttccgaacgaaggcaatgttgaccaatgcctggttccttcagtgggagaacatttctgcccacgttttccccattattctggccctttttctgggctccttctcggatcggcggggccgaaagttgcccctgctcatgggactagtgggaaagtttttctactccacgatgatagtggtcaacgctaggatgaccacgtggccggtgcaaaacatcatctactcggcgacgttgccatcggcgttgaccggtgcggatgtggccattttcgcctcctgcttcgcctacatctcggacatttcctcgctgcagcagcgcaccattcgggtgaccattctggacgtgatctacctcagtgccatgcccatgggcgtggccctgggctcgcatctcttttacaacgtgttcaatcagtcctatgcggacatgttcaccgtaaacgcttcactacttgccctcgccatcatctacaccctgtgcgccctgaagtggcaaacgacgccgagacagcgatcgttgagggaactcggatgctgtggcttttggggcgacttctttgataagcagcatgtgaaggactcgttggcggtgttggtgaagccgcgaaagggtcatcgtcgcagctttctcattatccttctggtcagcatggcactgtacaccttccagcgtgacgaggggcagtatctctacatgtacaccctgggcaaatttgactgggatgtgagtgcgtacagcaacttcaagacattcaagtcatcggcctacgtgattgccatgctattggctgtgccgctgatgaacaagatccttggatggagggatacgacaatcattttcattggcacctgggcccattcgatagcccgcttgttcttctatttcgccaccaatacggacttgctctacgccggagccgttgtctgcagcttgggcccaattgtgggtcccatgatccgggccatgacctcgaaaatagtgcccacatcagagcgcggaaaggtatttgcactgctatcagtttgcgataatgcggtgcccttcatcagcggtgtgtgctattcgcaactttataggcgcactcagaatacgaatcacggaggaaatgtcttcatcctaaccattgccacccaaatcgctgtctttgtgatgatactttgcttacacattgttttgggcaaaaattcactggctgttccggaagttcctgagaaggagagcggacttatttcccaaacggaagctgtcctggaggcggaaattgaggagcacaagaactagcctgtgcaataactttaacgattcctaataaaaagacttgaacccagagcagatattgaatgcattgcattgaatattttgccaatgtaaatcattcccatcaacacattttgaataaaatgctaaactttt

SEQ ID NO: 28788 - protein, 533 aa, DROSOPHILA; identical to SEQ ID NO: 8973

SEQ ID NO: 28789 - DNA, 5421 bp, DROSOPHILA
gtttaagtggacggatctacaaccctctgggttttcagttgctatcgacctacatggcgatcaagtcgcatccgtgcggttaaatatttatgttctttggaacacaatatcagtggaaaataagtgcagcgtaataatgtgaaattcaatatacaaacgacacaaacagcacggcaaatcactgaaaataattattggagcaaatcgttgcccagtgtaataaatccaaatgaatgagtctttaattaaacttcataaacccttatcgatggtttttagtgctttactttgttgcacgtttctgatattgaaaaaacaaaaaattgatttgataatagattatggaaactgcataaatcccgactagacgctaattgaaattagttaaattatacaatcatacacgcgcaactaataaaatcaagaagtgagataaaaaaaaaccgattttgtgatatattccacaactgaagtgtagtttaataaatctaatctattgcaaaattaggaaaacaaataatgaatgaataataaatatattcacctaatatataaagcaaacaatcattgataagctgcaattgctaattgaacttattacctaagtaaggaaatttaactgctctctgcagtttcctatctcgtgataataatttcaaattttaatttaaatatgtttggttgaataattcacaaaattaaaaaatattctaatctaccccccatatctagggtaaaaggctagaagtctaatccaatgcaaatttaccaaaaatgctgattgatactggcagtgtaatctatttatacgctgcgtttggcggtgacattttgaattgcaaaagctaagcggtaaaaaaaaaaaacatctacagcataaaagctttcaccaccaaacctaacagaccagcatacttaacattaacagcgtaagagcgggtgcgcaaagtaaaaatgagtgtcacgggggtaagtgctttttattttgttttcgtttgcggcgcttctaaatgtaggctctaaattcaagaaaacacaaggtgtcactaaaaaaatactaaataaaatagttcgacttttatgcaattaaaaaattgaacaaattggaccgctgtgattcgttgaatgattacgtatggcaattgatgccaaaaaaacgcgcgaaacttgtagagaaatcttcgaacataacagacctgaccttgaatatagttattgtgcgtgcaatgaatcattattgattttaagttttccgtctggtttcacaaaacgcaaataaaggaaacattcgtaaattatatcattgtttatatcattgtttgtcacctacgaataataaaggtgtcagcatgtggtcggtattaatatgatgaagtgttggtgacttacgaatactcttttagtatgcaattcaaagctgtaaagaaaatgttaaaagaacttgttctgttaaattgttgctataagaaaatttatatgaacttgttcagttaaattgttgctataattacactaaagtcataagcagtgaacaacctcagtttctcttagttctagttggagcaaagagcacatttgggatgttaccatttagagtgcatcattaaacgattttttgaaatcagacctgaaattatttgagtaactaacaactgaacgatagcaaaagacattaatataatcaagcaattgttcagtgaaccaattgagaaactaaaccgaagggttgtagagcatctattgcttaaaacgagttttaaacgcacagcgtaagacgacgaacaagagacatcgaacgcgacctcaaggtgcccaaattaggagacaagctccagaacatcgcccaaaaatatatggaaaggcttaatgtacaccccaacagcctagcaaggaagctaggaactgcagctgtggtcaatgctgaccctcggactagagtcaaaagaagactcaagcgacaccaccctcatgacctccctaacctggttttgacctagaaagtcttagttttaaaattcattagaataatcaaataaataataattactatgttatatcaactattataattctccctatcatttttaggattaaaaatctgttagtcttaagtaaccaagacacattgtaaaataaaataatttaagcagatcaaattaagttgccgcatgggtaacagtgcgttgatcaaataataaaaacatcatcgaaataaaaaaagagaaaaaaagagaaaagacgacgagatcctctcttcgaaatctatggcattgccagcatcaaaacaatcacgcagttcgaataccaaaatccattgcatacttgcaggcacactccgaaaatgccgcacaaagacgaaacagtcggtctagtgagaacagtgaggacaatgaaaacagcgcgtccggcaccgttagggaacagcgtgacgaggcggcgggccgcaccgttctccagtgggcgtggcatgtggtcaaatccacatccgtggagcccacaatgttcctgtacatgttcgccttcatgatcacctcggtggtggagcagaacttcttcctctacaagtcctgtcgggttaacagaaatttcacggaggagatctgcaggaatctcaacaagccggagaacgaggagttccgaacgaaggcaatgttgaccaatgcctggttccttcagtgggagaacatttctgcccacgttttccccattattctggccctttttctgggctccttctcggatcggcggggccgaaagttgcccctgctcatgggactagtgggaaagtttttctactccacgatgatagtggtcaacgctaggatgaccacgtggccggtgcaaaacatcatctactcggcgacgttgccatcggcgttgaccggtgcggatgtggccattttcgcctcctgcttcgcctacatctcggacatttcctcgctgcagcagcgcaccattcgggtgaccattctggacgtgatctacctcagtgccatgcccatgggcgtggccctgggctcgcatctcttttacaacgtgttcaatcagtcctatgcggacatgttcaccgtaaacgcttcactacttgccctcgccatcatctacaccctgtgcgccctgaaggtaagttttggattcatcttagaaatcgaaacgttcaaaagaacatcgaataatatgcgtcttccataacatatcatcatatatccatataacttcatagtcctgtacctatgcacatccttaattacgcaacttcaactttcagtggcaaacgacgccgagacagcgatcgttgagggaactcggatgctgtggcttttggggcgacttctttgataagcagcatgtgaaggactcgttggcggtgttggtgaagccgcgaaagggtcatcgtcgcagctttctcattatccttctggtcagcatggcactgtacaccttccagcgtgacgaggggcagtatctctacatgtacaccctgggcaaatttgactgggatgtgagtgcgtacagcaacttcaagacattcaagtcatcggcctacgtgattgccatgctattggctgtgccgctgatgaacaagatccttggatggagggatacggtgagttcttattactagctattgcttggcaacgattatagtcttgtttattcaaatttaaaaggaattcagagattaccaagtagaaattaagttaatttttctatttccatttacgccaatcaaaaatccatttaacaactcaaatggtttcattcatagacaatcattttcattggcacctgggcccattcgatagcccgcttgttcttctatttcgccaccaatacggacttgctctacgccggagccgttgtctgcagcttgggcccaattgtgggtcccatgatccgggccatgacctcgaaaatagtgcccacatcagagcgcggaaaggtatttgcactgctatcagtttgcgataatgcggtgcccttcatcagcggtgtgtgctattcgcaactttataggcgcactcagaatacgaatcacggaggaaatgtcttcatcctaaccattgccacccaaatcgctgtctttgtgatgatactgtaagtgatgtcgcaatgtgactcttatttattttataaatgattttattggttgtattactattagttgcttacacattgttttgggcaaaaattcactggctgttccggaagttcctgagaaggagagcggacttatttcccaaacggaagctgtcctggaggcggaaattgaggagcacaagaactagcctgtgcaataactttaacgattcctaataaaaagacttgaacccagagcagatattgaatgcattgcattgaatattttgccaatgtaaatcattcccatcaacacattttgaataaaatgctaaacttttatatatttggacttatcatgaaatgtgctgattttacttcaatggatttttgttgaaatagaataggggtgcagcatttgtggtaagatctccttaaatagaaaaaaaggttttgaatatacaacttacccgagcggtcaagtgccaaatcacttgttcttggacagggtgcgctgcttctccgcatgctccaccacctgctcgtccacgaagaggcccttccttcgccggacactgtccatgtagaccttggctcggttggcggagtccgccttctcgccgaagtgcatcagctcctcctcggttgtcggcagccagaagggatcgatatcaatcacctgtaagcagacgcagggtgtaaattccgggaaatcatttaggcacttgagacgggacaatagaacgaggcgtcgctgtgtctatgcgcctgcgcctcgcactggattggatttgggttggttcggtttatggatacgagtatatgagctggttcggggtttattccttcaatctatgtctttttgggtctttgagcaggactctttgtctaagcagcagggaaagcgtgcattttcacatcttcattgtttggactcgagaggctgcgacaaaggactcgacgcttaatgactttcaaaggacgcagggacacgcattgcacgttacgtgataaggcaggctcgccaggatacgcagaaccggcgtaccgtagaacggggcatttcctcaatggcgtgaagagcgttccctgcgcttgattgatgattgcctcctgcgaggcgaaccacttgagaatctctggtgtgagatctgcattgttttgtttttcttcctccttttttttttattttttgcctccttccagcaaggactcgagacccagcgggcgggtgtcgagcggttcgctggaaaaactcagcactctcccactccagaatttcggttctacactttatgaattccctcatcaatgactgagcttgctcgagaactgattaag

SEQ ID NO: 28790 - DNA, 2077 bp, DROSOPHILA
gcgcttctaaatgtaggctctaaattcaagaaaacacaaggtgtcactaaaaaaatactaaataaaatagttcgacttttatgcaattaaaaaattgaacaaattggaccgctgtgattcgttgaatgattacgtatggcaattgatgccaaaaaaacgcgcgaaacttgtagagaaatcttcgaacataacagacctgaccttgaatatagttattgtgcgtgcaatgaatcattattgattttaagttttccgtctggtttcacaaaacgcaaataaaggaaacattcgtaaattatatcattgtttatatcattgtttgtcacctacgaataataaaggtgtcagcatgtggtcggcacactccgaaaatgccgcacaaagacgaaacagtcggtctagtgagaacagtgaggacaatgaaaacagcgcgtccggcaccgttagggaacagcgtgacgaggcggcgggccgcaccgttctccagtgggcgtggcatgtggtcaaatccacatccgtggagcccacaatgttcctgtacatgttcgccttcatgatcacctcggtggtggagcagaacttcttcctctacaagtcctgtcgggttaacagaaatttcacggaggagatctgcaggaatctcaacaagccggagaacgaggagttccgaacgaaggcaatgttgaccaatgcctggttccttcagtgggagaacatttctgcccacgttttccccattattctggccctttttctgggctccttctcggatcggcggggccgaaagttgcccctgctcatgggactagtgggaaagtttttctactccacgatgatagtggtcaacgctaggatgaccacgtggccggtgcaaaacatcatctactcggcgacgttgccatcggcgttgaccggtgcggatgtggccattttcgcctcctgcttcgcctacatctcggacatttcctcgctgcagcagcgcaccattcgggtgaccattctggacgtgatctacctcagtgccatgcccatgggcgtggccctgggctcgcatctcttttacaacgtgttcaatcagtcctatgcggacatgttcaccgtaaacgcttcactacttgccctcgccatcatctacaccctgtgcgccctgaagtggcaaacgacgccgagacagcgatcgttgagggaactcggatgctgtggcttttggggcgacttctttgataagcagcatgtgaaggactcgttggcggtgttggtgaagccgcgaaagggtcatcgtcgcagctttctcattatccttctggtcagcatggcactgtacaccttccagcgtgacgaggggcagtatctctacatgtacaccctgggcaaatttgactgggatgtgagtgcgtacagcaacttcaagacattcaagtcatcggcctacgtgattgccatgctattggctgtgccgctgatgaacaagatccttggatggagggatacgacaatcattttcattggcacctgggcccattcgatagcccgcttgttcttctatttcgccaccaatacggacttgctctacgccggagccgttgtctgcagcttgggcccaattgtgggtcccatgatccgggccatgacctcgaaaatagtgcccacatcagagcgcggaaaggtatttgcactgctatcagtttgcgataatgcggtgcccttcatcagcggtgtgtgctattcgcaactttataggcgcactcagaatacgaatcacggaggaaatgtcttcatcctaaccattgccacccaaatcgctgtctttgtgatgatactttgcttacacattgttttgggcaaaaattcactggctgttccggaagttcctgagaaggagagcggacttatttcccaaacggaagctgtcctggaggcggaaattgaggagcacaagaactagcctgtgcaataactttaacgattcctaataaaaagacttgaacccagagcagatattgaatgcattgcattgaatattttgccaatgtaaatcattcccatcaacacattttgaataaaatgctaaactttt

SEQ ID NO: 28791 - protein, 531 aa, DROSOPHILA
MWSAHSENAAQRRNSRSSENSEDNENSASGTVREQRDEAAGRTVLQWAWHVVKSTSVEPTMFLYMFAFMITSVVEQNFFLYKSCRVNRNFTEEICRNLNKPENEEFRTKAMLTNAWFLQWENISAHVFPIILALFLGSFSDRRGRKLPLLMGLVGKFFYSTMIVVNARMTTWPVQNIIYSATLPSALTGADVAIFASCFAYISDISSLQQRTIRVTILDVIYLSAMPMGVALGSHLFYNVFNQSYADMFTVNASLLALAIIYTLCALKWQTTPRQRSLRELGCCGFWGDFFDKQHVKDSLAVLVKPRKGHRRSFLIILLVSMALYTFQRDEGQYLYMYTLGKFDWDVSAYSNFKTFKSSAYVIAMLLAVPLMNKILGWRDTTIIFIGTWAHSIARLFFYFATNTDLLYAGAVVCSLGPIVGPMIRAMTSKIVPTSERGKVFALLSVCDNAVPFISGVCYSQLYRRTQNTNHGGNVFILTIATQIAVFVMILCLHIVLGKNSLAVPEVPEKESGLISQTEAVLEAEIEEHKN

SEQ ID NO: 28792 - DNA, 10203 bp, DROSOPHILA
aagatgtataagtattctagtatatattgtattatgtaacaaataaccatcggttgtaattaaatatgtgcttccctcttccccagaaatgtcctgtgcaaggcgaaggaacttaacctgcacaccatcgccctgtgcaacatcagtgcccaccagaagagctttcccgcggatgtggcagcccacattgccctgcgttagtaccaaaagatatacattcacaacccaaatctttgaactaatcaaaatctatttacccaatgtgcaggtaccattcgtcgctatctggacaagtgcaccctgcaggttgtgatattgtgcgtgggcagcagcgagcgcggcacttacgaggtcctggccccactgtacttccccagggatcagctggaggagcgcagtgccctgtggcagctgcccaaggacattggcggcgagttcggggagccgcaacatccggatcccgatcgccagatacgcatcatccgcaatccgcagcacagtgtccacatgcgtcatcatttaggtgagtaacgaagcacgaagtgtataagcaacttggcctttgatcccagaagtcagatttaaacataaatattttgtaatagaactgagtatatgcaacgagcagagtgtattagccagcgaaatgatagtgtatcttgcagtaaagatcatttctatggacatagcacatatcacatttctgattgtagctgtgcgattgtggctttcgtcactgctttctcaccggcggcttatcaatcggctgtcgatgataaagacggctatcaacatggcaatgattctacatgccgtatatacagttcctttgttgcctgtcgataagataagaacacagcagtggaacaagtgaataacgcatgaaacactagcgcaatatacgagaaattcgctattgtctgctatgttgactggcctttcgacttctatggcttcagttacgctgcaaagtcggtcgagtgcgggtcacttggcagtagttgcattcgtttggtcgcgcgaaagtcacaaggttttgatatttgggccaccctacccacaacatcgaaccaattataccaactaacgtgtttgtaagtgcttgccacgcagaaacttacctggctcacttggaatatgtgtcataaatccagtcaagagtaaaatgtcaatcttggtcaactaagttactgtgctagctgacaaaaagctgagtgctaggaatcgaacaaaatttcgttgcatactttcgggatggatttctgcttgtgaaagtgtaaattcccttgtagttctacaagtaaattatttaagggaaagcatacactaattaataattgtttaaatttactgtgacatttaattacatttgactttggtacttttatttttcttaactaaatgttaaaaatataattatatttctattattttaatctagttaaatgtttggaataaataattgacaatcgttataaaactcagtttattgtgtatgctgataattctttccgtttacaataagttccaataaaatttgtagattttggatatctagttccttttcaagtaaaatgctatttattatatagaaatttaaataatataatatcagtaaaatgcataattagaacttacctaataacccctatagaacccacaaaatcttgattagttaatcttcgactatatcgtcttatttgaacatgtaagcgaaagctaataacatttcgcattcgtcttacgttggcttatcatcagcagtttgttaacttgctctggccgctcttatcacgaggagtgttagtcaagtgttttggcctggccaagttccgttctgggcctaaatcatgtcgtcgcagtcgcgttatcagtcttatcagttatccgccgagagcgatgcaaagcgagcgctgaagagtgaattagtaggggagaggggggagagcagagggcagcatccagttttgctcaacgctcgtgcgtttatccgctccgctgctgtgccgtctcaaccgcccggagctggcattcagttcgactcacatttcgcatcgctgaagttcgcggattacagaaagcgtttgctctgcgggcataatccaaatccaaatccaaatcgaagcagaaatccagcgcagaatgataaacaactcgtttgagttctcgtgtaaagaccaaaagccacaacgcccccaaaagaaatacaaagaaaaattgttaaaagatcaggagttgcaagttaccagtctcagttcgatgaagataatgaatatatttaatacctcaactgatgaaacgttttcttgaaaatatcacaatatgataagtgtatttttagaatccctatataaagttgcatgtactttgagctaagtccttcctaaatcctaaatcctacaagtacctcaaactgatttcgttataaccatttattaaaccccatttaccatctgttatcttccgcagccgacgacgattcagacgtgagtccacacgacatggagggcaatagttcggatctggagtacggagctcgggatatgaacggtctcagcctgaattcgtacagcagcggattgcaggctcagcttcaggtgagttgcatttgagcatccgagctgaagttgatttgctaactcattcatggaattgatacccaatacccacaacagcgcgatctggaccggcagcacctgctcagtgatcgaccacgcaccggagtttacgagaatgtcatttccgagggagtcgagggcattgagcatcaggaaaggtaagcaattatttgatattagatgcaataagttcatttagctctataataggcctttactttaatattatattttattatttttgaaaattatcgcttttagatattagcatagaaaattctgattattcatattcccattagcatttaatcgagaaagtaaacaagctataagcaaacattactaggagtgaaatatcttgaattcgtttaatgagtgaatcatttaaattttgtaaacaaatttttctgtatcgcaatcgttgcgtattattgggtaaataaaatcaaatgtcggttgaaaggaaagattcagattaagcagaagtacgttaagtggagttcagagcttaactagcttatcacttgatcgcttatgttaccatatgacgcagtgcgtcacctaattcgctggagtgtggggaatctgcagctaataaagcggccggaaaagcacgcactagttggctctcccgctcctgctccgccaataaacacctcgtcagcgagcccttcctccagcgtttttattacaggagcatgccggaaatatcttaaccgtctggcaaatgcctttcctctatgtaaattccgccgattgtcgaaattttagaggcccgtggcacgcaacccggtggtagctcggctcagtttctggctaaaattgaatttagtggagtggtgaacggatcgtcctgcacaatgctaattgtactggccaagtgctttgtgaccttcttcatttgtgacgccaactgtgacgtaggaatattgagctgagtggcgtcatagtttgcgtgaaatcttgacaaacccagcaaatgaatatttacagctctgtggaaggtctaaaaaaagagttcactattctgaagttagcaggagttacacttgaaaaaagtgtaacacatttcaacctaaactcaagctataaattgaattattctttcaaatatatacttacatatgggatatacatctaagatactcttatcgcctgaaaaatatttattttcccgttttattcgtggtgaaagattagaggtaaacatttatgaatatttataaatgctcttataaccggagataatttgtgttcacttggaactaagtctgtcaaacaaaaagataacatcttagggttacactactcgtattatactaaattgggattgaaatcgaaagttatagatcaatatagaaaatgaaaatatcataaaattaatgtaaatgttaatcatttagatagcgttaacttgatgcatatttgttccaaatattggcgactaccctaattaaaacaattcaagtgacagctcgattgaagtggatatctcgtgaatccgctggtaaccggatcggccggtggctatataatcagaatatcgaaccgttgcagttcattgaatgaaaccgcacaaatgccccgcacacattttgtagacatttaagtgcaacatctcccaggcatcttaatttattcaaccgatttcatgggagctgtatgtttgtacatgcatacatatgtgtatgtgtattcagttggttggtgacaacagaatgccgtttcctggaccagttttccactgtcgttcgcctttttttgtgtgtgcgtgcgaggggaatgcaccccactgtgcaggcgcctcttctcgattaaattctgtctgaggtcatcgaggcacatgcagaaaatatgatttcgatttattattacttccctataactaattattttagaatagccctgttattcagctatggggtatctaattattgactgttatattttttattcgtagttaattttttaattacattctgaggtcatccactctcactcagacgtaaatatgaatatttgaaaatatataggaagcttgcatagaagagatttgaattgtaataacacttaagccctattagcaatatgttggttttgagttataccgctattattgctttcttaaatgtgcaatatttgatttaaatctgagctggattaaaattgcgtttttcccaatgtccagtgcaaaggtttcttttttaataatcaagcaccttatgctcgatttgaatttttgttttgagtaatgattccgtaaatcgtaccaattgaaatcgttttgatcttattattttcgaaatgtacacttgtacaattgtttacgcaaatagatgagtcaagagagtaatgttgtttatgccaaccatccattctgatggaaatgttgcacattgcacgcatactcccgtacttcccactgaatgtgctagtatgggtgagtggtgagtggtgggcggtgggtggtggaaccgaaatagcattcgtgtgttcgttttttgcgcatttagctgccaactgacaacgcaaacatttgaactgatttcatttttggacagttttgttttagctcgactgacattagtgcaaataaagccgctaacatgatgtccttgggttgttgttgttgcagccctgcctctaacggttctcgctcttctgggcattggtgttgtaactgattgtcattggagaggcgaaaagggcgcacgctccaaaaaggagagagtgaccctacactctctcccgagcaacgtacactgtcagaaaaggccatcttgataccaaatgcgcaggtcaaactaggtagctcatttgccttggattgtgtgggataaatttatttaagataaattaacttcacgttcaacacaaacagaattacctttaatatattcatggttcatgatattcataagttcacattggggttcatttggacttgaattgtaatgcaatttcgattgaaatactgttttaaagtaacacgatttagcgaatcgtatcagcttttctttctgtgcagcatcatcgcgtgggagagaacgggagcaagagtgtaagctcttttgcggcgacgtcgccactgcgtctctctctctctctccaccgctacctttcccacgctccttcgcggctgctggggcggcgaaaaagattcaagagcagccccactcgccgccaattcgctcattcgaaaagctccactcgcggcgaacggacgtgcactgagatatataaatccgtgagggcgccaattccatataggaatcggtgataaatccataaaatcgcatcgagctgaaaagctgaaagtataagggaaaaactatttctattttcgcatttccacgagccgcttccgtacaacgcaaaagtctggccactacgctgcccgcacatacgtattatttaacggagaaaaataccctaaactatttataagtatttggcgaaaggaaaaaaaacagttcgctttgcgtcaattgaatgctctaaatcggttcgaaaacagcagcgagcaaatcaaaacgtacagttaaccgttgaaaaaacctaatttctattttgtcttaaaatcgatataccgtaattgtgcgcgagaggcgaacgacgaactcaaagggaacagcaagtagtgccacccaccagcgaaaccagcaacaactacaacccatccgaaactcagtaaactatgacaatgctagaaggcatgacgtcgattgacctgggctccagtcccatgcaagaaaccactggcgacatgaacgacgtcctccccgatgagctcatggagtcgccggaggaaaggtaaggcccttgccagtcggtgtggtgcgatgtgtcagtcacggagtcggacggccaatcaacgcccctactccccccctccccgccaccatgctgtaaacaattgctccttggcaagggtttaatgacgtcagcggtgggtgcgatgcattacaaccttactgttccagtaagattcaataactatcagatacataaagttgaaagctacttacgcagttatgaacatttactataagatattctacatcgcaataccaaatgttaccatcaaaattagtcaaattagtcatcgaaaagccatactatgtagacttaggaggtagatagttgacaatttaacggaaatgagtgcgaaattaattgattttttaaaaagaagtcttattctgtgtttatcacgttctgttttgatacgatcatctaatagagtttttcagttgaatacgttctagttgcaccattgcactgttcacagttaattaagtacagctgaactcttgcctccccagttgccacaaagtctatttttagactcgtacatcctttggtttgccgtgcagcttgtccctgactggctgttgcaccgcccaccccacccacgcaaccttcacccgttcatccgttcaaccgttcacccaccgcaagtgaacctaaacagaacgccagaacctttcggccttgtttctccgtacgtgccagcaaataataacatgcaatgtgtgtgatggcaggaaatgtgatctaataataatgttattacttttctgcggcactgacttgttaaagtgtgagatttattctgcggattagcattgcgctttaatattcattgtatatttcgcacgataatcacattcagggggcaccacccgccaaatccacctgcatccgcatccgcagctgtatctgtatgtgtatctttagctgggcaaacacaaattatgagattgtgatcgagattgagttggctagcactgcgtcacaatgcgtcacatttgggtactatctggcccattatctggccatctttccgcagtcgtaaacggcttatcggttgctgctaccggagtttactgcggcaggaggtgccagccgtgttaatcacatccactaagtctaagtcagctgaaattgactcatattagtccgcatttggcgcaggctgaggcattcaattagccagcttgaaagtttgcagttcggcgtgtggcgtcgaaagctgttaatcatcttagcacaacttttgcacacctttggctacgcgaatggtatacatatatatatgtatatatatacatatagatacatcaattctctggcgattcttcgaatgactcatactcatcagtaaagtgcgcactcattcactgaccaattgaatgcacattaagttcgaaacttaatttggatgacccattttccctgcccattcccattctaatttcgtacttttatctggcaaatatttgccggaatttagcaactaagctaacaaaagcaaactagctaagcatgagtctatcacgcctttcgcattaataattcaccaagcggataaacatgatgttcagcgactttgtttttagcgaaatgaattccaagcagtcggccaaggcaactccacaatagcttctggtgattgtgtcagtgtatttatatgcttatatggcctggaattgcgtgactccacataataatcgatcgaactcccctcgccaagcaacccaatcaatgtgggcttcacataatcattatatgtctagtacttgaaaagtcagaggccggagagtaaacaaaatgaatgcaatcttaagtagaaccagtcgtgcgtgtaatccattttgcaatcgatcttagaatgtaaggtatatcaataaacacaacaataaaatatttatatatgtacatacgtacacaggttattttaaacatcttacagaattagcaccacaactctaaagctaatcacattagttgttatgacctactattataaatctatatgggattaaccgctgttttgcttttttccagatacgagcgcctactgcgtcgtgcccaagtcgaggatttgacggaggtgtccggcatcggctgcctttaccagagcggcgtggaccgcctgggtcggcctgtgattgtgttctgcggcaaatggttccccgcccagaacattgacctggaaaaggtaaaaacacttctaagcagatatccacattgacatatactaatcctacttgtgcattgtaggccttgctatatctgattaagctactggatcccatcgttaaaggagactatgtcatctcgtacttccacacgctgacatccacgaacaactatccatcgctgcactggctgcgtgaggtctacagtgtgttgccttacaagtgagtttctatctcaacacctcatggaaaatgacattttactaaattctgcttatgttcggttagatacaagaagaacctgaaggccttctatatcgtgcaccccactttctggactaagatgatgacctggtggttcaccacgttcatggcgcctgccatcaaggccaaggtgcactcgcttccgggtgtggagcacctgtactcggccatcaccaaggatcagctggaaattcccgcctacatcaccgagtacgacatggcggtaagtcggattgaacatggtttccatatgcgtaaacgatttaatcatatgtttcaaaactttttacagaccaatggcctgcattacttcaatcctgtgccgactgcctcgtagatggcggccatcgttgctgtctaggacagctggcagccaccatagcatatacatacatatatatagttacacagatacatttgtgaagtttttatagattttatagaacgtattttattttcgtgataagtaatatttgtttacttgcgcataactttcgatgttgtcgtttatcgattgacttgccgcaagttttgttgaacattgtgtagcatacttttatgggagtggccgagtcgcccccgcccgaccgctcggtagcccaaaaaccaattagctaaaagataaatcggcagccccaaaaaaccagataattgtgtgaaacattcttatgaattgcatggaaattagttgattagttggcatcggcagaacaaaccttgttatttcgctataaatagttgaaaagttgagatattcggtaggaaatcgatggggaggactcgttagtgggattaggatacgaggagaaaccaaaaacgttagcaatgctgaagaaaataaaatttgattagagaccctgcatgtaccggatatacacaagattattctaaatatgaaattgataaattgtacttgatacttgattactgaagggagacagacgtatatatgaataagtatacatattgttagttatctttgcaattacaaattgtattattaatgtattaatactagagctaacgcgtatgcagtttgatcccccgatatacatacatacatatacacacacatacgtactataattcaattgtatttatacataactatatactaaatatacacaactaataaattaaaccaatcgaaaccaaaccaaccacggatgcgaactcgactcgcagagaagcatatattttgaagcgccgagatgctgagcagctgagaagtgcagaaccttttgtagatacttactagagctcaccgtaaggccctcccagcaatcgaaacaccaataaagaacctaacgaataacaagtaatgaatactgaatact

SEQ ID NO: 28793 - DNA, 861 bp, DROSOPHILA
gttgcattcgtttggtcgcgcgaaagtcacaaggttttgatatttgggccaccctacccacaacatcgaaccaattataccaactaacgtgtttccgacgacgattcagacgtgagtccacacgacatggagggcaatagttcggatctggagtacggagctcgggatatgaacggtctcagcctgaattcgtacagcagcggattgcaggctcagcttcagcgcgatctggaccggcagcacctgctcagtgatcgaccacgcaccggagtttacgagaatgtcatttccgagggagtcgagggcattgagcatcaggaaagatacgagcgcctactgcgtcgtgcccaagtcgaggatttgacggaggtgtccggcatcggctgcctttaccagagcggcgtggaccgcctgggtcggcctgtgattgtgttctgcggcaaatggttccccgcccagaacattgacctggaaaaggccttgctatatctgattaagctactggatcccatcgttaaaggagactatgtcatctcgtacttccacacgctgacatccacgaacaactatccatcgctgcactggctgcgtgaggtctacagtgtgttgccttacaaatacaagaagaacctgaaggccttctatatcgtgcaccccactttctggactaagatgatgacctggtggttcaccacgttcatggcgcctgccatcaaggccaaggtgcactcgcttccgggtgtggagcacctgtactcggccatcaccaaggatcagctggaaattcccgcctacatcaccgagtacgacatggcgaccaatggcctgcattacttcaatcctgtgccgactgcctcgtag

SEQ ID NO: 28794 - protein, 244 aa, DROSOPHILA
MEGNSSDLEYGARDMNGLSLNSYSSGLQAQLQRDLDRQHLLSDRPRTGVYENVISEGVEGIEHQERYERLLRRAQVEDLTEVSGIGCLYQSGVDRLGRPVIVFCGKWFPAQNIDLEKALLYLIKLLDPIVKGDYVISYFHTLTSTNNYPSLHWLREVYSVLPYKYKKNLKAFYIVHPTFWTKMMTWWFTTFMAPAIKAKVHSLPGVEHLYSAITKDQLEIPAYITEYDMATNGLHYFNPVPTAS

SEQ ID NO: 28795 - DNA, 5340 bp, DROSOPHILA
tgagtaatgattccgtaaatcgtaccaattgaaatcgttttgatcttattattttcgaaatgtacacttgtacaattgtttacgcaaatagatgagtcaagagagtaatgttgtttatgccaaccatccattctgatggaaatgttgcacattgcacgcatactcccgtacttcccactgaatgtgctagtatgggtgagtggtgagtggtgggcggtgggtggtggaaccgaaatagcattcgtgtgttcgttttttgcgcatttagctgccaactgacaacgcaaacatttgaactgatttcatttttggacagttttgttttagctcgactgacattagtgcaaataaagccgctaacatgatgtccttgggttgttgttgttgcagccctgcctctaacggttctcgctcttctgggcattggtgttgtaactgattgtcattggagaggcgaaaagggcgcacgctccaaaaaggagagagtgaccctacactctctcccgagcaacgtacactgtcagaaaaggccatcttgataccaaatgcgcaggtcaaactaggtagctcatttgccttggattgtgtgggataaatttatttaagataaattaacttcacgttcaacacaaacagaattacctttaatatattcatggttcatgatattcataagttcacattggggttcatttggacttgaattgtaatgcaatttcgattgaaatactgttttaaagtaacacgatttagcgaatcgtatcagcttttctttctgtgcagcatcatcgcgtgggagagaacgggagcaagagtgtaagctcttttgcggcgacgtcgccactgcgtctctctctctctctccaccgctacctttcccacgctccttcgcggctgctggggcggcgaaaaagattcaagagcagccccactcgccgccaattcgctcattcgaaaagctccactcgcggcgaacggacgtgcactgagatatataaatccgtgagggcgccaattccatataggaatcggtgataaatccataaaatcgcatcgagctgaaaagctgaaagtataagggaaaaactatttctattttcgcatttccacgagccgcttccgtacaacgcaaaagtctggccactacgctgcccgcacatacgtattatttaacggagaaaaataccctaaactatttataagtatttggcgaaaggaaaaaaaacagttcgctttgcgtcaattgaatgctctaaatcggttcgaaaacagcagcgagcaaatcaaaacgtacagttaaccgttgaaaaaacctaatttctattttgtcttaaaatcgatataccgtaattgtgcgcgagaggcgaacgacgaactcaaagggaacagcaagtagtgccacccaccagcgaaaccagcaacaactacaacccatccgaaactcagtaaactatgacaatgctagaaggcatgacgtcgattgacctgggctccagtcccatgcaagaaaccactggcgacatgaacgacgtcctccccgatgagctcatggagtcgccggaggaaaggtaaggcccttgccagtcggtgtggtgcgatgtgtcagtcacggagtcggacggccaatcaacgcccctactccccccctccccgccaccatgctgtaaacaattgctccttggcaagggtttaatgacgtcagcggtgggtgcgatgcattacaaccttactgttccagtaagattcaataactatcagatacataaagttgaaagctacttacgcagttatgaacatttactataagatattctacatcgcaataccaaatgttaccatcaaaattagtcaaattagtcatcgaaaagccatactatgtagacttaggaggtagatagttgacaatttaacggaaatgagtgcgaaattaattgattttttaaaaagaagtcttattctgtgtttatcacgttctgttttgatacgatcatctaatagagtttttcagttgaatacgttctagttgcaccattgcactgttcacagttaattaagtacagctgaactcttgcctccccagttgccacaaagtctatttttagactcgtacatcctttggtttgccgtgcagcttgtccctgactggctgttgcaccgcccaccccacccacgcaaccttcacccgttcatccgttcaaccgttcacccaccgcaagtgaacctaaacagaacgccagaacctttcggccttgtttctccgtacgtgccagcaaataataacatgcaatgtgtgtgatggcaggaaatgtgatctaataataatgttattacttttctgcggcactgacttgttaaagtgtgagatttattctgcggattagcattgcgctttaatattcattgtatatttcgcacgataatcacattcagggggcaccacccgccaaatccacctgcatccgcatccgcagctgtatctgtatgtgtatctttagctgggcaaacacaaattatgagattgtgatcgagattgagttggctagcactgcgtcacaatgcgtcacatttgggtactatctggcccattatctggccatctttccgcagtcgtaaacggcttatcggttgctgctaccggagtttactgcggcaggaggtgccagccgtgttaatcacatccactaagtctaagtcagctgaaattgactcatattagtccgcatttggcgcaggctgaggcattcaattagccagcttgaaagtttgcagttcggcgtgtggcgtcgaaagctgttaatcatcttagcacaacttttgcacacctttggctacgcgaatggtatacatatatatatgtatatatatacatatagatacatcaattctctggcgattcttcgaatgactcatactcatcagtaaagtgcgcactcattcactgaccaattgaatgcacattaagttcgaaacttaatttggatgacccattttccctgcccattcccattctaatttcgtacttttatctggcaaatatttgccggaatttagcaactaagctaacaaaagcaaactagctaagcatgagtctatcacgcctttcgcattaataattcaccaagcggataaacatgatgttcagcgactttgtttttagcgaaatgaattccaagcagtcggccaaggcaactccacaatagcttctggtgattgtgtcagtgtatttatatgcttatatggcctggaattgcgtgactccacataataatcgatcgaactcccctcgccaagcaacccaatcaatgtgggcttcacataatcattatatgtctagtacttgaaaagtcagaggccggagagtaaacaaaatgaatgcaatcttaagtagaaccagtcgtgcgtgtaatccattttgcaatcgatcttagaatgtaaggtatatcaataaacacaacaataaaatatttatatatgtacatacgtacacaggttattttaaacatcttacagaattagcaccacaactctaaagctaatcacattagttgttatgacctactattataaatctatatgggattaaccgctgttttgcttttttccagatacgagcgcctactgcgtcgtgcccaagtcgaggatttgacggaggtgtccggcatcggctgcctttaccagagcggcgtggaccgcctgggtcggcctgtgattgtgttctgcggcaaatggttccccgcccagaacattgacctggaaaaggtaaaaacacttctaagcagatatccacattgacatatactaatcctacttgtgcattgtaggccttgctatatctgattaagctactggatcccatcgttaaaggagactatgtcatctcgtacttccacacgctgacatccacgaacaactatccatcgctgcactggctgcgtgaggtctacagtgtgttgccttacaagtgagtttctatctcaacacctcatggaaaatgacattttactaaattctgcttatgttcggttagatacaagaagaacctgaaggccttctatatcgtgcaccccactttctggactaagatgatgacctggtggttcaccacgttcatggcgcctgccatcaaggccaaggtgcactcgcttccgggtgtggagcacctgtactcggccatcaccaaggatcagctggaaattcccgcctacatcaccgagtacgacatggcggtaagtcggattgaacatggtttccatatgcgtaaacgatttaatcatatgtttcaaaactttttacagaccaatggcctgcattacttcaatcctgtgccgactgcctcgtagatggcggccatcgttgctgtctaggacagctggcagccaccatagcatatacatacatatatatagttacacagatacatttgtgaagtttttatagattttatagaacgtattttattttcgtgataagtaatatttgtttacttgcgcataactttcgatgttgtcgtttatcgattgacttgccgcaagttttgttgaacattgtgtagcatacttttatgggagtggccgagtcgcccccgcccgaccgctcggtagcccaaaaaccaattagctaaaagataaatcggcagccccaaaaaaccagataattgtgtgaaacattcttatgaattgcatggaaattagttgattagttggcatcggcagaacaaaccttgttatttcgctataaatagttgaaaagttgagatattcggtaggaaatcgatggggaggactcgttagtgggattaggatacgaggagaaaccaaaaacgttagcaatgctgaagaaaataaaatttgattagagaccctgcatgtaccggatatacacaagattattctaaatatgaaattgataaattgtacttgatacttgattactgaagggagacagacgtatatatgaataagtatacatattgttagttatctttgcaattacaaattgtattattaatgtattaatactagagctaacgcgtatgcagtttgatcccccgatatacatacatacatatacacacacatacgtactataattcaattgtatttatacataactatatactaaatatacacaactaataaattaaaccaatcgaaaccaaaccaaccacggatgcgaactcgactcgcagagaagcatatattttgaagcgccgagatgctgagcagctgagaagtgcagaaccttttgtagatacttactagagctcaccgtaaggccctcccagcaatcgaaacaccaataaagaacctaacgaataacaagtaatgaatactgaatact

SEQ ID NO: 28796 - DNA, 1106 bp, DROSOPHILA
ccgtgagggcgccaattccatataggaatcggtgataaatccataaaatcgcatcgagctgaaaagctgaaagtataagggaaaaactatttctattttcgcatttccacgagccgcttccgtacaacgcaaaagtctggccactacgctgcccgcacatacgtattatttaacggagaaaaataccctaaactatttataagtatttggcgaaaggaaaaaaaacagttcgctttgcgtcaattgaatgctctaaatcggttcgaaaacagcagcgagcaaatcaaaacgtacagttaaccgttgaaaaaacctaatttctattttgtcttaaaatcgatataccgtaattgtgcgcgagaggcgaacgacgaactcaaagggaacagcaagtagtgccacccaccagcgaaaccagcaacaactacaacccatccgaaactcagtaaactatgacaatgctagaaggcatgacgtcgattgacctgggctccagtcccatgcaagaaaccactggcgacatgaacgacgtcctccccgatgagctcatggagtcgccggaggaaagatacgagcgcctactgcgtcgtgcccaagtcgaggatttgacggaggtgtccggcatcggctgcctttaccagagcggcgtggaccgcctgggtcggcctgtgattgtgttctgcggcaaatggttccccgcccagaacattgacctggaaaaggccttgctatatctgattaagctactggatcccatcgttaaaggagactatgtcatctcgtacttccacacgctgacatccacgaacaactatccatcgctgcactggctgcgtgaggtctacagtgtgttgccttacaaatacaagaagaacctgaaggccttctatatcgtgcaccccactttctggactaagatgatgacctggtggttcaccacgttcatggcgcctgccatcaaggccaaggtgcactcgcttccgggtgtggagcacctgtactcggccatcaccaaggatcagctggaaattcccgcctacatcaccgagtacgacatggcgaccaatggcctgcattacttcaatcctgtgccgactgcctcgtag

SEQ ID NO: 28797 - protein, 217 aa, DROSOPHILA
MTMLEGMTSIDLGSSPMQETTGDMNDVLPDELMESPEERYERLLRRAQVEDLTEVSGIGCLYQSGVDRLGRPVIVFCGKWFPAQNIDLEKALLYLIKLLDPIVKGDYVISYFHTLTSTNNYPSLHWLREVYSVLPYKYKKNLKAFYIVHPTFWTKMMTWWFTTFMAPAIKAKVHSLPGVEHLYSAITKDQLEIPAYITEYDMATNGLHYFNPVPTAS

SEQ ID NO: 28798 - DNA, 2820 bp, DROSOPHILA
aggatacttttagtttaaacgaccgctatccaaaagtcgaagctcaatagatgagcacaagagtcctggaaggttaaatctcaccacgtctctgcaaacgaaccgctgctgtttttggtgtaatttataagttgaagacccttgaattgtgatgatgtgaaatttacagttaacatgcgaaactaatcccagttcaatgggaacgaacaaatgtctttatattaaatgctaattgaaactaactataacgagtataataatgtatctaaatacacacacttaacgccattgaaaggatgcatctgaggggcgtatattattgtatcatagaactatgtaagcagagattgtattttacatgcaaaaaaccattcaccaacgagaggaacttgcttctacttcaagagatctccgaaataccttcgggtctgtccatggtcatgataccccagaaaagaagaacagttttcagattatattttgaaactttatgaggtgtattttaaattacctagaaccttttgttctaaccaatttaattgctgctggcagcttgaaaactgggaacttcgaactatgaaactgtactatacagataacttatctacaaaagctatcatcataatgattttattttcttttttaactttagattcctcattttctagggtatccatagtttcggaccaccgaaatcagacatctcttctagttttgttgaatgttaatcatcgataaaatgtatgttcttggatgtgctgaatatgtatatttatcttcaaaattcattgtaaatgttagatatgaaaaaccgaaaaaccaaaaaactcgaaagcaaaataaaaacaaactcaattttgtgtgtgtatgcctgcaatttaaataaacgaaatttattcgaattataaaacagaatttgatatgactttatttggttctgattgccagcaaacttgatcccttcttgcggttattgtggcgttaattagtatagatacgttcagctcaagcagacgaatacgcaatcatctaactggggattccacaggttcggtatatccaattcgtggatctcacccagttccagcataagaactgctccatttttggccgtttcgatggcgttgactatattccgagcgcaaacctccgccgtctgacctttcaccttgctgaagacggtccgcatgcgagtctcataaaatgggaatgtcgttttcttatcaatgtccttaagaatgccggtattcgtgtagcctggacagatggtaatgaagcccacaccggaatgggcataatggatgggactctgaggtaagtattaatcaaaatatgatcgctttctgttcttccatttaacttacagccatggccctggtaaatgtggtgacacctgttttggaagtggagtatatggccatcaaaggcgtgggctgcagaccagccaccgaggaaatgttcactatgagtccacctctaccaccttttgacttgtccatgtattcgagtgccgtcaaagtgctgttaataactcccacctttagaaaatattgataaataaatccctttgaaagtacaatttcaagtattaccagatttatttgtatggtcagttcaattcggcgatcatccaaaaggccacttccattgaccaccacatcgaagtgtccaagtttctctgcagtcgccttataggcagcatctatatccgatttctgagtgatgtccattttctggtagaagatttccgtatcgggatgctgttttttccactcagccaagaggtcgtcatccacaatcaagtcaaaaatggccagaccctaatcgagtcattaattagtatatattctcaggtcagtttgcttataaatctacttttatttgcttcttaagcagttcttgcacacattttttgcctatgccgccgaatccgccgagataaaccacattttttccttccaaatccatttggcactttataaattctctaaaatattccgtgcagttgttcagttggcagcaactggcaaagtactcttcataagatctacaacttacaagcaatccagttagtatcgctctacttttttgggtttatctgatgtggggcctagagatttgataaaggctatatatataaatggagatgtttgatagccgcctatatactagaaaagcatgcccattttttatggaaggtctcatatttttaaatgagagttttgtgtttagtgtttttctgttactataacaataatgaaaaataagcaacgtaacattattttctgtccgtgtggccccataaaatgtcaaagaagctccattaacttacaacacttttattttaaatcaccaaggaattgaaagagattacaatatgatgcgcacataatagaaacaataatgcggtattaattatccaactgtggcttccacatgactggcatgtccacctccgtcgtctcacccatctccagcatgaggacagttccatttttggacgtctctattgctgagaccaggttcctcgcacaatcctcggccttctgacgcttcacccggttgaacatggccagcatgggagtgtcgtaggtgaatgtcgtcttgttgccaatatcctccagtagcccagtgtccgtgaatccgggacagatggtaaggaagcctacaccagagtgggcgtaaaagtaggggttctaagggggatgacatatgattgacatatgatatgatcaaaccatttaactcatttccattctacttacagccatggctctggtgaatgtggtaactcccgtcttggccgccgagtaaatggcc

SEQ ID NO: 28799 - DNA, 765 bp, DROSOPHILA
ggtctggccatttttgacttgattgtggatgacgacctcttggctgagtggaaaaaacagcatcccgatacggaaatcttctaccagaaaatggacatcactcagaaatcggatatagatgctgcctataaggcgactgcagagaaacttggacacttcgatgtggtggtcaatggaagtggccttttggatgatcgccgaattgaactgaccatacaaataaatctggtaatacttgaaattgtactttcaaagggatttatttatcaatattttctaaaggtgggagttattaacagcactttgacggcactcgaatacatggacaagtcaaaaggtggtagaggtggactcatagtgaacatttcctcggtggctggtctgcagcccacgcctttgatggccatatactccacttccaaaacaggtgtcaccacatttaccagggccatggctagtcccatccattatgcccattccggtgtgggcttcattaccatctgtccaggctacacgaataccggcattcttaaggacattgataagaaaacgacattcccattttatgagactcgcatgcggaccgtcttcagcaaggtgaaaggtcagacggcggaggtttgcgctcggaatatagtcaacgccatcgaaacggccaaaaatggagcagttcttatgctggaactgggtgagatccacgaattggatataccgaacctgtggaatccccagttagatgattgcgtattcgtctgcttgagctga

SEQ ID NO: 28800 - protein, 224 aa, DROSOPHILA
MDITQKSDIDAAYKATAEKLGHFDVVVNGSGLLDDRRIELTIQINLVILEIVLSKGFIYQYFLKVGVINSTLTALEYMDKSKGGRGGLIVNISSVAGLQPTPLMAIYSTSKTGVTTFTRAMASPIHYAHSGVGFITICPGYTNTGILKDIDKKTTFPFYETRMRTVFSKVKGQTAEVCARNIVNAIETAKNGAVLMLELGEIHELDIPNLWNPQLDDCVFVCLS

SEQ ID NO: 28801 - DNA, 2869 bp, DROSOPHILA
gagcggcttggcttccgaatcctccatctggcggaggctgtcgctcatgtggccagtggcgttgaccaccaccttcgcccgtatgctatacttcttgcccgtcagctggtccaccgcctccgcgcccgccacattgccatccttgttcttgatgagtctcgagaccttcatgtggttgcagatatctgctccgtaacgagccgctgtaagggcaaccgaaaggcacatcctggcatcgtcgtgctgaccctcgtagaagacgaaggcgccaaacagctcctggcgtcgcagcatcggaaatacttccaacgcgtcgtcggcactcagatactgaaaactcctggtggccttgggcgccatcaggtggtaaatctttagcttcatgtagtagagcggagcctgccaccagtggtggacgggcagcaggatggggaccggctggctaagatgcggcgccagcttgccaatgtggctgcgttcctgcaaggagcagcgaacacgccgaaaggcagccacgtccagacgcgagatggcctgctccagatccctgaggccgccgtgcaacagtttgctcgatttggaggaagtgccgctgccaaagtcattcgcttccaccagggcggtcttcaagccccgcgtggcagcatcgagagcacagccggaacccacggcgccgccgccaatgatgaggatgtcgtagtgggttcgcttaaaggcctccaggcacatctttcgcgtgggcagctcccgtttcatctgtggcactggagtcgagtccgcttgcctttcatcgaatccaaaagcgccgtggcccagcttggagctgcccagcatcaccgccatttgaatgatcttggccatggtattaccccctgctttacacaccaaatttggactatttttgcgtgggtcaacaatatatctgacatctaacgaaagcacaaaaatttggacgggtgtttgcttgcttttggaaatatgtttaatgtacatacatgcgaataaaaacttatcgttttcgttccgtgcctcaaatgttggaatatcaatgggataaattacttttagagtctagaaccgccgtctgaaggaattacacgtgtagagggttgtacaaaaacgccaaatgccaaaaattatcgttaaaacttagcacaaatttactataaaaagctttcccgctccactgtcccgctcctcatgtgactctcgggctctccgtttgttgattaactaagcgactccggagcgggctggaaagtctctgctgggcattgtggctcctcctattgcttggcaccgccaaagaagaacttgtagaagagcgtggccaccaagcacaggacgaggggcaccagccacgacttcacagaactctcctcggtttgctgttccgtgctccaggtcggctccgacttctgggccacgcttgtcctttcgctctccaccagctcaccgattttgtacttcttcatcatgtcgcgggcatcgttgctgtggccaacgtcctcaaagttctccgtggcatctttgccggcctgctcgatgagcacctcttcgccaccgggatgctgtcgtgaaggaaaagagacagattaatatattcgcataaataactgttggctgatcttggataaatgctaatggacgtctgaccctgaatttcatggaccagacagcagagggtatggtatcaaggtataaagtcgggaatgcttcgaaacattcgtttatgcggaagctttatggtaatattttatacttccgttgcgttgaaagtaaaaatatcacaactaatttcagttacagatttaatttggcacttataagccaataaagttacagaaactttgatcctaagaactcgagcgaagttacgttttgattgtaccattataataatgttgaaactttgtactatagcttagagtcatgctgaaaaagccgcggagcaagtatgatgtaattattgttattaattactattaaaagcaaacaagttgtttcgcctcaattgtgctgagtgataagctaaagtaattttagccaaactcttcaaggtggccgagtgcaattgaatcgatgataagcgtatctcataattattttcacaattctttaaacttttacatagtccaacttagccttatctaatttcgatgattatattgtaattactgtgttggtttatatatgacaaatcggaacatacatatgcaggaaacacattgaataagattcgtcaaaataaactgatcatgttgaataaataacgaataaacacgtaaaaaataatctttagatccagcaaacgctctaaaatctggaagtctaatttgcgatttgtctggtgatgctgttacgcagatagcaaggtaacagtagctaatgttattccttaagatggaagaggaccaagcggatcagattaggggcatgttttaaacatggactggggatggctgcggtcgataggcggactgaaactttggaatggaattataaattagatgcttggtcactctcactattgttattttcagcgtgtacctaaagtgcaacgtcatcgttagatcggaattttcacagagcttatcttagatcccgcagatagcgggaatgcttgtgtagtctatatgtatagatttggtgatgaccctactgctgcgtcagggtgatacacttttcggagccggcggcagtcggtttgtcggtggtgcacttgcataagaatccgaattcaaatcggagtccgttaatcaaatgagatgcaaatgcagacgcggatttcgcttaacacttgaccctcgtcgcccatcacacacatatatacatgtatgcaaatggatagtttcgccatgtggagctc

SEQ ID NO: 28802 - DNA, 633 bp, DROSOPHILA
ctcgagttcttaggatcaaagtttctgtaactttattggcttataagtgccaaattaaatctcatcccggtggcgaagaggtgctcatcgagcaggccggcaaagatgccacggagaactttgaggacgttggccacagcaacgatgcccgcgacatgatgaagaagtacaaaatcggtgagctggtggagagcgaaaggacaagcgtggcccagaagtcggagccgacctggagcacggaacagcaaaccgaggagagttctgtgaagtcgtggctggtgcccctcgtcctgtgcttggtggccacgctcttctacaagttcttctttggcggtgccaagcaataggaggagccacaatgcccagcagagactttccagcccgctccggagtcgcttagttaatcaacaaacggagagcccgagagtcacatgaggagcgggacagtggagcgggaaagctttttatagtaaatttgtgctaagttttaacgataatttttggcatttggcgtttttgtacaaccctctacacgtgtaattccttcagacggcggttctagactctaaaagtaatttatcccattgatattccaacatttgaggcacggaacgaaaacgataagtttttatt

SEQ ID NO: 28803 - protein, 63 aa, DROSOPHILA
MMKKYKIGELVESERTSVAQKSEPTWSTEQQTEESSVKSWLVPLVLCLVATLFYKFFFGGAKQ

SEQ ID NO: 28804 - DNA, 4736 bp, DROSOPHILA
ggaaagttaaaaggcaggccatacagatgaatgttggtgcgctccaacaggtgatgcacttcctctggcagttcgtcgtggttgtagaccaggaaattctctattcccaatgcctggtggaacaggaagaactgcagcaaagcattttcattacgtgcgaacttggaggtcatgttgaagccaacgagatcaacgcaaacggtggctggtagtcggtgcgctacagctaccaccttgtcgtcgtccttcttgctcgctggtctcaggtttcgcagacgcagcctcactggactcctggtggttgttatgtccgtgaaggagacactgccgggctgaccgaaatctcggctcacctggcagaagaagtgatagctggtgaagttggaagacttgtcatccaccaggctctcaatggagtccctctgaaaacgaaactttccctgcacactgcgtccgcccagaaggtccaagctgcaccggaagtcgactactgctcccttttttccgaccaccagaacgtgggcttcgccgccggccaccagttcgttgcgcatccagaaggcggagtaggcatgaaaggagtctccgatcacctgccacacgggcagagggcgccacagcacctgcgccccgtcctccttggttccgttctccaggcggcggaggacagcggcatcgttgcgtccgaagaagttgacgtacttgagcacgtactttaggcgattgttctcggtcttgtacatcagcaggatgctgacgctgaggcaggagatgagcagcagcaccagttgctggtatttccgcatcctcgccaggtaatcttaatgcaagtaaaaccaaaacaattaacaatacactccctaaattgatcccgccagcaacagctgatttccagggctggcaggtgctcaaattatattcagaacgcttggcggtggattcaaaagtccacgttgagccaagctgcttccaaattcgttattcaaattttgtcgacctggataaagtaatcaccaaaccaaaaacatgttagcttggattttatagttccagtcgtaggccatttattgtttttaaatcaactatctgtatactttacgttagacatcttaaatcaaatagaaattcgttatatgttatttttcagtgtgcaattttttcagttaatttacaaataagcgtcaaagttattgtggaagctcgcatttttaaatgacccccccaacagagctgcccacttttatgcatatagcgggcgttgccagatgccagcagctcggttttgttgattgttgtgttgagtcaggagcaaaaagaaaacaccgataaaaggagagaactgcgaaatccggaaatccccgtcctgaggcgcaatttgccccagcaagaacatggccagcagcaaggagttatgctccatccgggaatgggcaccgctcacggaggtcatcgagcggattccggcgcgcctgcagcgcggtttctttccggcgaatctcaacctgacctgtgtggacgccaccgaggagttcctagccatgggcagcgacgcgggcatcgtcttctggtataatcgccacacgggcgagatgcagaagctgaaggctgaggtatgcttcatgatgactcattctcgttccccgaacgtgcgtgtgattcccccattaactcaacgtcgctctgccccttccccttccaggtggccactcggattacgtgcgtgcgggttgtcaactccgtcgagtacatggttgcggctgggtgcgccaacgggcaggtgagcatcttccagatacagaaggagctgccacgggaccttgatttggtggctccttgcaccaagagtcggcccattgagcggtatactatccgggatctgcacaagtgcgtggtcagctgctgtgagtggtccaagaacgggatgaagctctattccggcgatcgccagggagtggtggtgctcacggagctcgattaccaggcggtaaggggtaatcttgtatatttaaatatttaaattaagcaatcgcctattgtgaccgttgaatgcagcacctcagcaaatcggtggagatcctgagcgaagcatacgagatcgtacagcttagcgttcggcagagctacctactggtggccaccctctaccgttgcatcgtatgccagatggacgctcaaacctcgcagtggaacatcacccaggtgggaaagaaggatcgcaaacagctcatcgactgcggggccatatttctgaagaaacaggaagcaaacaagccgcaacttgtctgcggacgtcctggcctgcgcttctgggtggcagacgctgcgggaaatgtgtccaaaacagtgatattccgagatgccgttctgcgcagtcccacctgggaaatacctattctgaaccccaagcagcgcagtgagccgtccggtacccaccacacgtctgcgtctacatcttcgactagacattctggactggcagatggcgatgtgggctacgtggccagcagcaactttcggcaactatatctctacgatggccacgactcactactggtaacacacgacgatgcaactctgtacgtacttaacttggatcgactcaaagtagaagccgttgcgcgaggattgcggaagatccttgatttctgcgtctgtggcaaagagatcttcgtgttggagggcaatcgcacattgcttcgtctagctcctttaccggaaccaccaaacaagacggccaaggtcatcttcaatcccctgatgccgcctccagttccggttctaggctcgcacctatcgcaactggagtcgccgatagagcttcaggcggagccggttcttcaaaacgcagaggagtgtttcgagttgtcaccggtggaacaactgaaccttaatgtgcccatcgaaatagctgtggagtcgccactgactcaacaaaatcgtcgcttggaaatcttccgccgcatcggagaaatggacttcgagcagtccatcgtccacaccacccgcaagacatccgtaggcaaaccgcccgaggccagtggtgtgggaatcgttgagattggccatgagacccatgagctgcggttgccgcttaccaatgccgccacactaatggaggcgagctactgccaaatggagaagtaagtaacttatatatttacacttcatatttgatattaacatggcttccctcagcaatggtctggcctctccactggacatgaaggcagccttccttcagcatctgcccgatgcgctaagtcccaccaccttgcagaagaccgttgcggagaaggccaagaccctggccgccgagctggatctgcccgaggtgcatctggcgccgttgtcgcaggaggagctgcatgctgtccaggctcagacccctcaaataagcgaccctctaatcaggtgctatcccacgcacctggaagaggccagtatccaaacgagttcgcgggaaaatgcaaccaacccagctgatgattatcatgtaggcgagcccgtggacgggatacggtcatttggcgtctccaagcgtaaaatggctccgcttaagttcgtcttaagccagccaaagccgactctgaagttggaagagaacagggatgatgaggagtacaccagcttcctacccgattttaggcgggctggcgatccactggcgatccacaaggaaacgccagccaccagtgactcaaacacctccagcgagtgggagtttttggacaactagttcagtattagaattaagtgcatactcattcgattccatttgcatttttgcactttattctctttctatgtttctatgtttgcaaaagtgttgtgtttatcagattgtgatcaccgtgatttagttactctttttagtggaatttacatacataagtgtacataatattagacgtatactgaccccaccagtatctacacaaatacatatatttcaaatattagcctttatttaatgttatcgtacgcttgtttaagatatttaaatactttatgtatttgctactcaagttcaaggtcgctttgcaatctcgaaatacatttatttgatataagtgcaaacatttcgtccaaagggtgccccccagcaggaaatggatacggactgataccgagtatttggttgttgcttttttctggaactatatgccagacttgagccgccgatagagttgcatgtgagggaaacgagacgcccacgcccacacccactgcagcatgtgcccggtctgctgattgctccagcggggcaattcggtatggaaccttcttgatctgcagtgcaaacggaacggcccactgcattgattgatcaacaaatagtaattcgagctcccttcgcactcaattggctgcaataatggaaagttttgagaagtttcgcttacatctggcttccagaagattcgacgaagccttcggcctgctctcacgggaagacttagctaaatggtaccggagaattgaattctactcatgcatgtgtgcagttccaatccaacagatggtactgagatttttgaaattgattataattatgatgatgtaatgatgtaggaatactaattaaagattattcaagcgaggctaagggatctttaaggcctgtcagtataggattgtatctatgtatggaaataaaatataaaaacaaaagagaacgctttagtcgatctcctcgactatcagatacgagttattgagctagtgggaatgcaagg

SEQ ID NO: 28805 - DNA, 2405 bp, DROSOPHILA
gataaagtaatcaccaaaccaaaaacattgtgcaattttttcagttaatttacaaataagcgtcaaagttattgtggaagctcgcatttttaaatgacccccccaacagagctgcccacttttatgcatatagcgggcgttgccagatgccagcagctcggttttgttgattgttgtgttgagtcaggagcaaaaagaaaacaccgataaaaggagagaactgcgaaatccggaaatccccgtcctgaggcgcaatttgccccagcaagaacatggccagcagcaaggagttatgctccatccgggaatgggcaccgctcacggaggtcatcgagcggattccggcgcgcctgcagcgcggtttctttccggcgaatctcaacctgacctgtgtggacgccaccgaggagttcctagccatgggcagcgacgcgggcatcgtcttctggtataatcgccacacgggcgagatgcagaagctgaaggctgaggtggccactcggattacgtgcgtgcgggttgtcaactccgtcgagtacatggttgcggctgggtgcgccaacgggcaggtgagcatcttccagatacagaaggagctgccacgggaccttgatttggtggctccttgcaccaagagtcggcccattgagcggtatactatccgggatctgcacaagtgcgtggtcagctgctgtgagtggtccaagaacgggatgaagctctattccggcgatcgccagggagtggtggtgctcacggagctcgattaccaggcgcacctcagcaaatcggtggagatcctgagcgaagcatacgagatcgtacagcttagcgttcggcagagctacctactggtggccaccctctaccgttgcatcgtatgccagatggacgctcaaacctcgcagtggaacatcacccaggtgggaaagaaggatcgcaaacagctcatcgactgcggggccatatttctgaagaaacaggaagcaaacaagccgcaacttgtctgcggacgtcctggcctgcgcttctgggtggcagacgctgcgggaaatgtgtccaaaacagtgatattccgagatgccgttctgcgcagtcccacctgggaaatacctattctgaaccccaagcagcgcagtgagccgtccggtacccaccacacgtctgcgtctacatcttcgactagacattctggactggcagatggcgatgtgggctacgtggccagcagcaactttcggcaactatatctctacgatggccacgactcactactggtaacacacgacgatgcaactctgtacgtacttaacttggatcgactcaaagtagaagccgttgcgcgaggattgcggaagatccttgatttctgcgtctgtggcaaagagatcttcgtgttggagggcaatcgcacattgcttcgtctagctcctttaccggaaccaccaaacaagacggccaaggtcatcttcaatcccctgatgccgcctccagttccggttctaggctcgcacctatcgcaactggagtcgccgatagagcttcaggcggagccggttcttcaaaacgcagaggagtgtttcgagttgtcaccggtggaacaactgaaccttaatgtgcccatcgaaatagctgtggagtcgccactgactcaacaaaatcgtcgcttggaaatcttccgccgcatcggagaaatggacttcgagcagtccatcgtccacaccacccgcaagacatccgtaggcaaaccgcccgaggccagtggtgtgggaatcgttgagattggccatgagacccatgagctgcggttgccgcttaccaatgccgccacactaatggaggcgagctactgccaaatggagaacaatggtctggcctctccactggacatgaaggcagccttccttcagcatctgcccgatgcgctaagtcccaccaccttgcagaagaccgttgcggagaaggccaagaccctggccgccgagctggatctgcccgaggtgcatctggcgccgttgtcgcaggaggagctgcatgctgtccaggctcagacccctcaaataagcgaccctctaatcaggtgctatcccacgcacctggaagaggccagtatccaaacgagttcgcgggaaaatgcaaccaacccagctgatgattatcatgtaggcgagcccgtggacgggatacggtcatttggcgtctccaagcgtaaaatggctccgcttaagttcgtcttaagccagccaaagccgactctgaagttggaagagaacagggatgatgaggagtacaccagcttcctacccgattttaggcgggctggcgatccactggcgatccacaaggaaacgccagccaccagtgactcaaacacctccagcgagtgggagtttttggacaactag

SEQ ID NO: 28806 - protein, 710 aa, DROSOPHILA; identical to SEQ ID NO: 4215

SEQ ID NO: 28807 - DNA, 6515 bp, DROSOPHILA
gcgcgcatggaacttggtgcattgaatgaagcacttgtggacgccaatgaggcgatgcagcaggccgcccaaagcggtgtgctctgcgaagtggtcgaggtgctgaagcgcatccagaccgagctgctcacgcggatcagcatcagcagcgaggatcagaccggcaggatgtcgaatatcggcggcggggcatccgtcgcatacgaatctcatcatgagatcaccgatttgtaaatgtcgattgttgtgtattgttgtactcgtcgtatacccttcgaattaatcgctattcctacttaagagctaccctagaccttaatttttgctatttattgccttcgaatgtttttaatttaaaccaactgaaactatcattgtaatttgtttttaaattttctttttaattgtgtctgcgcatgtaaaaattagttttatactctgatttagcataggcatcagttcttatccataacgaatattaaataaatgcgaattcttttaagatttaataaacacattattattttgatattcgatgcagacttttgggggtaggctcgggcactctgggctaagattataaaacattctttaacttattagtgcatagttttgagctgtttttaaataaaacattgttgaacaacggcaagggagttgaaataactgggaaacattttaacgtttgcagaatatattacaaattttcacatttaagagtatttaaatttatgaacaaaatttaaaacaattatgtgaacttatatatatgtgtgtgtatgtacaattaaagcttaaacatttcgggggagaataaaacataggaatgaaatagtttgaaatgaaatgtgggcgtatttaagattaataaataggaagtttagagagctttaaatgctaatttgtatactagcatgagagtgaactttccataaataagttgtgtgttccaacgtatacttaagtacatataaaattaacaatggtagttctcttttatctacgaagattttccattaagtttactcagttcagttggttcgccactatcgccatgtaccaagcgggactcgacgagcggtgctgaaatctgcaaatgcagaacgtagtcggcagctggaagaacaaagtttcagttacgccaagagcttaaagtgggaagactacatggaaataaataaatagaaatgtgctagatgtggcatgttgttttgggagtaatcaaacatgggaacaagctgtggatgaaagcggaggaaacgaaaagcgtgagatttttagtagcgctaatgatacgtgtaaatgaatattctactaaaaactcctctcactttgctccaaaaggaattccagatcatcggggcagtctatcgtggggaaatcaatattagtcgactccttgaggatcacaccaatagtcttgtccgcactcatcagaaacaaaggtgcattcgccttggcgagctccttttgcaatgagcccattccgcgagctgccgtaaaatcgaattctggaagacagcacatttaaaaacctatagcaaaaagtaaatcgtaaatcataccatgcacgtgggcgcaatccaagaccacaggtgcggttccatgaatggtcagagcttttgagatgcccgaacgaacccattcgactgccgggaagtacagtgaactgtgcttagggcgaatcagaatataattgatgccattggtggtttgcagtttggagacactcagtacgggtcgagcggctcggtaaaccagaaacgccacatcggtactcacgcccagcagaagaccgatctcgacgcccacagccagactcattacgaatgtaatggcacctggaagcagctcccgccggctgcaccgccacagcggcttaatgacctcgaactcaatcatgaatatcaccgccgagatgataaccgcactgagagcagccttcgggatgtactggaaataaggtgccaggaggccgagtgccaacagaaccagcacgcttgtgtagcagcctccaagcggcgtccttactccactggcgtggttaacagcgctgcgcgagaaggatcctgtcaccggcatggagctgcagaacgcgccacaaatgttgctcatggaaagtgcaaccagttcccgcgtcggactcagtccagctcctccaaaggctttcgaaatggctacatttccaagcacagctataatgggtaggattagcatggaagggcccagttccgagagctgaaaaaaagattaaaaacattatagttaagttcttcggttatcaggaagttggtcgatcgtggaattctcctttctatttttatctacattaaaaaggtgcaattaactttataaaattggaacaaaatccagagagggcggaatacaaataaactcattttaatttattctaaagccgagcgacaatttaaaacaagaaaaaggtatcttaaacaaagcaacgaaaaggcagactggcttgatgataaattaattcggtgacaaaaaaaagctaattagtctacttgtgcccacataccatctgttcaaagttctgtctgatctcagtgccattcctgtccagtatggtggtctcaaactttggcagtgaaacgttgggcagaccgcttttgacctttccagtaaggatgaacgggcagctctccatctgctcacatgtgctgtaggccagcacactggtcaccagtacgaccagcgcattccgaccggtgcctattacccagatgctaccacttacaagctgctgtgttcgcaagttccggattcgaccatccagcttaacgtcttttagtttctaagggaattgaatgggtttataaagtagtttcttaggatattttagactctcttacccgcagaagtagcaaaactataatggaagtcaaaccaagggtaaaatcaccagttctaactttgtgtagatttccgaacacggagcgcatggtattgatgaaatcagacccggatccaccacgcagtcccagcaaaccctttagctgcgaggtgccaatgatgacggcggtggccgaggtgaatcccacggtaactggcagtgatatcaggtccaccagggcacccagtttcagcactgccatacccagctccacaacaccagagatgaggcacaaaagtatcgcgtacgctggacccgatcccagtccaaatcccgtgtgccggcttgtcatcagtgcgagcaaagccgtgggtccaatggtcacctgccggcagctgcccagcatggcgtatataataccgcccacaaaggcggagtacagaccatattggggctccagtcccgccagcgtagcgtaggccagtccttggggcaacaccgtcaggccgaccgtcactccggctatcagatccgcaactgcatcttggccagtataaccgtgcagccactttagacccggcagcaggcggtatccccacttcctcaggctcatggcttctatttctgtgggataaatacaaaaaaaaaaaaagaatgagtaatgtattggagccataagaacatacttcccagctcattaccaaaaaaagggaattgaaaatattcaacaagattaaaatagaattacgtcgtatatattgaagatcgcaggttcaacgacttttccaatttcgcataattatacatttgattatgagacgtctgcgtgacagacgaaaagatagaaagacatcaacttatttatcaccaataagcaagtcataaataaacgtcgtagaactcaaaacaatagaagaaatacgagtttatggtaaataaaaaagaatagctgccagaattacaaatggctcagtgagtaaactagatggtataaattaaacaaagctaaccgaaaacaggtttgcgttattttacatttttttgaactgaaagtgaatagaaatgccaaaagaaattagcaagaatccaaaggcaatcaaagctattataagcattacaaataagttgtctcaatcttcgcatagtattgcattcatctaaacctatttatggaatgattgttaccacatttaaaaataattaaaattacacgtttcgctcttctcagagctattccacttcactaacaatattgcattccatccaaattaaaacaatctaatccaaaaagtctatctaaccgcaattcgttgaatttggttgaaaactcacgtatttaaacaaatgttttgatgttgttgtcgttttgaagggcgcgttccattcgaaatgcgagttcttttcggttcgaattcttctagaattctagaaagaacggagagctctggggaagatcaattcggttcggttgctggccagagactgaaaaacgatcgcgtgaacgaagaattcctgatcagtgatcacacgaccacctcaattagctgaacaactggcgaagttgaaagtattggttcgggtcgcctaaaacgtgatcaaattgctcgaccgaaggcacgagatacaatgtgcactttaattgaatttcgctttgtttacaaactattcttttcaatttagagccaataattatggcgaaattgtttgtttgttatgtcatttgcaaacgccacaatggcaaatattgccaatcgcttgtggaaagaatggcgagtttagaattgctattagttccacaaagcaatgataatgcgatttatacaatcgacagtcaacaatttaacagcgtttagtgaactattaggtagcattgtgaaataagtaatgaatataatgtatcttaaaataatcagaccgattagagcgactagaatgattttctaaaaacgcctataaaggggaggtttaaatggaacgttcttgttggatcggtttgtaaatatttaaatataaaatagaaactaaataaatttgacatttttgcaacacaatctagaaagtttccttccttgtaggtaaactattgaattccagaggtcagataagaagaaaagcccttatcagtacggaaacgtgtagttcaagtggttttatcagcattttgtaaccggattgagcataaaaatgcgaaacgtgcgaaaagtttattaaccctttgaagaaactggagaaatccgttctttgagggtccacgaaaccaaaataattggagagatcagtcgttatgtaccgatgtacgtacatgtatgtatgtatgtataaacataattgccgattgttgacagacggcgagctttatttatcttatttgctttctttttttaatttggcatgtgtgaaaaaactagttttgcactgtattggtataaacgtaaacaaactgagaaaacagttgattcaattgtttgtttatttataacgcgagccaattcctcaagaatttgcaacaacaaatgggtcaagttaaaaggaaagtgggacagacgtaaaaagaaaaaccacaaatccagtaacatttcttacttgattattatgatctatatttttgtatcaacttttaacacttaacattaaagttaaaaaatcacaaagctaccacttctaccggtgaaattgaaataaatatatttgtttgactgtcagcgaacagctgaaagtctagtgttgccatcgctcaccaactttcatagtttccctggcgccctctaggcggctgctatagcgagtcaaaggcagggcttggcagcacttaagtggctgagtgcctaatatttaaatacaacaaaacccatttttttttgttaatttagatttctaattactatgcttatgaacagaaactaaaaattcaaaagatgggcaccactaaagtcgccaaactatcgatatttgtagcaattacacgttttccagcacttgaatcgaagagcgaacgtttaccctcactgccgcaatcgcgaacaattttttattatggcacttgcgcggctcacaaacgatattcgctgataaacattcattggaaattattgccgaacgcagaggactccgccaattgaagtgtgcgcttaaaacgatcgccgtgcaggaagcggaagtgccccataacagctattttctcgccgctttctcccccatcacccccccgcaaaacaagcgacgccgatagaaacatttaatttgtgcaaatagccgaaacctacacggtcggccatcaaatattatgaaatgggtaagctgcgagggtaaccacgagtgggtccatttccacagccttgcgtttccacggcgcaaatcgaaaacgaactgcaattgcaaatgcatcttcaatgccgctgcaagtgtgtgtgtgtgtgtgtgtgcggtgtgatgtgagcgtgtgtgcgagtgtgtgcagttttcttagggcgttttaactgttatttattttcggtttcttcattttccgcaaatagtcactttttcgtgtttgtctgatttccccccccccccccccagcctgcactatgaatccgatttcgaaatggattgaaattcacaccctcaaatcttcagtgtcacttgcaaatgctcaaaaacgtatggaaatttctgacttgct

SEQ ID NO: 28808 - DNA, 1868 bp, DROSOPHILA
aagtggtagctttgtgattttttaactttaatgttaagtgttaaaagttgatacaaaaatatagatcataataatcaaaaatagaagccatgagcctgaggaagtggggataccgcctgctgccgggtctaaagtggctgcacggttatactggccaagatgcagttgcggatctgatagccggagtgacggtcggcctgacggtgttgccccaaggactggcctacgctacgctggcgggactggagccccaatatggtctgtactccgcctttgtgggcggtattatatacgccatgctgggcagctgccggcaggtgaccattggacccacggctttgctcgcactgatgacaagccggcacacgggatttggactgggatcgggtccagcgtacgcgatacttttgtgcctcatctctggtgttgtggagctgggtatggcagtgctgaaactgggtgccctggtggacctgatatcactgccagttaccgtgggattcacctcggccaccgccgtcatcattggcacctcgcagctaaagggtttgctgggactgcgtggtggatccgggtctgatttcatcaataccatgcgctccgtgttcggaaatctacacaaaaaactaaaagacgttaagctggatggtcgaatccggaacttgcgaacacagcagcttgtaagtggtagcatctgggtaataggcaccggtcggaatgcgctggtcgtactggtgaccagtgtgctggcctacagcacatgtgagcagatggagagctgcccgttcatccttactggaaaggtcaaaagcggtctgcccaacgtttcactgccaaagtttgagaccaccatactggacaggaatggcactgagatcagacagaactttgaacagatgctctcggaactgggcccttccatgctaatcctacccattatagctgtgcttggaaatgtagccatttcgaaagcctttggaggagctggactgagtccgacgcgggaactggttgcactttccatgagcaacatttgtggcgcgttctgcagctccatgccggtgacaggatccttctcgcgcagcgctgttaaccacgccagtggagtaaggacgccgcttggaggctgctacacaagcgtgctggttctgttggcactcggcctcctggcaccttatttccagtacatcccgaaggctgctctcagtgcggttatcatctcggcggtgatattcatgattgagttcgaggtcattaagccgctgtggcggtgcagccggcgggagctgcttccaggtgccattacattcgtaatgagtctggctgtgggcgtcgagatcggtcttctgctgggcgtgagtaccgatgtggcgtttctggtttaccgagccgctcgacccgtactgagtgtctccaaactgcaaaccaccaatggcatcaattatattctgattcgccctaagcacagttcactgtacttcccggcagtcgaatgggttcgttcgggcatctcaaaagctctgaccattcatggaaccgcacctgtggtcttggattgcgcccacgtgcatgaattcgattttacggcagctcgcggaatgggctcattgcaaaaggagctcgccaaggcgaatgcacctttgtttctgatgagtgcggacaagactattggtgtgatcctcaaggagtcgactaatattgatttccccacgatagactgccccgatgatctggaattccttttggagcaaactgccgactacgttctgcatttgcagatttcagcaccgctcgtcgagtcccgcttggtacatggcgatagtggcgaaccaactgaactgagtaaacttaatggaaaatcttcgtag

SEQ ID NO: 28809 - protein, 592 aa, DROSOPHILA; identical to SEQ ID NO: 15195

SEQ ID NO: 28810 - DNA, 7251 bp, DROSOPHILA
cgaagcctccaggagtccattgacgccctcatacagcgtatcacgcgaaaccttcgacctgcaagattgaaccaattatcaaacaaatggaaggcaaatgaacactgcaagcattggctgtttatctttttttgactgtcggactaatgcgcaaatgaaggcagcccacatattagttgcttatttggcacataaaaccacgtttttcttttgcaatcatttccaaactgatatggacatggaaaaggtctaaaaagctggtttctgattgccactgatcacaggatcgcttagaattcaaatttcattaatgtacccaatgtttagttgctttcttttacatattaaaatctggatttacacttacgccatcttttctgttcaacgtgcgatttagaaaggaagtgaaaatcggtttttagaggtgagaaacctctggcgatagtttcgtgggcgcgtgtgcttgtgcgaatatatatcgatattcattaatagggctattcacgagaaatgctggttaataaagaattataaattcttcaattgtttataaaaatattaaatctaatacccccttttttataagttaacggagtacacatacacagtggcatatttttagaatttcatataatatgttacgcaaaaatcaaaggaacgaacagaaataatggaaaataataaagggatgtcggcagacaatgacgtttcaatacacttattttttactttttatgtgtcacagcttattttttttttgttatttttgttacaaattaatgtataactgacagtagttagtgggagctcctaaattaatagctgccaatgtcacaaatcataataatacaaattgctaattaagaatattaagaatatatatatatattatttgaaggcgtttgaatagcaggaatcaccctaataacaaaatccatttatttggcgatgctttgtgggctgccaactggtttttatcactattagtttaccagccctggaactgcggctttgtttgtagccgagaatattggtattaaaatttgcacttgatctctataaaatctatatatgcaactagttagttactgtgtgtctgaagattctgttgattataggctttcttctctttcttcttttctttctaggtgatatcatagtgtgttcaagagaggcaaagagaaactctcttgcgctctctccttaaaacggagagtgcgtggaaatgaaaacattgctttcaccatctcgccgattagtctgcatatcagtgtttagtcggcttttcgctttcgttagataaaaattaagtgcgtggtgtcgttgcaattcgcggattatataagggatttgagccgcgactgcattgattttccattggccatggcccgcatcgttgaaagcaatgtaagttaaatgcaactaattccgttcgctggtatgtttatataactcctcgattcgcatcaccacctgccccgcccacatccatcttgttctattccccctcacatttcatagttgtcagtgatgatcatttttctcttggccaaatgcctaatgcctcggtggttttgcattctcccaaatttgttggtcaacagtgatgggaactgtttgtattagttatttgttattattttaaattatgaataattgagagaactaaatgcttgcactgtagaaatagtttgtaacctagccacctgatcatttaactcatctattggctcataaactaacacaatatgtaaatagtttccttcccatcactgttgcccagtgacgtcgccgacttaagaatagagatgatgtctgccttgtgccccgaggcaatgaatgatgcggatcgtctggtggaaaatctgcgccatgtgccggtccgcctgcccagggagttggaggttcgccagctgtgccgctcgttgagtgacttgctcgtcggcgagtcgaatctactgagcctgcagagtccgcagatcgtatgcggtgacattcacggtcagttcgaggatctgctccacctgctggaattgggcggttcggtgcaggagcatcgctacttgttcctgggtgacctggtggatcggggcaagaacagcgtggagacctttcttctgctagctgctctcaaggtgcgacatccggcacaagttagcctgctacggggcaatcatgagtgccgcagtgccactcgatcctatggattctacgaggagtgcctttcgcggtacggctctgcgaatgtctggaggatgtgctgccgtgtcttcgatctcttgccgctggcggctatcattgatggcaatatattgtgtgttcatggcggcctgtcgccggatatgcaacgattggatgacttacgtagcctggatcgctgccacgagatacccgaaagtggaattatagctgatcttctctggagcgatccacaggaagcgcctggatgggcggcatcgccacgaggacatggaaaactcttcggtggcgatgttgttgaggagtttacgcgcgcaaatggaatctctctcatatgccgcgctcatcagttggcccaggatggcttccgttggcattttggccaacttcttgttaccatatggtcagcacccaactattgctatcgctgcggcaacaaagcggctattctgcgcttaaatgctgctggcgattatgattttaaagtgttcgaagcgcaggcgctgcactccaaaccgcagccaaggaaaccgaaaaagcgttgtcgtcaattttttcaatgatttaatcgctatctgaatcttatcccaagtattaatacggtttgaactggccgaacctaccgatcactccaaagcgacctttgccattccaaactactcatatactcataatttcgtaatcaataaaatacgtgtacttagtaaaacatgcagctagatttacgttttgactttggcggtctttttatatgcaggttataatgatcttattaaaatataatgaccttgttaaaatagtttttactatcgatcatttgaaatgcaactaagcaactaaaattaatgcacttatagaatatctactttatgaaacatttcatttgaaatagtaagatcgtatatgtacatagcataactgcattttatctgcttagcaagtgagtccatattttttgcagccactgtgccgactcgtgctgactgtgcatcttatcacagagagcaaaagagagcgatgagagagtcatcatagatgtagatgtagttgtatttgtagcggctttttcacgcgacgactgggcttcatttcaattggaaattggaatcggcggcacgcggtcgcacgtatttgttaacttacggagttcggtgtgcaattcaaatcggaaattagccaatttttaacaagtgtttttgttttaatatgacggaattcgatgtaagttcaagtgcaagccgctttttctctctctttctactgtcatttccatttctcttttacaattcggtctctctgtttatcaaccagtgctagtgctgtgacgtcatggctaatgggtctcggacttgtttccaaagcaaaaaaaatatatactcatgcttaataatggaaagctcaaggtcgcttttgatatggggttaaagttggaagtctcaacctagtaaaccaaattagcagctgttttttttaaagggcgccttcgctttgcaatcacatatatcagttttgagtgcgaataatctgtgtgcgagatgtgttttttatttttgtgactttcttatcactggcggtagtttccaccagccacagtgacctttcatagcccatcagcccatcggaagaccaaacgcaataccactgggctaaaaattagctcaactaaatatcagattattaatacagtacaatatacatgcttaccatttaaatgaagtaaaaaattactatattaaaagatatgatcatttttgatcaggaccaatagcagagtaaaactggacttttttaatttggtttaatattttaaatatgacaaagagataatatacaaaggatttttccatgtatattaaaagatatatatgtttccatttctcacgatctcaaaagattaatttttactaaaattacctaaacagggttacaagattaagtttatagattatattgttattgtgctatatttaaaataaaaatgcagtcagtgcaatcagctttaaataaactgcctataggcctaaataattgattgaatctgcacttatttcaattttaacaatgagaactatgaaataggagttacgtgtgcattttgtgactaaattgtctcacttatattattactttttagtttgtgccactcgccgtgggtgtggtagccgtactcgccggcgccctgatcgtccactatctgctgaataagaagtccacgaaaccacgccgggaacccaatcgcaccgctcggctgcgcacacttgtggatcccaatgacaagtacctgctgcctctcatcgaaaaggagaatctgagccatgacactaggagattccggtttggattgccctccaagcagcatgtccttggcctgcccgttggccagcacattcatctgatcgccaccatcgacaatgagctaataattcggccatacactccgatatcgtctgatgaggatgtgggctacgtggacctagtcgtcaaggtgtacttcaaggattcgcatcccaagttcccggccggcggcaaaatgacacaacacctggagcagctcgagttgggggacaagatctcgttccgtggtccctcgggtaggctacaatatctcggcaatggcaccttctccatcaaaaagttgcgcaaggatcctccaaagcacgtgaccgccaagcgggtcaacatgattgccggcggcactggcattactccaatgcttcaattggccagggaagttctcaagcgcagcgataaggataagactgaactggcgttgctgttcgccaatcaggtaattagcgagcacttaggctagccaagttaactaacatggttgtattacttccttgcattaaagagcgaaaaggacattctactgcgtgcagagttggacgaactggcccagaagcatcctgaccagttcaagatctggtacacagtcgacaaggcaaacgaaggtgagttgcagtaataaaggaactaaatagctcatgcatagatatcattctcgtcttcataagatcgtatcatttgatcaatgtctagctcgtttgtacaattcaaaattcgctggaatgtcaattattttattgttagaactttaaaaccgtttaaagcacttaataccatggtttactctttcacttcgaacatattcatggactctttttttcaagccacattcaagaatattccacttagagtcggttcagaatggaatactacattttaggctgcaccaatctttcccttgcatcccagcatccccatcaccatccggagtatcactcagacatttttcaagcatctattatgttaagaatcttgtctctgccccttgaaccatgctgctatcaaacgcatgccgcgaatgggaaacgcgcgctttgtagcctggtcctacaacactggccacgtgaacgatgatatgatgcagcagcatctgtatccgccgggcgaggacacgctgtgcctactgtgtggtcctccacccatggtgaactatacatgcattccgggcctagagcggcttggtcacagggccgagcagcggttcagctattaggagttgatccagccgacaacatagatactattgcctgtgttttgatttaatttaacaatgctgagccagtgggaaagattgtgtgcatcaggtcttgctaagaacacttgtacgccctaaaatgttgcacttatattgatattccttcatattttgcatctaggttggcagtatagcgttggcttcatcaatgaggaaatgatcgccgcccacctgcttccggccaaggacgataccattgtgttgctttgcggcccaccaccaatgattaactttgcctgcaatccggcgctggacaagcttggctaccatccggacacccgttttgcctactaatatgatggacattatgggacgaaattgcattttcgttgtgttatattcctctttttttatctgttgtctcttaccagctcatcaaaatccaagagttcgccaagatttcggcaatgtgattgaaaaccaagcgaataaaaacattaattagtttaaagtttaaagcattttatgtttagtgttattgtggacataaaacatagataacattgataacatagccaaacatcgttattgctaagcattgatgtcgctaaacattgatattgctaaacattaatgttgctaaacattaatgttgctaaacattaatgttgccaaacaagcgatgtggccgcttagaaaaggaacaacttttccaggaagaaaaggtcaagttgacgcaggaggagtgggatttaggttattttattaaccaataaaaaatgctgttcgtttgtaattaatttatttcataagtattgttgttaattaatatgtgattcatttatgaactgaatgttctgactcctattgatttttacttcgtttttaatggccattcagtcaaacaaaaacgttcagttcgcttgaaattttattaaaatgtactaacaaattctatgctaactacttttaacaaaaattatcttttgcaactgcagtaaataataatttaaagtttatttaaaaaacttcagggttcgttgcgacaaatgatggaaatgcgacgtgtcctgggcaccagcgcaccctgaaactgggagtgctccttagctagtatctcgtgtgtgaatttgtagcgagccgtgtggctcattatgtacaaggagcggcgcggcaacaggatgtcagcgtagaagttgttctttagagacgcctccggttgatggcgataggctgcatcgggttctgacccctgggaattcggatccgttgcagttcccgacgattgctgttggtaccgctgctcatccgtgcgcacaagtcgcatcacactgtcgctaagtaggctgattccagagatggtgttgccgcagtactattaggatgaacgaaattaatgataagcctttctggtgatatcattgcaatgctggacatactctcgtgctatccacatggggcttgataacgccatcgggtgcaagatctaggatgtggacatagggcat

SEQ ID NO: 28811 - DNA, 1373 bp, DROSOPHILA
gaactgcggctttgtttgtagccgagaatattggtgatatcatagtgtgttcaagagaggcaaagagaaactctcttgcgctctctccttaaaacggagagtgcgtggaaatgaaaacattgctttcaccatctcgccgattagtctgcatatcagtgtttagtcggcttttcgctttcgttagataaaaattaagtgcgtggtgtcgttgcaattcgcggattatataagggatttgagccgcgactgcattgattttccattggccatggcccgcatcgttgaaagcaattttgtgccactcgccgtgggtgtggtagccgtactcgccggcgccctgatcgtccactatctgctgaataagaagtccacgaaaccacgccgggaacccaatcgcaccgctcggctgcgcacacttgtggatcccaatgacaagtacctgctgcctctcatcgaaaaggagaatctgagccatgacactaggagattccggtttggattgccctccaagcagcatgtccttggcctgcccgttggccagcacattcatctgatcgccaccatcgacaatgagctaataattcggccatacactccgatatcgtctgatgaggatgtgggctacgtggacctagtcgtcaaggtgtacttcaaggattcgcatcccaagttcccggccggcggcaaaatgacacaacacctggagcagctcgagttgggggacaagatctcgttccgtggtccctcgggtaggctacaatatctcggcaatggcaccttctccatcaaaaagttgcgcaaggatcctccaaagcacgtgaccgccaagcgggtcaacatgattgccggcggcactggcattactccaatgcttcaattggccagggaagttctcaagcgcagcgataaggataagactgaactggcgttgctgttcgccaatcagagcgaaaaggacattctactgcgtgcagagttggacgaactggcccagaagcatcctgaccagttcaagatctggtacacagtcgacaaggcaaacgaaggttggcagtatagcgttggcttcatcaatgaggaaatgatcgccgcccacctgcttccggccaaggacgataccattgtgttgctttgcggcccaccaccaatgattaactttgcctgcaatccggcgctggacaagcttggctaccatccggacacccgttttgcctactaatatgatggacattatgggacgaaattgcattttcgttgtgttatattcctctttttttatctgttgtctcttaccagctcatcaaaatccaagagttcgccaagatttcggcaatgtgattgaaaaccaagcgaataaaaacattaattagttt

SEQ ID NO: 28812 - protein, 316 aa, DROSOPHILA
MARIVESNFVPLAVGVVAVLAGALIVHYLLNKKSTKPRREPNRTARLRTLVDPNDKYLLPLIEKENLSHDTRRFRFGLPSKQHVLGLPVGQHIHLIATIDNELIIRPYTPISSDEDVGYVDLVVKVYFKDSHPKFPAGGKMTQHLEQLELGDKISFRGPSGRLQYLGNGTFSIKKLRKDPPKHVTAKRVNMIAGGTGITPMLQLAREVLKRSDKDKTELALLFANQSEKDILLRAELDELAQKHPDQFKIWYTVDKANEGWQYSVGFINEEMIAAHLLPAKDDTIVLLCGPPPMINFACNPALDKLGYHPDTRFAY

SEQ ID NO: 28813 - DNA, 3917 bp, DROSOPHILA
caaccatagcgaatttaaattgaacacaaaagcgcgccaaatttatcgataaaaagggtaaatggaataaattataccaaggcatacaaaaaataccgaagagaacataatacaacgttatgcaacactaccatcaaaattttaaaaaaggtcagttacgttcgcaaattttaaagtagaactggaaaaaacagacacgaagaccccttttttctggattaagttcgccttgcagttgagagcttcaaataactttattggccattcgctacggcaaatggattgcctgtcacttcaccaggtgaaccaacttcaacttcttaaccaacttcatcgtgtgtatgtacaaaataattactaaaatacaattctcgtgcggcccgagacgtcctgactaggctgaggagctttgatttgcttgatttgaggaaggaaccttcactacaactagcactggttgctactacgataactggcagcattgcgcctttctagccatgttctggctatcccactgtgtctgcaaatatatagatcgagatgagagatggtgagtggtgcggcaggactactggattagcaggtggaatatgtgtgcttataaagaatctgagagggtgtgcatttgagggcccgagggagtcgtttaatctgaacaaccggttcgtatattgccattggtttaacaagtgaagaatgcgaatttcaattggtagccagtggggccgcggctctacagatgattgtttgcctgttgctgtgcgaaataaaatgaaataagaaacgagaaatcaaatcaaaatggaatcgagagaattggcggttttaatgttagctacaacgaacaaacaaatgttaagtgcgatttatttagtcacttaaagtatctgaaatgacgcccgtttgccagctaaatagcaacgcagaatcgctggcaatcgggttttggttgaaagagttgtaatccaattcagattgtggctataggttttatagttgttctttgattatataactttattaatttcaatttaaatacgaacaagtcccaaataagtaaaccgaaataattagcagcgaagaaatatcaaagtcagttgcttctatactctgaaacgtctcgcgctggagaatttccctcgcaaattgcttgtattttggcatttaattaggtatagctaccgtgtgtgtataataattgattgcttttcgaattgatttttcagtgataatttccataattgggctacgagagagcctactcgtataactctcagtgtgactctcttactgcgctccatattgcgtgaatagttggaatgcaacgggctgggtcgggggctttcgtacgttctaagagtgctatggttcagtggaagttagtttacccatttactgatgatgtcctgtaatcgagaagagcagagtgaacgtttcgtcagccatgggaattccaaatgacgctccgtgcgacccactcaccttgacgtcatccatttcgtcgtcggacgacgagtgcgatagtccactgtacgtcttgaacgtcacattcttcatgaacgacttgagcaggctggcgctcagctggccgaatttgtacggcaccacgggatcgtagtcgccatgcgcctggaaaatcggcacatcatcgctgttcaccttggcgcctgggaactgcttgtgcagcggcagccaacaggatagggccaccacgccggccagcggctgatcgtacgtgagtgccgagtacagtgccaaggctccgccctgcgagaatccgcccaggacaatgcgattggccggaatcccagcgctaatctccttctggatcataccgtgcacactatcacgcgccgactggatgcccggctcgtcctcgggcccaccgatgtccagcgtcttcaggtcaaaccacgacggcatgcggaagccggcgttcagcgaaacgggctgtgtgggcgccgtggggcagatgactttcatgaaaggtgggcggatggcggctagggcactgctccagccatgactgttggaaaaggcattcattaacgagataagaaggattttgcataactctttcactcaaaaaaacttctatttacttaggtaagttttgtttgcagttttctaataatttaaaaggaagaacgaatttaaaatggtatgggatatacataatgagcttaactggggaatactctgaaggcttctcatcagttacttgaatctagaacaccctaagcgcttataaattgtttttttttcccataggaactgaagcgttaaaatccttttaatttcatatgtgcaaatatttctgtttcgcatacttcaatattttgtgaatgaagtctttgggagcattattttgaatgaggatgaccccacttaccccgtatcacccaggccgtgcatgaagatcagctgcaatacacaagtgattagtcgagggcttccggaatttggactacggcggactactcaccgtggcggtttgcttgaccgtggcctcgacaatgaccggcgcagccatgtctgctgttcagtttagcctctactggggacgcactattcctattccaggtactctgcgattcggcgacttggcgctgctttcgtcgcttttttcggtgtcagcggatttctgcaatgcagtgaaaaagaaacactttgtagtttgcgttttagttatgtcacgttgtaaacgcaaagcaaaattagtaatattgattttacgattgcgaaaatgacaacacgtcgccggctgagaaatggttactagctaactagatctaatcttcgccacttgtcttatgtacactttgcgcgaatgaggctctaatcatttaccaggtaataccacaagtattgtgttaatttgtttaaattcgctcaactacgacaattcatgcagctgcgttccaaaaagttcagagatgagtgatagtcggtggacctagagatgtgaccgaaaccgattccgctgtcgatacatcggttcgagcacaaaaatcgatatatatcaattccaaagttcgattaagtttaaaaagtggtattagtttaaaaccgttgaaaaataaacatatttataaccaaaaattatattattagttcataagttgatttgaaacatataggtttcgaaaaaccaaacaaaattataaccaaatagaattgaaggtactttaaattcaaagtcttcaggtcttatactcatcgttggtgccctccattcacatgccccatccagtaaactaatacactgattaaattggattcttttactcttaaaaattcacaataattacaaaatgcactaaagggacactgaggggaatggattttgcttcgacacgaccagtttgttgtgagcatgtgagatgtaccccttaatctttccatcgtaaatgagattggccacgatgcagtgcgtctcgtccagagaaacatcggttaagccaacgaaatgcaaggcggagaggaagtcacccatgtccaactgatgcgatttccggatgacgaacaccttcttgaacaggttgcgatacacgaggaacttgagcttctccaccagcagatagataccactcctgatcagcaccagctcctggtccctgacaatctcatcaaagcgattcacattgccagccttcatggccatagccagatcgagaaacagcaggagatcgtagcgctgcagtaaggatttgctgggcagatatcccagcagcatcttcactggcaccaaatagatgaggatgagcctcttgttgctggcaaaccgatccgggcagttgctaaaggcatacgacagatactgtacggctgcctggtagttggagtcgaacatagcccgtctacctacaaaatacttgtaggtaatttgctccggcagcggaaaagaatccttgaag

SEQ ID NO: 28814 - DNA, 1208 bp, DROSOPHILA
cagctgcatgaattgtcgtagttgagcgaatttaaacaaattaacacaatacttgtggtattacctgaaatccgctgacaccgaaaaaagcgacgaaagcagcgccaagtcgccgaatcgcagagtacctggaataggaatagtgcgtccccagtagaggctaaactgaacagcagacatggctgcgccggtcattgtcgaggccacggtcaagcaaaccgccacgctgatcttcatgcacggcctgggtgatacgggtcatggctggagcagtgccctagccgccatccgcccacctttcatgaaagtcatctgccccacggcgcccacacagcccgtttcgctgaacgccggcttccgcatgccgtcgtggtttgacctgaagacgctggacatcggtgggcccgaggacgagccgggcatccagtcggcgcgtgatagtgtgcacggtatgatccagaaggagattagcgctgggattccggccaatcgcattgtcctgggcggattctcgcagggcggagccttggcactgtactcggcactcacgtacgatcagccgctggccggcgtggtggccctatcctgttggctgccgctgcacaagcagttcccaggcgccaaggtgaacagcgatgatgtgccgattttccaggcgcatggcgactacgatcccgtggtgccgtacaaattcggccagctgagcgccagcctgctcaagtcgttcatgaagaatgtgacgttcaagacgtacagtggactatcgcactcgtcgtccgacgacgaaatggatgacgtcaaggacatcatcagtaaatgggtaaactaacttccactgaaccatagcactcttagaacgtacgaaagcccccgacccagcccgttgcattccaactattcacgcaatatggagcgcagtaagagagtcacactgagagttatacgagtaggctctctcgtagcccaattatggaaattatcactgaaaaatcaattcgaaaagcaatcaattattatacacacacggtagctatacctaattaaatgccaaaatacaagcaatttgcgagggaaattctccagcgcgagacgtttcagagtatagaagcaactgactttgatatttcttcgctgctaattatttcggtttacttatttgggacttgttcgtatttaaattgaaattaataaagttatataatcaaaga

SEQ ID NO: 28815 - protein, 216 aa, DROSOPHILA
MAAPVIVEATVKQTATLIFMHGLGDTGHGWSSALAAIRPPFMKVICPTAPTQPVSLNAGFRMPSWFDLKTLDIGGPEDEPGIQSARDSVHGMIQKEISAGIPANRIVLGGFSQGGALALYSALTYDQPLAGVVALSCWLPLHKQFPGAKVNSDDVPIFQAHGDYDPVVPYKFGQLSASLLKSFMKNVTFKTYSGLSHSSSDDEMDDVKDIISKWVN

SEQ ID NO: 28816 - DNA, 10734 bp, DROSOPHILA
gttacggtgcttttttgctcgtttcttttgtgcactccttctatgcggtgccaaatatgaggaggtacctgaagcttggttgattttgtgagtgtctttttccacagcatatttttgtgtattggctactttaaaaattctattatatcgttgtgctcgtaatgttgtccattccttttaaatattttcgaattaaatataccatagatgtttccctattaccataatagtttaataaatatacgtatatgaaattttttttatcctatgttagtataaacatgttattcaacaaataaaagtaggtcagaggtaatcgccatccagctccagaaagaggggggagctgataagattgcgtttatgtacctaatgggttgggtaagtggcttggtttcacaaacacccttatttcaggtacaaaataagtatgtcatagacggcgtaaaattgataagattttaaagtcaaaagaaaatgagtttattcgcctgtaactgcgttagaaatccaaatacacccgcaatattatatgtatagaaagaaaaagtttgatgcaacaacaaatttaaagttgtttggtattttgtaatggaaagtttgtgtcactaaatatggttttacttgaacgcagattggacatggtcacactgcccacaaaatcacgacattgcgttataaatgaagcacatctagttttgtgttgaaaatgtggttcacaatttatatagcaggttatggtaaaacatcgatcgttccgaaaaattccgctcgttggcacatttcctaaatttttcgtgcgacagcggtgattaattacaaaaattattattataattatataaaagttggcgaccatatcaaaaaggttgctataaaaacaaatgacaatttatagcggagtttcactcccaaagcgatgttctccacccattccagtcagtcatggaaaatataccttctaaaaaatatatgattttttcgatagagatacacgggcacactagacccaccgatcgcgactttgtgtgtgttaaaatgacgcgcatatcgttttgggctaataatattgttcacgttttataaaacagatacacggttaagctctgaccggtcgtattattatctgtgtgttcttggttgacacgtttatttcatttattctcatttaaagcaacgatgtgaagaacagtgcgggcgtttctcaacataagaatacatacaaacttatgcgtgatggtgagcaaataaaatagttcaaaaaattactcggccaccgccttaaccgtacaaacggaaatacataaaggtaaagggctcaacaacagtattactgattaggcaattgatttatatttcaaacttcttaaataaagtgtccacaaatatgtatgttcttagcatagaggcgtagtcggtgagtcagccacgccaacagttaacagtcgtcattttgctgtctgtctaacacgcaatttgtgtgtgtatatgtgaataaacagataccggtatgcaatcgcaaagctggtcaactgtaaagatcggtatgtactcaaaattaggtcatcaccttgttatgcagatacatttgggaaacagttgacttacttggtattggttatcagccgaaaagcaaatggtgatacggttttgcacctcagcttactcacggatacatacctacgtacataaatgtatgtatacggtatacagtcttagaaaaaatattagtaccgaccagctagcgtttgcctaaaacgcttttacaaaaataaacgtatatgttttaagttgttttttgtcataattaatacatttattattatttatttatgaatttcagagctttaatagtaactaaattgtttaaacaaacttaaaaaaagatttccaaataaaaaaatatttcgtgtgcgtgacggaattgctagttcattaaagggaggtacatatgtacatacatacacattgcaaagagtacagatcgctcatcttgcatctcatttttcctaatgtacatatacatatgtacaaacatgtttattaaactgcctacatgcaaatctttgaagttttaagaaaataagcacaactagtttggaaaatcttgggagccaagatctatctgtccactgaatttcctatgaccaagaatgtaaaaccctttttgttaaacaaattttgattaaagtataccagaataatattaaacgtatcgtccgtatctataaaaggtattaatagtattacctaaatttaatttctcggttttattcataagagtgaaaaaatatacaagttcctttttaattttttacttattgaaaatgtgattaatttttatttattattttcagtttagaataaatacggccacaattagtatacatatttattcatcgaaaccaacccaccacaagagcataaccaattatgttaaagtttatcagaggaaaagggcagcagcccagtgctgacagacaccgcctacagaaggacctttttgcttatcgtaaggtacaacaaacaattttctctttccattctattttattttttttttttcgtatatgtagccgattggtatattttgtggggtgtcatttattttgatcctgggtggtaaatacatttttatggaagttagaagaaagcttataatttattaagaataaataaatacctccttttcaatcttttgttatgtcttctcctatgtgcatacttttgggcattaacatttaggtaaattttttccaccgcaactacaagtaaaccgcatacacacacagtattttgtagactcgcgccacaaagcaccgcataaaaaaggttacggtgcttttttgctcgtttcttttgtgcactccttctatgcggtgccaaatatgaggaggtacctgaagctttgttgattttgtgagtgtctttttccaccgcctgtttttggctactttaaaaattctattatatcgttgtgctcgtaatgttgtccattccttttaaatattttcgaattaaatataccatagatgtttccctattaccataatagtttaataaatatacgtatatgaaattttataagaattttttttatcccatgttagtataaacatgttattaaacaaataaaagtaggtcagaggtaatcgccatccagctccagaaagaggggggagctgataagattgcttttatgtgcttaatgggttgggtaaatggcttggtttcacaaacacccttatttcaggcacaaaataagtatgtcatagacggcgtaaaattgataagattttaaagtcaaaagaaaaagaatttattcgcctgtaactgcgttagaaatccaaatacacctgcaatatgaatcaaacaaaatcaactcataacgagatctgatagcaacttcttaaaactttttttgtataaaaatacaatttatacaattagataagatttaccaaaccttttttcgatcaatgtaaatatagtatgatagtagggactgctgtctacagtgatgtttataagagacatacttaagagcagcatttaaagctttgggcgctttttgaacttaatttaaattcaaacctcaatatttattgaggtttttattcccgttaattgtaaagaaaaatgctgtattagattcggtaaaagtatgtaaatggtttaagaaagcgttcccgactctataaagtggcaagtaatctgacgatttaccagatcttgggaactgaaaaaactagaatgttttggaaaacccttttacaattaagaaatgaaccaaacaattttgaattattaagaatctgtaattgctttttgaaactttttaatatttttttcttttagacggcacagcatggctttcctcataagccttcggctcttgcgtatgatccagttttgaaacttatggcaatagggacgcaaacaggggctttaaaagttttcggtcaacccggagttgaattgtacggtcagcatactttgttaaacaattcagcatcggagcttaatgtacaattacttgaatgggtgtatggaactggtcgcatactttcgttgacggcagcgaatcaattaattctatgggagccagttggagcaacgttgctgccaatcaaaacactaccgtttgacggcaaacttaaaaaagtttcatcgctgtgctgttctctcagtaaggatctgctatggattggaacagaaggtggaaacatctatcaactggatttacatacatttaccattaaggagcctgtaatttaccatgacgttgtgctagagcaggtgccaccagcctacaagctaaatcctggtgcaattgagtcaatccgccaacttccaaactcccctagcaaacttctagttgcatacaatcgcggcctttgtgttttgtgggattttgaaagcgcatctgtccagcgagcatacatagcccctggacatggacagagcgttggtcttacagtgaacttcgaaggatctgaatttacctggtaccacgctgatggttcatacgccacttggagcatagataacccagaaccgccgtcgaatgttaattatgtgccttatggacctgatccatgcaaaagcataaatcgactgtacaaaggcaagcgaaggttaatataacttaaacacaaagttttttagatgtgtactaatttctcgttcttttagatccaacgatgtaattgttttttccggcggcatgccacggtcagcatatggtgatcacaattgtgtgtccgttcacgccagcgatggacacaaagtgtgtcttgactttacgtctaaagtgattgacttttttgtgacctttgaaaataatagagatgtcgctgaagttcttgttgtactacttgaagaggaactctgcgcttacgatcttactgaccctaatatttgtgctatcaaagcgccatatcttcactctgtccatgcatcagctgtcacttgcaattaccttgcttctgaagtcgtacagtcggtatatgaaagtattttaagagctggagatgaacaagacattgactatagcaatattagctggcctatcactggcggtactctcccggataacttagaagaatctgtagaagaggacgcgactaagctttatgagattttgttaactggtcacgaagatggttctgttaaattttgggactgcactggagtgttgcttaaaccaatttataattttaaaactagcagcatttttggaagtgagtcagacttccgagatgacgcagctgcagatatgagtgcggaacaagtcgatgaaggagaaccgccatttcggaaatcaggactttttgatccttattcagatgaccctcgtttagcagtgaagaaaatagcattctgcccaaaaaccggacaacttattgttggtggcacagcgggccaaatagttatagccgacttcatagacttacccgaaaaagtgtctttaaaatacatttcaatgaatttggtcagcgatcgtgatggatttgtgtggaagggtcacgatcagttaaacgtgcgatcgaacttattagacggagaagcaattcctacgacggaacgtggtgtaaatatatcgggagtactgcaagttttgccgccagccagcataacatgcatggcactcgaagcaagctggggcctagtatctggtgggactgcgcacggcttagttctctttgacttcaaaaactttgttccagtatttcatcgctgcactttaaacccaaatgatcttactggagcaggagagcagctgtctcgtcgaaagtcttttaagaaatcattgagggagtcatttagaaagcttcgcaagggtcgatcgaccaggaccaaccagagcaatcaagtaccaacaacggttagtaagataatatatactcaactagtcttttatattaaattcacaatcctacagctggaagcaagacccgtcgagaggcaaatagaggctcgttgtgcagatgacgggctaggatccatggtgcgatgtttactatttgccaaaacttatgttactaatggtaatcaacattttgtactgttattagttttgatgtaacgataaaaaaaaaaaaaggtaacggaaatagtctctgaaccacggcctcgcgagaattgaacccaaaagctaaaaacatacagtgcttttcattttgggacgcccagagctttaattatatttttgtgcaacaaatttttatgcattggatatattgatcaaagttttaaaggtatatgtatttatgatcagtttaaacagccgactacatttgactatgtccgtccttagaaagaaattcagtcattacaatattccttgctagtctatcgatatgctataagtgttaaaagtgcttttgcatttactctggtttgacaatatattttattgatattgatttcgtttcatttactagttggaaaacagttcttaaactaattaaatcatagtctttttgttttcgcgatttcgatctatatggcaaattttgtttttaaaatttcacctatcctcctactatttctgtaatgggtaactcgactgtagcgtctattcttttggtgttctgtatatgtacatctaatttgttgtataatttttacattttcagtcaacataacgtcgccaactttgtggtcagcaacaaatgccagtacagtctcggttttccttctgcatttgccaccagcgcagaccgcggcaactgccgtcccgtcggcaagtggcaatgcaccaccacacatgccccgccgaatttctgcgcagcttgctaaagaaatacaattaaaacatcgtgctcctgtggtgggtatttctatttttgatcaggcgggtagccctgtcgatcagctgaacgccggtgaaaacgggagtccaccgcatcgtgtacttattgcttccgaggaacagttcaaggtgttttcacttccgcaactaaagccgattaacaaatataagcttaccgctaacgaaggtgctcggattcgccgcatccattttggttcgtttagttgtcgcatatccccggaaacactgcagagtatgcacggttgtagcccaactaagtccacgcgttcacatggcgatggagaggcggatcctaatatcagtggaagcttggctgtaagtcgtggagatgtatataacgaaacagcattgatatgtttaacgaatatgggcgatatcatggttttatcagtacctgaattaaaaagacagctgaatgccgcagcagtgcgacgggaagacattaagtaagtcacgcatagtgctattattttaattttttggacctaatactgtattttaacttttcagtggagtttcgtcactttgctttacaaactctggagaagcactgtatatgatgtcttcttctgaactgcagcgtattgctttagccacgtccagagtcgtgcaacccactggcgttgttccagtagaaccattagaaaatgaagagtctgtgttggaagaaaatgatgcagagaataataaggaaacctacgcatgtgatgaagttgtgaatacatatgaaattaaaaatccatcaggcatttcaatatgcacaaggcctgcagaggaaaacgttggaagaaatagtgttcagcaagttaatggagtcaacatttcaaattcacctaatcaagctaacgagactatcagcagctctattggcgatattaccgttgactcggtgcgcgaccatttaaatatgacgaccaccactttgtgttctattaatacagaggaaaccattggtgagtaatcatttatttactaacattattccacctattttaatttgctgttttgtacgtatctacatttaaatgttttcgtttcgacattagttactttcggcaacataattcttataaaaatttactttttaaaaacttgattttaagtatacgcaccaaacaactttaaatatatacttttatcttattttaaaagcacgggcccacattatatctgtacataactttttttttctgtcatctctatgaaaatgtaggtcgcctatctgtacttagcacgcaaaccaacaaagccagtactaccgtaaacatgagtgaaattccaaatattaatatttctaatttagaggacttggaatcgaaaaggtgtgcttctacaagaaacattgacataagctttaacctactaattttttttttttacctaacagaaatacgacggaaacgagtactagttctgttgtaattaaatctataattacaaacatttctcatgaaaaaacgaacggagacaacaaaataggaacgccaaaaacagcgcctgaagaaagccaattttaacattgacagaagccgtaacctactaattattttatacctttacagaaatacgacgcaaacgagtactagtcctgatgtaatttaatctataattacaaacatgtctcactaaaaatcgaacggggacagcaaaataggaacgcaaaaaaattaaattaaattaaacgcgatttacatacaaacagaaatgacagaatgataatataaaatattcattttttatttggcttaagcgatgttgttgttccaaaaccatataattatttatgattttatgtaatgttttcatgtattttcgcgtagtgactttataccctttacccgtatgatgaaacgaaacatgatatttgtagaaaggtacaaaggataaaagttgacatttaaggccgattgtaaaatattaaaacgcaacctggataacatgccgattaattacttctgttcgtccgtataaacacaaataccgataaattggtccgtccccatttaataaattgtatattaaaatggtctttattttggataaataattcaaattatataggaacatttgggttttaagggatagaaacagcgctggtgtctttcatttccgttcgtatgaccgttcaaagattataaaaaaattgtcgtgcccacattttttaaatttcttttattttcggttaaaatattgtgatacaaaaaaatgcccttacaaaattaggacaacaacaatttgctttattatgatgaacaaattaggagtacaaaaaatagcctgatgcaaggatggggagaaaaaagaccttgaagttcaaaagaatttgttgtatcaaatcctcaataagaaaactacttaaaattaaaagcgtgtttcaaattaattgtagaatatttcgtaaaatgaaattgcaaacttttttagcacgaaattacatgtatttaattctttggctaatacgtcagttaaaaaaggctacattttgatgatactcacaaatgtaatttttgcattctacacaggtgcaattaaaaaattatggtttttatgagttttagagggaagaaaatatgtcaatatgagaagtaagttaatgagccttcaagtactttagtacataatgtaatttaattttagaaatcctacggctttatattcaattgtaaagtattttaaaattcctgacgatttgtagtaattgttttgttcttagcttttttgcattctcctccgttactccgttactcgtatagtaaaaggtatagtatatacaatagtattgtagattcgttgagaagtatgttacaggcagaaggaagcttttccgaccatataaagtatataattgagtatttagcttaggattattaataaaacatgtattttatttaacaaactggctttacaatattttgtggaagaacaccgatctatttagttgtaggtctcaaactgaaaactcctaattttgacttatttaaagatcatacctcggttttgagccttagaggtttgtatgagtgattttctagaatgatctttgtacttcgttacaataaattgttttcttctactctaatatagttggaatcgagtaatccctagataagagttaggcttaaaatagtaaattacaaatattgaattggacattacaattgcatattctcagcttgctgtattgtaaaaattaattattaactcgaagagattcggcaattaatacgtccctattcgcattgtttttacttggggaaattttattgaaaaactagattctctgttacaatcagatatgagaacaagttattgcaccagcacatctctcggccagctcaattcaattaaatagctaagcacttgttgcgaattcatgcttggagtgtttacgtaagatttgtaaaaataactaaactggattctccacattcttgcgtagctgtgtgattctactgtcacaactctccgtcgacgatttctagagccatcttcttgcggaagtacaacatttccgactgggtaaaggtaattggcacatcacacgttatatactcggcgaacatgcagctgaagataccgcaatcgctgccatctaactgtcgtggtatattctgcacgctctcaataacaaaatcgctggtatcaaactgctttttgggcttgaatattgactcttcgcgtagatatttctctagagcgtccagcactggtcggtttggctttccctttgagtcataataccggattgtcttgttccgcaagtgtatgatggccatgcaccagtggacgccgttgcagtgcactggtaccgggattatgtccttgctgaacaagtccactttgcgagtccagcgcttaatgcctgcatgcccagcttgcaggaggcggggcacgaa

SEQ ID NO: 28817 - DNA, 5250 bp, DROSOPHILA
acactagacccaccgatcgcgactttgtgtgtgttaaaatgacgcgcatatcgttttgggctaataatattgttcacgttttataaaacagatacacggttaagctctgaccggtcgtattattatctgtgtgttcttggttgacacgtttatttcatttattctcatttaaagcaacgatgtgaagaacagtgcgggcgtttctcaacataagaatacatacaaacttatgcgtgatggtgagcaaataaaatagttcaaaaaattactcggccaccgccttaaccgtacaaacggaaatacataaagtttagaataaatacggccacaattagtatacatatttattcatcgaaaccaacccaccacaagagcataaccaattatgttaaagtttatcagaggaaaagggcagcagcccagtgctgacagacaccgcctacagaaggacctttttgcttatcgtaagacggcacagcatggctttcctcataagccttcggctcttgcgtatgatccagttttgaaacttatggcaatagggacgcaaacaggggctttaaaagttttcggtcaacccggagttgaattgtacggtcagcatactttgttaaacaattcagcatcggagcttaatgtacaattacttgaatgggtgtatggaactggtcgcatactttcgttgacggcagcgaatcaattaattctatgggagccagttggagcaacgttgctgccaatcaaaacactaccgtttgacggcaaacttaaaaaagtttcatcgctgtgctgttctctcagtaaggatctgctatggattggaacagaaggtggaaacatctatcaactggatttacatacatttaccattaaggagcctgtaatttaccatgacgttgtgctagagcaggtgccaccagcctacaagctaaatcctggtgcaattgagtcaatccgccaacttccaaactcccctagcaaacttctagttgcatacaatcgcggcctttgtgttttgtgggattttgaaagcgcatctgtccagcgagcatacatagcccctggacatggacagagcgttggtcttacagtgaacttcgaaggatctgaatttacctggtaccacgctgatggttcatacgccacttggagcatagataacccagaaccgccgtcgaatgttaattatgtgccttatggacctgatccatgcaaaagcataaatcgactgtacaaaggcaagcgaagatccaacgatgtaattgttttttccggcggcatgccacggtcagcatatggtgatcacaattgtgtgtccgttcacgccagcgatggacacaaagtgtgtcttgactttacgtctaaagtgattgacttttttgtgacctttgaaaataatagagatgtcgctgaagttcttgttgtactacttgaagaggaactctgcgcttacgatcttactgaccctaatatttgtgctatcaaagcgccatatcttcactctgtccatgcatcagctgtcacttgcaattaccttgcttctgaagtcgtacagtcggtatatgaaagtattttaagagctggagatgaacaagacattgactatagcaatattagctggcctatcactggcggtactctcccggataacttagaagaatctgtagaagaggacgcgactaagctttatgagattttgttaactggtcacgaagatggttctgttaaattttgggactgcactggagtgttgcttaaaccaatttataattttaaaactagcagcatttttggaagtgagtcagacttccgagatgacgcagctgcagatatgagtgcggaacaagtcgatgaaggagaaccgccatttcggaaatcaggactttttgatccttattcagatgaccctcgtttagcagtgaagaaaatagcattctgcccaaaaaccggacaacttattgttggtggcacagcgggccaaatagttatagccgacttcatagacttacccgaaaaagtgtctttaaaatacatttcaatgaatttggtcagcgatcgtgatggatttgtgtggaagggtcacgatcagttaaacgtgcgatcgaacttattagacggagaagcaattcctacgacggaacgtggtgtaaatatatcgggagtactgcaagttttgccgccagccagcataacatgcatggcactcgaagcaagctggggcctagtatctggtgggactgcgcacggcttagttctctttgacttcaaaaactttgttccagtatttcatcgctgcactttaaacccaaatgatcttactggagcaggagagcagctgtctcgtcgaaagtcttttaagaaatcattgagggagtcatttagaaagcttcgcaagggtcgatcgaccaggaccaaccagagcaatcaagtaccaacaacgctggaagcaagacccgtcgagaggcaaatagaggctcgttgtgcagatgacgggctaggatccatggtgcgatgtttactatttgccaaaacttatgttactaatgtcaacataacgtcgccaactttgtggtcagcaacaaatgccagtacagtctcggttttccttctgcatttgccaccagcgcagaccgcggcaactgccgtcccgtcggcaagtggcaatgcaccaccacacatgccccgccgaatttctgcgcagcttgctaaagaaatacaattaaaacatcgtgctcctgtggtgggtatttctatttttgatcaggcgggtagccctgtcgatcagctgaacgccggtgaaaacgggagtccaccgcatcgtgtacttattgcttccgaggaacagttcaaggtgttttcacttccgcaactaaagccgattaacaaatataagcttaccgctaacgaaggtgctcggattcgccgcatccattttggttcgtttagttgtcgcatatccccggaaacactgcagagtatgcacggttgtagcccaactaagtccacgcgttcacatggcgatggagaggcggatcctaatatcagtggaagcttggctgtaagtcgtggagatgtatataacgaaacagcattgatatgtttaacgaatatgggcgatatcatggttttatcagtacctgaattaaaaagacagctgaatgccgcagcagtgcgacgggaagacattaatggagtttcgtcactttgctttacaaactctggagaagcactgtatatgatgtcttcttctgaactgcagcgtattgctttagccacgtccagagtcgtgcaacccactggcgttgttccagtagaaccattagaaaatgaagagtctgtgttggaagaaaatgatgcagagaataataaggaaacctacgcatgtgatgaagttgtgaatacatatgaaattaaaaatccatcaggcatttcaatatgcacaaggcctgcagaggaaaacgttggaagaaatagtgttcagcaagttaatggagtcaacatttcaaattcacctaatcaagctaacgagactatcagcagctctattggcgatattaccgttgactcggtgcgcgaccatttaaatatgacgaccaccactttgtgttctattaatacagaggaaaccattggtcgcctatctgtacttagcacgcaaaccaacaaagccagtactaccgtaaacatgagtgaaattccaaatattaatatttctaatttagaggacttggaatcgaaaagaaatacgacggaaacgagtactagttctgttgtaattaaatctataattacaaacatttctcatgaaaaaacgaacggagacaacaaaataggaacgccaaaaacagcgcctgaagaaagccaattttaacattgacagaagccgtaacctactaattattttatacctttacagaaatacgacgcaaacgagtactagtcctgatgtaatttaatctataattacaaacatgtctcactaaaaatcgaacggggacagcaaaataggaacgcaaaaaaattaaattaaattaaacgcgatttacatacaaacagaaatgacagaatgataatataaaatattcattttttatttggcttaagcgatgttgttgttccaaaaccatataattatttatgattttatgtaatgttttcatgtattttcgcgtagtgactttataccctttacccgtatgatgaaacgaaacatgatatttgtagaaaggtacaaaggataaaagttgacatttaaggccgattgtaaaatattaaaacgcaacctggataacatgccgattaattacttctgttcgtccgtataaacacaaataccgataaattggtccgtccccatttaataaattgtatattaaaatggtctttattttggataaataattcaaattatataggaacatttgggttttaagggatagaaacagcgctggtgtctttcatttccgttcgtatgaccgttcaaagattataaaaaaattgtcgtgcccacattttttaaatttcttttattttcggttaaaatattgtgatacaaaaaaatgcccttacaaaattaggacaacaacaatttgctttattatgatgaacaaattaggagtacaaaaaatagcctgatgcaaggatggggagaaaaaagaccttgaagttcaaaagaatttgttgtatcaaatcctcaataagaaaactacttaaaattaaaagcgtgtttcaaattaattgtagaatatttcgtaaaatgaaattgcaaacttttttagcacgaaattacatgtatttaattctttggctaatacgtcagttaaaaaaggctacattttgatgatactcacaaatgtaatttttgcattctacacaggtgcaattaaaaaattatggtttttatgagttttagagggaagaaaatatgtcaatatgagaagtaagttaatgagccttcaagtactttagtacataatgtaatttaattttagaaatcctacggctttatattcaattgtaaagtattttaaaattcctgacgatttgtagtaattgttttgttcttagcttttttgcattctcctccgttactccgttactcgtatagtaaaaggtatagtatatacaatagtattgtagattcgttgagaagtatgttacaggcagaaggaagcttttccgaccatataaagtatataattgagtatttagcttaggattattaataaaacatgtattttatttaacaaa

SEQ ID NO: 28818 - protein, 1161 aa, DROSOPHILA; identical to SEQ ID NO: 4722

SEQ ID NO: 28819 - DNA, 10715 bp, DROSOPHILA
cgtttcttttgtgcactccttctatgcggtgccaaatatgaggaggtacctgaagcttggttgattttgtgagtgtctttttccacagcatatttttgtgtattggctactttaaaaattctattatatcgttgtgctcgtaatgttgtccattccttttaaatattttcgaattaaatataccatagatgtttccctattaccataatagtttaataaatatacgtatatgaaattttttttatcctatgttagtataaacatgttattcaacaaataaaagtaggtcagaggtaatcgccatccagctccagaaagaggggggagctgataagattgcgtttatgtacctaatgggttgggtaagtggcttggtttcacaaacacccttatttcaggtacaaaataagtatgtcatagacggcgtaaaattgataagattttaaagtcaaaagaaaatgagtttattcgcctgtaactgcgttagaaatccaaatacacccgcaatattatatgtatagaaagaaaaagtttgatgcaacaacaaatttaaagttgtttggtattttgtaatggaaagtttgtgtcactaaatatggttttacttgaacgcagattggacatggtcacactgcccacaaaatcacgacattgcgttataaatgaagcacatctagttttgtgttgaaaatgtggttcacaatttatatagcaggttatggtaaaacatcgatcgttccgaaaaattccgctcgttggcacatttcctaaatttttcgtgcgacagcggtgattaattacaaaaattattattataattatataaaagttggcgaccatatcaaaaaggttgctataaaaacaaatgacaatttatagcggagtttcactcccaaagcgatgttctccacccattccagtcagtcatggaaaatataccttctaaaaaatatatgattttttcgatagagatacacgggcacactagacccaccgatcgcgactttgtgtgtgttaaaatgacgcgcatatcgttttgggctaataatattgttcacgttttataaaacagatacacggttaagctctgaccggtcgtattattatctgtgtgttcttggttgacacgtttatttcatttattctcatttaaagcaacgatgtgaagaacagtgcgggcgtttctcaacataagaatacatacaaacttatgcgtgatggtgagcaaataaaatagttcaaaaaattactcggccaccgccttaaccgtacaaacggaaatacataaaggtaaagggctcaacaacagtattactgattaggcaattgatttatatttcaaacttcttaaataaagtgtccacaaatatgtatgttcttagcatagaggcgtagtcggtgagtcagccacgccaacagttaacagtcgtcattttgctgtctgtctaacacgcaatttgtgtgtgtatatgtgaataaacagataccggtatgcaatcgcaaagctggtcaactgtaaagatcggtatgtactcaaaattaggtcatcaccttgttatgcagatacatttgggaaacagttgacttacttggtattggttatcagccgaaaagcaaatggtgatacggttttgcacctcagcttactcacggatacatacctacgtacataaatgtatgtatacggtatacagtcttagaaaaaatattagtaccgaccagctagcgtttgcctaaaacgcttttacaaaaataaacgtatatgttttaagttgttttttgtcataattaatacatttattattatttatttatgaatttcagagctttaatagtaactaaattgtttaaacaaacttaaaaaaagatttccaaataaaaaaatatttcgtgtgcgtgacggaattgctagttcattaaagggaggtacatatgtacatacatacacattgcaaagagtacagatcgctcatcttgcatctcatttttcctaatgtacatatacatatgtacaaacatgtttattaaactgcctacatgcaaatctttgaagttttaagaaaataagcacaactagtttggaaaatcttgggagccaagatctatctgtccactgaatttcctatgaccaagaatgtaaaaccctttttgttaaacaaattttgattaaagtataccagaataatattaaacgtatcgtccgtatctataaaaggtattaatagtattacctaaatttaatttctcggttttattcataagagtgaaaaaatatacaagttcctttttaattttttacttattgaaaatgtgattaatttttatttattattttcagtttagaataaatacggccacaattagtatacatatttattcatcgaaaccaacccaccacaagagcataaccaattatgttaaagtttatcagaggaaaagggcagcagcccagtgctgacagacaccgcctacagaaggacctttttgcttatcgtaaggtacaacaaacaattttctctttccattctattttattttttttttttcgtatatgtagccgattggtatattttgtggggtgtcatttattttgatcctgggtggtaaatacatttttatggaagttagaagaaagcttataatttattaagaataaataaatacctccttttcaatcttttgttatgtcttctcctatgtgcatacttttgggcattaacatttaggtaaattttttccaccgcaactacaagtaaaccgcatacacacacagtattttgtagactcgcgccacaaagcaccgcataaaaaaggttacggtgcttttttgctcgtttcttttgtgcactccttctatgcggtgccaaatatgaggaggtacctgaagctttgttgattttgtgagtgtctttttccaccgcctgtttttggctactttaaaaattctattatatcgttgtgctcgtaatgttgtccattccttttaaatattttcgaattaaatataccatagatgtttccctattaccataatagtttaataaatatacgtatatgaaattttataagaattttttttatcccatgttagtataaacatgttattaaacaaataaaagtaggtcagaggtaatcgccatccagctccagaaagaggggggagctgataagattgcttttatgtgcttaatgggttgggtaaatggcttggtttcacaaacacccttatttcaggcacaaaataagtatgtcatagacggcgtaaaattgataagattttaaagtcaaaagaaaaagaatttattcgcctgtaactgcgttagaaatccaaatacacctgcaatatgaatcaaacaaaatcaactcataacgagatctgatagcaacttcttaaaactttttttgtataaaaatacaatttatacaattagataagatttaccaaaccttttttcgatcaatgtaaatatagtatgatagtagggactgctgtctacagtgatgtttataagagacatacttaagagcagcatttaaagctttgggcgctttttgaacttaatttaaattcaaacctcaatatttattgaggtttttattcccgttaattgtaaagaaaaatgctgtattagattcggtaaaagtatgtaaatggtttaagaaagcgttcccgactctataaagtggcaagtaatctgacgatttaccagatcttgggaactgaaaaaactagaatgttttggaaaacccttttacaattaagaaatgaaccaaacaattttgaattattaagaatctgtaattgctttttgaaactttttaatatttttttcttttagacggcacagcatggctttcctcataagccttcggctcttgcgtatgatccagttttgaaacttatggcaatagggacgcaaacaggggctttaaaagttttcggtcaacccggagttgaattgtacggtcagcatactttgttaaacaattcagcatcggagcttaatgtacaattacttgaatgggtgtatggaactggtcgcatactttcgttgacggcagcgaatcaattaattctatgggagccagttggagcaacgttgctgccaatcaaaacactaccgtttgacggcaaacttaaaaaagtttcatcgctgtgctgttctctcagtaaggatctgctatggattggaacagaaggtggaaacatctatcaactggatttacatacatttaccattaaggagcctgtaatttaccatgacgttgtgctagagcaggtgccaccagcctacaagctaaatcctggtgcaattgagtcaatccgccaacttccaaactcccctagcaaacttctagttgcatacaatcgcggcctttgtgttttgtgggattttgaaagcgcatctgtccagcgagcatacatagcccctggacatggacagagcgttggtcttacagtgaacttcgaaggatctgaatttacctggtaccacgctgatggttcatacgccacttggagcatagataacccagaaccgccgtcgaatgttaattatgtgccttatggacctgatccatgcaaaagcataaatcgactgtacaaaggcaagcgaaggttaatataacttaaacacaaagttttttagatgtgtactaatttctcgttcttttagatccaacgatgtaattgttttttccggcggcatgccacggtcagcatatggtgatcacaattgtgtgtccgttcacgccagcgatggacacaaagtgtgtcttgactttacgtctaaagtgattgacttttttgtgacctttgaaaataatagagatgtcgctgaagttcttgttgtactacttgaagaggaactctgcgcttacgatcttactgaccctaatatttgtgctatcaaagcgccatatcttcactctgtccatgcatcagctgtcacttgcaattaccttgcttctgaagtcgtacagtcggtatatgaaagtattttaagagctggagatgaacaagacattgactatagcaatattagctggcctatcactggcggtactctcccggataacttagaagaatctgtagaagaggacgcgactaagctttatgagattttgttaactggtcacgaagatggttctgttaaattttgggactgcactggagtgttgcttaaaccaatttataattttaaaactagcagcatttttggaagtgagtcagacttccgagatgacgcagctgcagatatgagtgcggaacaagtcgatgaaggagaaccgccatttcggaaatcaggactttttgatccttattcagatgaccctcgtttagcagtgaagaaaatagcattctgcccaaaaaccggacaacttattgttggtggcacagcgggccaaatagttatagccgacttcatagacttacccgaaaaagtgtctttaaaatacatttcaatgaatttggtcagcgatcgtgatggatttgtgtggaagggtcacgatcagttaaacgtgcgatcgaacttattagacggagaagcaattcctacgacggaacgtggtgtaaatatatcgggagtactgcaagttttgccgccagccagcataacatgcatggcactcgaagcaagctggggcctagtatctggtgggactgcgcacggcttagttctctttgacttcaaaaactttgttccagtatttcatcgctgcactttaaacccaaatgatcttactggagcaggagagcagctgtctcgtcgaaagtcttttaagaaatcattgagggagtcatttagaaagcttcgcaagggtcgatcgaccaggaccaaccagagcaatcaagtaccaacaacggttagtaagataatatatactcaactagtcttttatattaaattcacaatcctacagctggaagcaagacccgtcgagaggcaaatagaggctcgttgtgcagatgacgggctaggatccatggtgcgatgtttactatttgccaaaacttatgttactaatggtaatcaacattttgtactgttattagttttgatgtaacgataaaaaaaaaaaaaggtaacggaaatagtctctgaaccacggcctcgcgagaattgaacccaaaagctaaaaacatacagtgcttttcattttgggacgcccagagctttaattatatttttgtgcaacaaatttttatgcattggatatattgatcaaagttttaaaggtatatgtatttatgatcagtttaaacagccgactacatttgactatgtccgtccttagaaagaaattcagtcattacaatattccttgctagtctatcgatatgctataagtgttaaaagtgcttttgcatttactctggtttgacaatatattttattgatattgatttcgtttcatttactagttggaaaacagttcttaaactaattaaatcatagtctttttgttttcgcgatttcgatctatatggcaaattttgtttttaaaatttcacctatcctcctactatttctgtaatgggtaactcgactgtagcgtctattcttttggtgttctgtatatgtacatctaatttgttgtataatttttacattttcagtcaacataacgtcgccaactttgtggtcagcaacaaatgccagtacagtctcggttttccttctgcatttgccaccagcgcagaccgcggcaactgccgtcccgtcggcaagtggcaatgcaccaccacacatgccccgccgaatttctgcgcagcttgctaaagaaatacaattaaaacatcgtgctcctgtggtgggtatttctatttttgatcaggcgggtagccctgtcgatcagctgaacgccggtgaaaacgggagtccaccgcatcgtgtacttattgcttccgaggaacagttcaaggtgttttcacttccgcaactaaagccgattaacaaatataagcttaccgctaacgaaggtgctcggattcgccgcatccattttggttcgtttagttgtcgcatatccccggaaacactgcagagtatgcacggttgtagcccaactaagtccacgcgttcacatggcgatggagaggcggatcctaatatcagtggaagcttggctgtaagtcgtggagatgtatataacgaaacagcattgatatgtttaacgaatatgggcgatatcatggttttatcagtacctgaattaaaaagacagctgaatgccgcagcagtgcgacgggaagacattaagtaagtcacgcatagtgctattattttaattttttggacctaatactgtattttaacttttcagtggagtttcgtcactttgctttacaaactctggagaagcactgtatatgatgtcttcttctgaactgcagcgtattgctttagccacgtccagagtcgtgcaacccactggcgttgttccagtagaaccattagaaaatgaagagtctgtgttggaagaaaatgatgcagagaataataaggaaacctacgcatgtgatgaagttgtgaatacatatgaaattaaaaatccatcaggcatttcaatatgcacaaggcctgcagaggaaaacgttggaagaaatagtgttcagcaagttaatggagtcaacatttcaaattcacctaatcaagctaacgagactatcagcagctctattggcgatattaccgttgactcggtgcgcgaccatttaaatatgacgaccaccactttgtgttctattaatacagaggaaaccattggtgagtaatcatttatttactaacattattccacctattttaatttgctgttttgtacgtatctacatttaaatgttttcgtttcgacattagttactttcggcaacataattcttataaaaatttactttttaaaaacttgattttaagtatacgcaccaaacaactttaaatatatacttttatcttattttaaaagcacgggcccacattatatctgtacataactttttttttctgtcatctctatgaaaatgtaggtcgcctatctgtacttagcacgcaaaccaacaaagccagtactaccgtaaacatgagtgaaattccaaatattaatatttctaatttagaggacttggaatcgaaaaggtgtgcttctacaagaaacattgacataagctttaacctactaattttttttttttacctaacagaaatacgacggaaacgagtactagttctgttgtaattaaatctataattacaaacatttctcatgaaaaaacgaacggagacaacaaaataggaacgccaaaaacagcgcctgaagaaagccaattttaacattgacagaagccgtaacctactaattattttatacctttacagaaatacgacgcaaacgagtactagtcctgatgtaatttaatctataattacaaacatgtctcactaaaaatcgaacggggacagcaaaataggaacgcaaaaaaattaaattaaattaaacgcgatttacatacaaacagaaatgacagaatgataatataaaatattcattttttatttggcttaagcgatgttgttgttccaaaaccatataattatttatgattttatgtaatgttttcatgtattttcgcgtagtgactttataccctttacccgtatgatgaaacgaaacatgatatttgtagaaaggtacaaaggataaaagttgacatttaaggccgattgtaaaatattaaaacgcaacctggataacatgccgattaattacttctgttcgtccgtataaacacaaataccgataaattggtccgtccccatttaataaattgtatattaaaatggtctttattttggataaataattcaaattatataggaacatttgggttttaagggatagaaacagcgctggtgtctttcatttccgttcgtatgaccgttcaaagattataaaaaaattgtcgtgcccacattttttaaatttcttttattttcggttaaaatattgtgatacaaaaaaatgcccttacaaaattaggacaacaacaatttgctttattatgatgaacaaattaggagtacaaaaaatagcctgatgcaaggatggggagaaaaaagaccttgaagttcaaaagaatttgttgtatcaaatcctcaataagaaaactacttaaaattaaaagcgtgtttcaaattaattgtagaatatttcgtaaaatgaaattgcaaacttttttagcacgaaattacatgtatttaattctttggctaatacgtcagttaaaaaaggctacattttgatgatactcacaaatgtaatttttgcattctacacaggtgcaattaaaaaattatggtttttatgagttttagagggaagaaaatatgtcaatatgagaagtaagttaatgagccttcaagtactttagtacataatgtaatttaattttagaaatcctacggctttatattcaattgtaaagtattttaaaattcctgacgatttgtagtaattgttttgttcttagcttttttgcattctcctccgttactccgttactcgtatagtaaaaggtatagtatatacaatagtattgtagattcgttgagaagtatgttacaggcagaaggaagcttttccgaccatataaagtatataattgagtatttagcttaggattattaataaaacatgtattttatttaacaaactggctttacaatattttgtggaagaacaccgatctatttagttgtaggtctcaaactgaaaactcctaattttgacttatttaaagatcatacctcggttttgagccttagaggtttgtatgagtgattttctagaatgatctttgtacttcgttacaataaattgttttcttctactctaatatagttggaatcgagtaatccctagataagagttaggcttaaaatagtaaattacaaatattgaattggacattacaattgcatattctcagcttgctgtattgtaaaaattaattattaactcgaagagattcggcaattaatacgtccctattcgcattgtttttacttggggaaattttattgaaaaactagattctctgttacaatcagatatgagaacaagttattgcaccagcacatctctcggccagctcaattcaattaaatagctaagcacttgttgcgaattcatgcttggagtgtttacgtaagatttgtaaaaataactaaactggattctccacattcttgcgtagctgtgtgattctactgtcacaactctccgtcgacgatttctagagccatcttcttgcggaagtacaacatttccgactgggtaaaggtaattggcacatcacacgttatatactcggcgaacatgcagctgaagataccgcaatcgctgccatctaactgtcgtggtatattctgcacgctctcaataacaaaatcgctggtatcaaactgctttttgggcttgaatattgactcttcgcgtagatatttctctagagcgtccagcactggtcggtttggctttccctttgagtcataataccggattgtcttgttccgcaagtgtatgatggccatgcaccagtggacgccgttgcagtgcactggtaccgggattatgtccttgctgaacaagtccactttgcgagtccagcgcttaatgcctgcatgcccagcttgcaggaggcggggcacgaa

SEQ ID NO: 28820 - DNA, 5374 bp, DROSOPHILA
cgactttgtgtgtgttaaaatgacgcgcatatcgttttgggctaataatattgttcacgttttataaaacagatacacggttaagctctgaccggtcgtattattatctgtgtgttcttggttgacacgtttatttcatttattctcatttaaagcaacgatgtgaagaacagtgcgggcgtttctcaacataagaatacatacaaacttatgcgtgatggtgagcaaataaaatagttcaaaaaattactcggccaccgccttaaccgtacaaacggaaatacataaagcatagaggcgtagtcggtgagtcagccacgccaacagttaacagtcgtcattttgctgtctgtctaacacgcaatttgtgtgtgtatatgtgaataaacagataccggtatgcaatcgcaaagctggtcaactgtaaagatcgtttagaataaatacggccacaattagtatacatatttattcatcgaaaccaacccaccacaagagcataaccaattatgttaaagtttatcagaggaaaagggcagcagcccagtgctgacagacaccgcctacagaaggacctttttgcttatcgtaagacggcacagcatggctttcctcataagccttcggctcttgcgtatgatccagttttgaaacttatggcaatagggacgcaaacaggggctttaaaagttttcggtcaacccggagttgaattgtacggtcagcatactttgttaaacaattcagcatcggagcttaatgtacaattacttgaatgggtgtatggaactggtcgcatactttcgttgacggcagcgaatcaattaattctatgggagccagttggagcaacgttgctgccaatcaaaacactaccgtttgacggcaaacttaaaaaagtttcatcgctgtgctgttctctcagtaaggatctgctatggattggaacagaaggtggaaacatctatcaactggatttacatacatttaccattaaggagcctgtaatttaccatgacgttgtgctagagcaggtgccaccagcctacaagctaaatcctggtgcaattgagtcaatccgccaacttccaaactcccctagcaaacttctagttgcatacaatcgcggcctttgtgttttgtgggattttgaaagcgcatctgtccagcgagcatacatagcccctggacatggacagagcgttggtcttacagtgaacttcgaaggatctgaatttacctggtaccacgctgatggttcatacgccacttggagcatagataacccagaaccgccgtcgaatgttaattatgtgccttatggacctgatccatgcaaaagcataaatcgactgtacaaaggcaagcgaagatccaacgatgtaattgttttttccggcggcatgccacggtcagcatatggtgatcacaattgtgtgtccgttcacgccagcgatggacacaaagtgtgtcttgactttacgtctaaagtgattgacttttttgtgacctttgaaaataatagagatgtcgctgaagttcttgttgtactacttgaagaggaactctgcgcttacgatcttactgaccctaatatttgtgctatcaaagcgccatatcttcactctgtccatgcatcagctgtcacttgcaattaccttgcttctgaagtcgtacagtcggtatatgaaagtattttaagagctggagatgaacaagacattgactatagcaatattagctggcctatcactggcggtactctcccggataacttagaagaatctgtagaagaggacgcgactaagctttatgagattttgttaactggtcacgaagatggttctgttaaattttgggactgcactggagtgttgcttaaaccaatttataattttaaaactagcagcatttttggaagtgagtcagacttccgagatgacgcagctgcagatatgagtgcggaacaagtcgatgaaggagaaccgccatttcggaaatcaggactttttgatccttattcagatgaccctcgtttagcagtgaagaaaatagcattctgcccaaaaaccggacaacttattgttggtggcacagcgggccaaatagttatagccgacttcatagacttacccgaaaaagtgtctttaaaatacatttcaatgaatttggtcagcgatcgtgatggatttgtgtggaagggtcacgatcagttaaacgtgcgatcgaacttattagacggagaagcaattcctacgacggaacgtggtgtaaatatatcgggagtactgcaagttttgccgccagccagcataacatgcatggcactcgaagcaagctggggcctagtatctggtgggactgcgcacggcttagttctctttgacttcaaaaactttgttccagtatttcatcgctgcactttaaacccaaatgatcttactggagcaggagagcagctgtctcgtcgaaagtcttttaagaaatcattgagggagtcatttagaaagcttcgcaagggtcgatcgaccaggaccaaccagagcaatcaagtaccaacaacgctggaagcaagacccgtcgagaggcaaatagaggctcgttgtgcagatgacgggctaggatccatggtgcgatgtttactatttgccaaaacttatgttactaatgtcaacataacgtcgccaactttgtggtcagcaacaaatgccagtacagtctcggttttccttctgcatttgccaccagcgcagaccgcggcaactgccgtcccgtcggcaagtggcaatgcaccaccacacatgccccgccgaatttctgcgcagcttgctaaagaaatacaattaaaacatcgtgctcctgtggtgggtatttctatttttgatcaggcgggtagccctgtcgatcagctgaacgccggtgaaaacgggagtccaccgcatcgtgtacttattgcttccgaggaacagttcaaggtgttttcacttccgcaactaaagccgattaacaaatataagcttaccgctaacgaaggtgctcggattcgccgcatccattttggttcgtttagttgtcgcatatccccggaaacactgcagagtatgcacggttgtagcccaactaagtccacgcgttcacatggcgatggagaggcggatcctaatatcagtggaagcttggctgtaagtcgtggagatgtatataacgaaacagcattgatatgtttaacgaatatgggcgatatcatggttttatcagtacctgaattaaaaagacagctgaatgccgcagcagtgcgacgggaagacattaatggagtttcgtcactttgctttacaaactctggagaagcactgtatatgatgtcttcttctgaactgcagcgtattgctttagccacgtccagagtcgtgcaacccactggcgttgttccagtagaaccattagaaaatgaagagtctgtgttggaagaaaatgatgcagagaataataaggaaacctacgcatgtgatgaagttgtgaatacatatgaaattaaaaatccatcaggcatttcaatatgcacaaggcctgcagaggaaaacgttggaagaaatagtgttcagcaagttaatggagtcaacatttcaaattcacctaatcaagctaacgagactatcagcagctctattggcgatattaccgttgactcggtgcgcgaccatttaaatatgacgaccaccactttgtgttctattaatacagaggaaaccattggtcgcctatctgtacttagcacgcaaaccaacaaagccagtactaccgtaaacatgagtgaaattccaaatattaatatttctaatttagaggacttggaatcgaaaagaaatacgacggaaacgagtactagttctgttgtaattaaatctataattacaaacatttctcatgaaaaaacgaacggagacaacaaaataggaacgccaaaaacagcgcctgaagaaagccaattttaacattgacagaagccgtaacctactaattattttatacctttacagaaatacgacgcaaacgagtactagtcctgatgtaatttaatctataattacaaacatgtctcactaaaaatcgaacggggacagcaaaataggaacgcaaaaaaattaaattaaattaaacgcgatttacatacaaacagaaatgacagaatgataatataaaatattcattttttatttggcttaagcgatgttgttgttccaaaaccatataattatttatgattttatgtaatgttttcatgtattttcgcgtagtgactttataccctttacccgtatgatgaaacgaaacatgatatttgtagaaaggtacaaaggataaaagttgacatttaaggccgattgtaaaatattaaaacgcaacctggataacatgccgattaattacttctgttcgtccgtataaacacaaataccgataaattggtccgtccccatttaataaattgtatattaaaatggtctttattttggataaataattcaaattatataggaacatttgggttttaagggatagaaacagcgctggtgtctttcatttccgttcgtatgaccgttcaaagattataaaaaaattgtcgtgcccacattttttaaatttcttttattttcggttaaaatattgtgatacaaaaaaatgcccttacaaaattaggacaacaacaatttgctttattatgatgaacaaattaggagtacaaaaaatagcctgatgcaaggatggggagaaaaaagaccttgaagttcaaaagaatttgttgtatcaaatcctcaataagaaaactacttaaaattaaaagcgtgtttcaaattaattgtagaatatttcgtaaaatgaaattgcaaacttttttagcacgaaattacatgtatttaattctttggctaatacgtcagttaaaaaaggctacattttgatgatactcacaaatgtaatttttgcattctacacaggtgcaattaaaaaattatggtttttatgagttttagagggaagaaaatatgtcaatatgagaagtaagttaatgagccttcaagtactttagtacataatgtaatttaattttagaaatcctacggctttatattcaattgtaaagtattttaaaattcctgacgatttgtagtaattgttttgttcttagcttttttgcattctcctccgttactccgttactcgtatagtaaaaggtatagtatatacaatagtattgtagattcgttgagaagtatgttacaggcagaaggaagcttttccgaccatataaagtatataattgagtatttagcttaggattattaataaaacatgtattttatttaacaaa

SEQ ID NO: 28821 - protein, 1161 aa, DROSOPHILA; identical to SEQ ID NO: 4722

SEQ ID NO: 28822 - DNA, 2867 bp, DROSOPHILA
tgttaaaccttgtgactcaaagacaatcgaaaggaagcgaccgatgcgtaatttatggattttcaaatttcatttcacttgttttaaataatacatgttcgatatttgttgcacaaatatttattgcatatgacttgattaatgaatgacagaagtcagctagaaggtcttatatgcaaataaataaacatctacagtttgataaataaattaacataattaatggacattttttggaagttcattataacacaagtaattggagagtatgaagttatccataattggaacctatttgggatctgcacccagtagtgtttggtctattgttacacgtctcattacattattaattccttttacttagatactcaaccgacaagcacttaccaaaaacacgatattgacaatatataaaataaagttgactattcccgatagacaacccattttgaaagtatatagtttgctcctgtatttagtagaattaaataaacactattgttttatccaaaggagttgtcggtgtctctgattttatcgcgcactcgcgtcgtttactgtcgttcgattggactgctcctccagatgggctactgtttttaaattggccaacagacacgggcgctatcggaggaaagatacgcaagtgcctgttatcataatcatggccgaaacgaaaaatagataatgggcactgggcggcgggcggagatcgatagccattgccatatggaggtgattcaccactactgagggcattcgatctcggaaacgcggcactcggctaacaggccgataaggacatactttttggaaaaacatcaacctgtcttgattagatagacggcagccagaggtagacagcgaataagcaataatatttcattgggcttaacctattctggtttatttacggtgagtgagtgagtgaggaattcgtgtgttggatttatgctatgaactgggctacgtctaaggattgtatctgacttcggctctagcgcttcctcatcgcgctggccaggcagcacgacatgatgaagatgcccagctcgaagagggcgatgatcagactgctccatcgaatcaggtccgtattggaggcccagaaatcgacgaactcctgccggcagccaggtcgctggctgtagatctccgcttcgcacaccttggtgcgatccttgtagccgcagcaggagctgggcacggtttcatactgttggtatcccgtgttgccacagcaagagaactgcaatggaatagatacgtaaatatccggaaaaaactaatgacatctgatggtgaatttcgataaacttacggccaactggagggcatccatggggtatccctgggcggcattgttctcatcccacgccttgtccactgccttgcccatgctggacaggaacttgtcgttggccgcgaagatccagaatggagagggccagttgcaggccgaacagaatcagcatgcagatggcgtactgaaaggaatgccaagtcatttagaatccaatttcggtcagtgggtgatttccgagtgcttacgatggtggtgcagcaggcgttctcgcgaatggtgccgcagcatccgaagaaggccactacgaaggtgacacttccgatgacgataatgcagatcgggatggtctgggtgttaacgcctccgtcgaaggccgtaaagttgcccatcgtggagagcatgatggagcccaccacaatgagcaggatgccaccggccacgaacaccaggttgagcaagtacagcaggtacttgaacatcgcggatagacagttcatggtgctgggttctgttcgggtttctcgttggctagctggataatccgttcgttcgatgtgacgatgttcgtctaactgaatgggccctcggacagaacgcggctattaaagcttactcggagtcctcatcttatcggctgcgctcttatctcggccataaaattccgtatgtacttgtgctggaagctccgatgcccatgtacttgtacttggtgaatcgctttgcacccacgagataccagatcattgtggtggtccgaacctgggaaattacatccttggcgcaatgattcattcaacgaatggtaggtgcaaactgctggtggcggaattttatctagccctcgtgcgattccatcttgggggcgttagatcgttcataagatgaatcattcacaccctccacaccttgccttatcaccagtcaagagtacgcggtgcacgctgactcacatattacgttgcttggagtccgtttccccgtgagtccccgatcttatcgcctagatttatgtactatcaatcgagcaataaaccttttagcgagtgcactcccagcctaacttcaacaagattttggcaactattggggtttccacggcggaataatttcccattgacattcacaaaacggctatgtgcccttcatagataaaatagctcaatggagataagatttcgtctgagccctaaaaagctaactaactaaatatagtcttctgataggttagttctacggaaatatgtcaatagagccaatgattgataatgatctgtaatcaaagtgtacttgttggtttcggccaactctatttatacttattactttgcagattaaaacgttatcgcgaatggccgaaatcctcccgtggcaatttagaaaaataggtgctttagggattaagtcgaattgcaaacaatgtaagctttcccattaagacaaagactgaactcttttcgtaaattgtaaataaatttctccgtttattgcaatctccaggagtataagttattttgtacagttaaacatattagcacattcagtgtaactttgaacaaac

SEQ ID NO: 28823 - DNA, 731 bp, DROSOPHILA
tcacatcgaacgaacggattatccagctagccaacgagaaacccgaacagaacccagcaccatgaactgtctatccgcgatgttcaagtacctgctgtacttgctcaacctggtgttcgtggccggtggcatcctgctcattgtggtgggctccatcatgctctccacgatgggcaactttacggccttcgacggaggcgttaacacccagaccatcccgatctgcattatcgtcatcggaagtgtcaccttcgtagtggccttcttcggatgctgcggcaccattcgcgagaacgcctgctgcaccaccatctacgccatctgcatgctgattctgttcggcctgcaactggccctctccattctggatcttcgcggccaacgacaagttcctgtccagcatgggcaaggcagtggacaaggcgtgggatgagaacaatgccgcccagggataccccatggatgccctccagttggccttctcttgctgtggcaacacgggataccaacagtatgaaaccgtgcccagctcctgctgcggctacaaggatcgcaccaaggtgtgcgaagcggagatctacagccagcgacctggctgccggcaggagttcgtcgatttctgggcctccaatacggacctgattcgatggagcagtctgatcatcgccctcttcgagctgggcatcttcatcatgtcgtgctgcctggccagcgcgatgaggaagcgctag

SEQ ID NO: 28824 - protein, 123 aa, DROSOPHILA
MNCLSAMFKYLLYLLNLVFVAGGILLIVVGSIMLSTMGNFTAFDGGVNTQTIPICIIVIGSVTFVVAFFGCCGTIRENACCTTIYAICMLILFGLQLALSILDLRGQRQVPVQHGQGSGQGVG

SEQ ID NO: 28825 - DNA, 3305 bp, DROSOPHILA
agcaagtacagcaggtacttgaacatcgcggatagacagttcatggtgctgggttctgttcgggtttctcgttggctagctggataatccgttcgttcgatgtgacgatgttcgtctaactgaatgggccctcggacagaacgcggctattaaagcttactcggagtcctcatcttatcggctgcgctcttatctcggccataaaattccgtatgtacttgtgctggaagctccgatgcccatgtacttgtacttggtgaatcgctttgcacccacgagataccagatcattgtggtggtccgaacctgggaaattacatccttggcgcaatgattcattcaacgaatggtaggtgcaaactgctggtggcggaattttatctagccctcgtgcgattccatcttgggggcgttagatcgttcataagatgaatcattcacaccctccacaccttgccttatcaccagtcaagagtacgcggtgcacgctgactcacatattacgttgcttggagtccgtttccccgtgagtccccgatcttatcgcctagatttatgtactatcaatcgagcaataaaccttttagcgagtgcactcccagcctaacttcaacaagattttggcaactattggggtttccacggcggaataatttcccattgacattcacaaaacggctatgtgcccttcatagataaaatagctcaatggagataagatttcgtctgagccctaaaaagctaactaactaaatatagtcttctgataggttagttctacggaaatatgtcaatagagccaatgattgataatgatctgtaatcaaagtgtacttgttggtttcggccaactctatttatacttattactttgcagattaaaacgttatcgcgaatggccgaaatcctcccgtggcaatttagaaaaataggtgctttagggattaagtcgaattgcaaacaatgtaagctttcccattaagacaaagactgaactcttttcgtaaattgtaaataaatttctccgtttattgcaatctccaggagtataagttattttgtacagttaaacatattagcacattcagtgtaactttgaacaaacgatcttacaaaagtgatcgttacgcattcgtcattggatttgctgcatttgctgcttacgcttgagattatgcaaatttgaatggccatctgtatcaggtaaatattcgtaaaattgggcaacataattcgtactttcggtttcaattaaaattagtgcaaggccttagtcctttgtcgattaatattccgcacggcgtctatagttccgaatgctgttcgccaagcaacaggcgaaaacgaatcccacaaactgaaagcaaacagagtatggtatattggaagatatacatgtaggtgtaaatctcataacgcttatggtaaaataacaaactaaactgcattgctacgaattatgatttacattacttagtactttttggttatccccaagaaatcacaatggaaggtaggtaacatgaacccatccatcatattttcgaaattcacatggggaagcacctagattcgatgatcgatttcgttcgattgcgttactctggacaataacttacttcgatggcggcgatgaccagaccggcatacttgatgatgtcgctgttcctgtcccagactcaacgaaggtgaccttgcatccccgccggtagacggtctcccagcggcagttgttggtgtcgctgcagcaggagggagggaacttgccctggtaggcgtagtcggtgtagccactgcgtccgcagcatttcatctgcgggagcggcagaaagtcagttgaaggcgggtcacatgtccttggaagtccctaaatacttacgctgatctgaatcgcgtccatgtagtcggaacgactggtgcgatggttccaggccttctcgaccacgtcgcccatgatctccaggtacttgtccttctgcacccacatgtagatcaccaaagccagttggccaatcatcaggacgaacagcaagatcgagtactgccacaaagaatacattttgaattgcaagatgaatggcacgatgcaggatcagtactctaccgtcatggacatgcagtaggattcccgaatggctccgcagcagccgaaccaggaaatcagcaggatgatggtgcccaggatgatcatcgttacgggcacctgctgggttcgcagggcttccgcgaagtcatccatgttacggactttgctgaacagcagagctccgaatacgatcagcaatatgccgcatatctgaggaagggaaatgttgagtttatcaatcctgagccaaccagggttgtctaatctaactaaacttgaattctcaagccctcagattttgacagaaattggtcaaaaacaatcacttcatatccgttttatattggacttactaatcatgtaataaattaatacagttctaagttatttatgatttaatttgatcaaatgatttgacaagatttgcgataccaaatcgcctgaagaatattcatccatataaatgctggctgggatatcattagcttttttgtttcattaaaaagcttgtaggcgttaaaagctcatgcctgttgttcgacaaataatatgcactgcgagaaactggaactacttccagggacatgcatttcaatatttgcgatatggcgaaatcacctgctttattattaaaactactttctattattgcccagttcttcggcgattttcgtttatagagtttcagattggctatttgcatggctatcacaagcttatctcttatcaatccgattcgcttcgttaattaagattatgcataaaagcgcctggccatcgacgataactattaaaaacatatttactttggctttgattgtatcagttgacgtagtcattagattagatccacccccagccaaactatagttcataaattcgtaggattgcgccaaactgcagcatgactcagccgccgagctcagcggttcgtgggatcagaatagttagcatcgcatccgatcagaagagagcgacatttcgacactggtccacaattataataataaccagtccacccactcgcattcgtctggcatttctagatcgccctccctcggaaaattgagttcaagtgtaccgccaacgacccccgtgtttccattccatgatgtgcgtgtgtagatgatatttcgttgtttccgagttttggctcgtcgtctcacaatgggagcaagttcacattaaattaagtcaactatttttgggtgagaccccc

SEQ ID NO: 28826 - DNA, 914 bp, DROSOPHILA
cttcctcagatatgcggcatattgctgatcgtattcggagctctgctgttcagcaaagtccgtaacatggatgacttcgcggaagccctgcgaacccagcaggtgcccgtaacgatgatcatcctgggcaccatcatcctgctgatttcctggttcggctgctgcggagccattcgggaatcctactgcatgtccatgacgtactcgatcttgctgttcgtcctgatgattggccaactggctttggtgatctacatgtgggtgcagaaggacaagtacctggagatcatgggcgacgtggtcgagaaggcctggaaccatcgcaccagtcgttccgactacatggacgcgattcagatcagcatgaaatgctgcggacgcagtggctacaccgactacgcctaccagggcaagttccctccctcctgctgcagcgacaccaacaactgccgctgggagaccgtctaccggcggggatgcaaggtcaccttcgttgagtctgggacaggaacagcgacatcatcaagtatgccggtctggtcatcgccgccatcgaatttgtgggattcgttttcgcctgttgcttggcgaacagcattcggaactatagacgccgtgcggaatattaatcgacaaaggactaaggccttgcactaattttaattgaaaccgaaagtacgaattatgttgcccaattttacgaatatttacctgatacagatggccattcaaatttgcataatctcaagcgtaagcagcaaatgcagcaaatccaatgacgaatgcgtaacgatcacttttgtaagatcgtttgttcaaagttacactgaatgtgctaatatgtttaactgtacaaaataacttatactcctggagattgcaataaacggagaaatttatttacaatttacgaa

SEQ ID NO: 28827 - protein, 196 aa, DROSOPHILA
MDDFAEALRTQQVPVTMIILGTIILLISWFGCCGAIRESYCMSMTYSILLFVLMIGQLALVIYMWVQKDKYLEIMGDVVEKAWNHRTSRSDYMDAIQISMKCCGRSGYTDYAYQGKFPPSCCSDTNNCRWETVYRRGCKVTFVESGTGTATSSSMPVWSSPPSNLWDSFSPVAWRTAFGTIDAVRNINRQRTKALH

SEQ ID NO: 28828 - DNA, 5591 bp, DROSOPHILA; identical to SEQ ID NO: 19879

SEQ ID NO: 28829 - DNA, 1073 bp, DROSOPHILA
gcagagaaacttataacgacaaacaaacagtttgaaattagcgtaattagataagaaaacgaactttgaaaccaaaggtgttagtctttaaaaacgaaactgataattatttaaaagataatgctttaaacgtacagcaaatcaaccattagccagccaaaatgagccaatgccaaagttaaacagcaactagaaacacagcgcatagtcaacagctcgcagggagccatcaacgaaccaaatcgatcaggaacacatagcagagttgccttagggactagctttaaccacgaacccatagccaaacgaatccagatagcccacggaatccgctaccaagccaaaatgcccgctacagccacatccaagccgagagctccgctcgtcgaggagggcatgacgcccaagaagaccgccctgatcatcgtaaccgtgatcggatgcattgccatcctgtggccaaaggtcttccatcccatgatgttcggaggagtgcctccaagccagccaaacttcaaggatccacgagcagcaccaggcggtctgcgccaggagcgtcccgcccacctgcatccggaatccatataccaggccatgagggagcggggtcgcgccattcccgccacgcccaccgtgccgattctagaacgaaagacttcgcccagtaatccgcctccgcggattgtcgacggacggcctggacccattcctggaatgcgtccacccatgggcgccggtgcactgcatcagccacaacagcggggcagcagcatgggcttcctaatgccactctacaccattggcatcgtagtcttcttcggctacaccctaatgaagattatgttcaagaagcaagttcccaatgatccgtacggagcggcgcctccaaatcctgccttccggcaggaggtcttcggatcacagaaccacagccaggtggaggatttgggcggcagcaaactgggtgagtgccaggccaattcggatgccatcttccggattattacactcgtagttggacacacacacacacaatcgctctagccaccgcactcacgattcaatcctaaccg

SEQ ID NO: 28830 - protein, 232 aa, DROSOPHILA
MPATATSKPRAPLVEEGMTPKKTALIIVTVIGCIAILWPKVFHPMMFGGVPPSQPNFKDPRAAPGGLRQERPAHLHPESIYQAMRERGRAIPATPTVPILERKTSPSNPPPRIVDGRPGPIPGMRPPMGAGALHQPQQRGSSMGFLMPLYTIGIVVFFGYTLMKIMFKKQVPNDPYGAAPPNPAFRQEVFGSQNHSQVEDLGGSKLGECQANSDAIFRIITLVVGHTHTQSL

SEQ ID NO: 28831 - DNA, 14250 bp, DROSOPHILA
caactttttaaatatattaataccgtttctaattttatctatataaaacacaaaaaggaaaaagaggatacaacagaatcaatttactttcaaactcaaaaaatgctgtttttggtcaacttctctaattgtggcttccctcaattgtttgtatttattcctggtttgatactaagaattctcgaaagtttattaaaccgaaacaacaaacaattgatgttaaaataaatttccaaactgatcaaagtattttgtttttactgggagttctcggtatgccgaaggttcttctgtttgttccactaatttttttgtcaaatcaagacaaaatgttaggggctctaattctgatgaatcgaaataagctcagttttcgcggtgttactggaccgggtaacagacccttgttctataagtggctcaattttgtatatgtgttatacctgaactaccgtttcgatttccaaaccgttttattcgataaatgttggttgaaaacgctgctgacggcctagcgtagacttgatcccactgatgcatcttatcgatatctttttagcgcgtatcgatacatcagcgagccaagcaccttgaacagtgtgaccccatttagcatttatttaaaactacgacttcgtgtgctgacagttgtttgtttttgaaattttaatatattcagaaatataaatagcttgcaaaatagttattaattaaacttaaaaaagttttaaaaaaaacattccagtttagagacgcacagctggaatagccaacgaaagtgcggacatcccacccccaaaaataattgcgcatcgcttgggcggcaaaaaactatttcgaccgttccgccccgctagttctctctctttcccccgccagcaccctctcgctcactagaaagccaagcaaaacaaaacaaaacgagaacgcagaaccgacaaaacaaatacctataggaaagtgagctatataggcacatagctttggcgtagtcgttgcacggcattcaaacccaccagtcgacgtgagcacagttgtgtaaacattttatacagcaaaacttattttaagtgattttataatcttatcgtggtgcgataagaggtgaacgaaaacaattaacgatttggtggccgaaaaaaggcattaaaaaaaccaatgataaactgatacgttatcactgtttaaaatgtctctggtaagtaaatataaatatgtgtgttcaatcttcccgcggtttatagaaaaaacaaaatgggtttactttactatacttgaattatgctgcatacaaataggcgccgcctgtctacctttctctctccaacacgccttttttcattcatgtccttacccccacataaacagggacacgaccattatccctccctctctcactctctctctctccccctttctccctatctcgctctccgctctctggcgttttctagtgatttctaaaacaatctggaggccgagatacacatgtacatacatacttaggcatatgtcaggatcccgtcttatcttattcgctcttgtgctagcttgtcattttgagggatgggttggaatgaaatctgtctgtcgcacatgtttctgcctggatattaactaagattgtaccttttatctccgccgatgctgagctcattcgcatcgcatttcattcatgatgaaatcaacaccacccccatgctgcaaaacccacccattcgtggaacgcgtttactagctagaattttccaatttctaattaccgctcaatgtcatttccatttacagcgctgcgtaggttcctatgattgatggggttttgcctatagcatcagttgcttacctcacttattttactagaacgaaattcatatatcctcgctgcattctgttttgcgtcattcattcgtgagatatttgtttaaaacaactgtcaactggcaagtctaatctatacctagtaacggtgactagatggtttcacaggaaattaggtcacttgagtaatgtcataacctctcaaattccttacttcaaatagtagttcactgatgagttcacttggtgttcccctgaaaatgatgaataaaattatttttgagtatttatccactacaccataaacttaaatatacaatatacatacatcctttttgaggctccatcatttgacagcaaaagatccgcgggacacctcagttcggtaggctcattattggattgttccacacatccacacaccgaaaatatcctgacaaaggatcgacggcagctggcgtcgtcatgtgccgcgcgatcctttcactggaagcgtgcacaataaggatgaggacccttgccccaggagcagatgttgctggctccgctttcggcgatcctctgatcggttattacctagttgctgcagctgccggcacacgtccacaattgtcgatccaggtgctttctttccttcctttttttttggccctgaatggagcaggtaaatacatggtggctagaaaagggaccgacaggcagcacatgttataagcaatgggtagtggctagtctaatcgaatcgtgcccaacgcgttgttatgacaccttttgccaatcgccgcacaaatgaatgaagagaatacaaaaatggcaaacaggttttcagctccgctgcagttggctgttaataaaaagccacaaaatataacataaacagaatcaactgtagagtatagcttttgaaatgtaatatgaggaacttaggaattacaaagttgcagcaatcttttgacacgctccttaatatttatcttaaatgaatattatacatgcatatatagataaaattaaggtatatccctattgagtcatacttgttaatgctggcatggtttcattattaaagcaacaaagtgactcaagttgtttgaaatagcttaaacagctgtcaacacattaagttaaaacgctgtaggctattttaactgtgcattaaaagcagcaccaacaagaacagggcggttgcaacaactttaaaaggccttgcaaggccgtttagctccaagcccgcggatttttcaactaaaacttgtccggcgactcgagacccaaactctgcgtggtcagcggagtgatcttttgatgctgaatatgaaatgaaaaccgaagtgcctctggcagcatccgcaaatagaatgcttgtatagacgccacattttcgcttaatttacagcagaagaccgcctgcaaacagtgtcgacttgcaacatgtcaaagtcgtctagacttcgcatttataggcaaatttctcaaatgcgtcgcgacattttcgtggtaaatttagcagcgtgtatttataaaatttgaaaagttcaacccgtttgcttgcggacgccatatacacatgtcgcgcactgtagccgggctgttttccataaatgattcaaacttggcaatctttgtttatacagtatcagaacgtgttggcatttcccctgccaaatatatattcataactcaaaggggcttaatcagaaaagcttgggacttcgtttaaaaatattttacttattgatagttcattgcaaatactttgttcgaggcaaaaacgtcaattcaagaaatatgtttgtaaatttcataatataaatatattcaacaaatactttaagaatccctagtggtttcttcgcatttattagtttttatcagccattttatcatgtcatatactaacttatgtacataaaattgcgtaatatttactgtagcaattactcagccttgtactgtgtgcaaaatatatatattagaaccccgccccagggaaccctattttctataacctaaaagcgaatcaaaaagctgacattttagaagacatagaagaaattgactcaaaataaggcattgcaattgaagttgtaaatcttgttctttagtttttggtataaggacggattcatcattaattcatcatcattagattgacacttctagtgtctttggtttaacctgaatcaggctagtacgggaccgagtacgggacagagcctgcactttgagatgttctcttaattttgttttttgttttgctcttttccatacatagctttttgcatagccgatttgtttaaagctggcactccgccagccaagccgtatcattaaaagcattttttcgtttaaaaaaataatgatcggaattcgaaggcataataatctaccttttttgatatgtggactttgtgaaagttccagctgctccttcctcctcgccacaatgaaggagagacagacagacagagtgagagagagtgagagagaggtggaaatgcggtgcattgacacgcgcgcggcgcatgctcttcgctctcttgcaggaggataaaaatcaatgatcctggctgcggtgtctgcgagtgcgaaagggatagccatacaggcaacagtagtacgtctattacgatttacgtattaatactagtcgtagtacaacaaaattatgcacttgcatttgtccatttttattaattgttcaacttgcccacaataaaaagccagactgtttgattctaaacaacgtttatgggccccgccttcactaaaagtggctaaataaagtttcagtaatagcaagaaaattaaaagtgcggaaggccgaatgaacaactgcattgaacattccactcaccaaagctaggcagctgagagagggtgtctgtctacctctctcgttggcagttctgaaaaaaataaccttaaatgtttacagaattagcgtgaagccgagggattcgaaatcgacttcggcagcgctcgtctcgttgcttcgtttcagttgaatgtcgaatctcggcccgtatagacacaatggacaactcgctttgagcgctgtctcgatttaaatttatacatttaaagtacaaaaaaagtattccacggtactgaatgtgatagttggctttgtaattgtaggcgatatagcagcagcaacaacaaaagcaaatacagagcgtaggagataacagaaaacgtgttattgtgtttttccgttcgtgttcacggaaaatcaatagtgattgtgaaagcgcattatttacacgattaacaaatcgtcaaatctcaacgcaacggaaattttccagtgcaaacttgagtttttcaagaaaaagagaaaagccgtcaaggtgagccccagttttataatctagtatggtattttgtgtaccccaagcgaaaaataaccccaaattaacgaaaacgtgtcatcagaaggcaaaggcaacagctaaaatatattttgtttgctttgcttgtatctttactcgcacactcacacacacactatatatcagtaaaaaaaaaaccacacaggcgcacacgatcatacgagtgcccacaagacaaagttgtcacatgtggtttaactgcatttacgtttccatttgttattaataaaacgagtatacatacttttgcatcagtatacatacttctgcatacataaatgtaaattaccagtaaggggtttaaatttaaattccttttaaatcgaaaacgttttattatttttcgtcgggtgtgcttcgttttcttttgtgtttttttgtgcttgcataaaaagatggcgaccgtagagttgctgaatactcgctctcttatttcattttaaattatttacggaattacaaacttgtgtttacccagtgaattcggcgaatttttcggtaatggttaacaacaattcaaaatgacacacgtttgtttgcacgtcttttctggccatatggtaaccctgttttcacatcgagtggtttcatccaaaattccgcaccccgcacttgccccttgatcatcaatgctgctttaaaaacaacatactcaattggattggatgatgtggatggagaaaaataaggggcggtcattgtaccatacaatgctataattttatatattcgcccaaagttgggactacgcaatacacagtattcgtctacgcttaaattaagcgatgactacatacatatagcatccaaaatataccagtttagcggattcgaaggtcattttatgtgtcatcctaccatcaatagagagctttataatgttctaaataaatttaattgttttcgagaggaaaaatgctattatattattgtgaatcctataaacgagtagtttgctaaaacaagtaaaacaacagtttaaaatataatttcttaacagtattttttaccgtgcattcgcataaacagatgacgcgtcagttttctgggtatatacacatacacatacagtactccatttgctatatacgattacaatgtgtgtaacgtacttcctcttttacgcacacactcataatccggcccaacccaccaccaccaccatcgtcatcggaggcaccaccaattccggactatggagcattagcttctttgtggaacatccgctgccaacggaagtggtgcactcatgcgtgtttttcactctgcagaaaaggacagaaaataagtcgaaagacaacacattaccattgccatagaaacggactctgaaatgcgtttgaggagcattcatttttgcacactggtgactcttttttttgcttcattactttcaacttatgtgttcgtttttcgccgaacaaagagaaagtctctcagtagctcaattcgagctgagtctgagcttcggcttacagctcaataaagtccgacttttgtaaatagagctggacttctcttatctgaacttatggtaaccatagcaatcgcaatatcatgttcttgaaaccgttgtatcagtactaaactggtgttatatgctcgtagtttttaatactgctcataggattttattattattattccattttgatgttaagaaaatgtattaatactttaaggtataaatgtgttttaaccgaacgaagaaacttattaaaaaagcctgaacaagctgttgtttccttgtagggatttcaagttttgacctgtttttcgatggcgacgtcgcagggcaaacttcttcaacttccattatccccgcacccacacatcatcgatggtggtccctgtgcccaccttttcccactcccacgaaacggatttcgagaggagtcgagacaattcgttaataaaacgatagataaggtgcttaagacacaacaaacagttctcacgtagacaaatgctgggagtagtatttttttcgaaaagcagaataggatctattgtttgttcgtctgggttccatttgttatcgccagcagacgcaacggcaatcagcacatgaatggaaatggaccagtccaccgcggcccttgaaagagaatcccggaaaagaccaggcataagatgagaataattacaattcggaattcccggaattttcgatgctcgcccagctgaatcatcgcgtcgcctccacgacctttgagcgtggaccgcgtgaaaaacgacctttcaaccattatatccactaacgaggggacatcccccacccctccctcccctctccactaaccacgcctgatcttcatctcacttcttttccatgagatcgtacccacattccaagtcccatagagatgctgctgtgatgataaatgcttcgccatctcattcgcacacgacttgactctttgggtttgagaacaattttcccttggttttccgaggaaaaacgctggcggcgtcggcggttctggtactttgaaccaagccgccgttagttatttcgacaatcgatcaatgttcaatgggaatgagagagagagagagagagggatatatggctacgagacgatcttaatgcattctttagcagctcggatcggggcgcatttattatgattacaatattgccctttgttggccagcatcccatctctgttttcttctcgtattatcgacgtcggcggtcgtggtcgttgtcgttgtgttgttgctgcatttcttggaaggccacagcactcacgcacacacagacacacacacacacacagtttgctggagatcatgcaagaatgttccttgcctgtgctgcatttatttatttttctgcatcctccttctgtgtgctccgctcttccctcttcatcgtcctcctcatcggattctttcacttcggattctttagcatcatcatcttcctcttcttcacgttgtgagcacgatgcgctccgcttctccccttttaaccctagcttgctgttgttgttgttgcccctacagtatctggtatcaccgcattccaatctcgttttttttattttgtggaaggcaacaacaacagtaagaactaaaagaatggtaaagtgtttataatagtttcccacagtcgagctcaaacagctggggtaaaaactttagaaccaatcaattttcagataaaaaggtatttttcaagtatgcagcaaacgaatccttacttcgcttactctgatgataagttgtttaattaaaaatagtagtattaagaactatttcatatatatatatatactacagatatataaatttatacataattccgcaaactttgtaggctgtatacactacgtgcaagcctattaatttgcccttgtctgtagttgcagaacgcagaccttctccacggcttcggacctctgcggttaccttcacttactgcaacgatagcagcagcataactccaatcacttgggccccagctttacttaccgactgggaatggaatgaaatggcctggcctggctgacttggcttgcgttggtttggctgggcttattccaatcagaaaactcgaaaggcagctccaacctcgatggcactccaagccagtttgattttctgtggctgagttttgtagaaaacttgcccgactgcattccattggaggttcgttggtttggttttggttttggtttggtcttcgtgttcgtttgttttttttttttttttgagttttctgtttgttgccttgccttgcctcctgggcctagccttttgctttggcctttgattatgattttctttgctgcggagtggtattttcttctggtctctgggatcgagctcccatgccattcatgcgccgcccaggaggccttgtctcttcagtcggtcttcggttggtgttgggtgaaggcgctgctcacggtttatccattgctcgatatatatataaatagtgtagttccttgtctgccgcacaataattttgtggaatatatcaattttaaagttcatcgagttttttgtattttgatcgacactggtaagtgtatgaagtagtagtaacctgtataattgagtatatgcaattgtctggctcttgaactttttacggaatttcctgatagccccggtgaaattccaatagtcggtttgcattacaattgttaatgggcttggcattccacaataacaaatagcagacgacggcagaggcagctgtaattgcactttgtaatggctgaagaagcaaaacaaacaataatgataataagctgcactaaagaccgaagactcgaatactctcgcaaaaacaattttcacttcggtttaatatgaaactttgtaaaagcgtaaattaaaatattatcataatatctttcaagtattatgaaattatctgtactaatgtgcgagatatttgattttaaagctacaaggtattgcagaattgcaatgccaacaaattgcaattacaatctcaagctcttcgtgtgcgtttctgtctgctgctgtcggctgctccacttcaaaacaaagcgcaatctctgcagagaaacagacccccatttatatagcatcccccgatctggaagcatcctcaataagtatgtatgtatacaccgaggtccagaagtcagcatttgtaaattacaattgcttttgtttttttttgttttttttttttttgctgcactgtatgtgtgtgtactgtttttccatcttcttgtttttgtgttgcgcttgctgctgcactctgttttctctgtggttagttgtttttcccattgatggtttcgtctttgcaccatatggccgtctcgcttgcaccgccaggctaccaatatgcattatatgctgcgctttatgctgcaagtcgggctccatggtggtggagctgtggagctgtgcaactacagccagagtcgacgagtgcgccgtcgccagagtttgactgcattccattaaaactttctcacagtcggctagctcgcagtggtgctccacagtgcatggcactgccagctaacccaccgatggccccctgtcctcctaaacctccaccgcccgatccgttgcaattgtttggcgtgtttggctggtttgtggttgaaatggactttgaacagtcgggagtccaactcagcggtcgtgctgaatttttctttttttttggcccatgcacaagctcaggcgagtaaatgtacaatctcctttaaagagaccaccgcgaatacagtttaggttcccagtcagcagtcgatatgtttcttacggtttcagaagctttataaagtaatttattgtttttcgaattttgcgctaattaaaaatatatcgattggcaatatctgatctaaaattacgtcgtaaatatacatacatacttgcactgaacagtaatcgatatattgaactatttcttaaacgcatacatgtacatatatgattttcctgtcattactataattgccaacacagcaacaatctacttcaagttcttgctattattattgaaaatatttaccaggtgagtcaggtcgagtatcgttatcgagcaacgtctggctggcgccacgaacttttctaagaaaaaaaggaaacaccaccacccacttagctttgcctttggtggtgctgttttggataggattaggatttgatactaatactcactgcgattctgcgcactggaaaaagtagcggttgtaacattgcgtattcgatggcactacgaatatttgttttttttttttttttgtagtcgcaactcgggagtttttcccgaagggaaaaaccacccttagctcgagtgcgagcaggacaaccgctatgttttccatcatataagggctcttaaagttcgttgatgctgcatccccagtttcttgaactgcgtttcagtttttccctgcattgtacatacacactctgaaagacgtagaagtcgtactacaaagtgtctggaagctttgtttgtgaaaattttggtcctttttgcagaaaaaaaggtaaaaataagaccaaaatgtggctgatcgatttaaatataaaatcaacgataacgaaaacttgttgaattatttttaatggaaattttatttaaaaaagataggtatattgtgctgccctctaatttacttgttgtaataaggaaataggcgtgttttaggaaattatgtaattcacacaaaaatgtataggttacttaggaatttattttactgtattgatatctccactaacgactgaaatctttgttaaacacccccccttatctgtgatataaaagtacgcttgaatttgtagtccgtgacagttgaccattataagcagcatgaaccagtatacaaatattaacggattctctcttttttattcagtttcgacttcagaggaaaggagccagagaagaaattaagagtcaggcaaacaaaggagctaacaaccagaacacaaaatggcatctgttgtagctgatcttccgtcttatggacctatcgcttttgatcaggtggataacaacacgaacgcgacccagctattcaaaaataatataaacaaaaccagaatgaacgatttaaaccgcgaggagacgcgattaaagaccttcaccgactggccgctggactggctggataaacgccaattggcccaaaccggcatgtacttcacacacgccggcgacaaagttaaatgctttttctgcggcgtggaaatcggttgctgggagcaggaggatcagcccgtgccggaacatcagcgatggtcgcccaactgtccactgttgcgccggcgcactaccaacaatgtgccgatcaatgccgaagcattagatcgcatcctgccgccaataagctacgatatctgcggcgccaacgactcgacgctggagatgagggagcatgcctacgcagaaggcgtcatacccatgtcgcagctaattcagtcgattggcatgaatgcagtaaatgcggcaggcagtgtaactggaaccgcagccccgcagccgagggtaacggtcgccacccatgcgtcgacggcgacacaggccactggcgatgtccagccggagacgtgtcgtccttcagccgccagtggcaattattttccccagtatcccgaatacgccatcgagacggcacgcctgcgcaccttcgaggcttggccgaggaacctgaaacagaagccccaccagctggccgaggcgggtttcttctatacaggcgttggggatcgcgtccgctgcttcagttgcggcggtggtctcatggattggaacgacaacgacgagccctgggaacagcacgctctctggctaagtcagtgccgattcgtcaagctgatgaagggtcagctctatatcgatacggtggccgccaaaccagtgctggccgaggagaaggaggagagctcttcgattggaggggtcgcggtggccagcacacaggcttcagaggaagagcagcagacatcactctcatcggaggaggccgtttcgggggatgtggctccgtccgtagctcccacggcagccacacgcatcttcaacaagatcgtcgaggcgacagcggtggctactccctcgacaaacagcagcggctccacctccatacccgaggaaaagttgtgcaagatctgctacggcgccgagtacaatacggcattcctgccatgcggtcatgtggtggcctgcgccaagtgcgcctcctctgtgacaaagtgtccgctgtgccggaagcccttcaccgatgtgatgcgcgtatatttttcttaataaccccaatgcgcacccaagtcctcaaattcaaaataaacatgtctaaaaagaaaatgtgggcggaatgtgttaattataagcgtagaaaaaaatcgtggttcaacaggcgatcgcaacggccagctgtggggatgcccggcagctggccgttggactttagaagatcacaaagcctgccagttatcgtaagcctacattgtaatattagtttagtacagcacttctatgcgttatttataataaaactaatatattaccgaaaactcatggcactcgtggcagttttttttttggcgctgcgtctatgtttctacaagtaaagggtataaaaataaaaccacttttagataagcgtagatagcgctatcaataagttctttgttttaaagagcagagctcttactatggaattgagtaaaagcttttatcagtcattggatttataaaggttggtcattatcattgcggggcccacgcctaaacaaagtgcattcaactgcattcagctgagtgacaaaacagcgttctttgttgcctttgtcaagccgtacgaatgctgaaattttaggtttttgactgcgatatttgtttttggagctcagattcggattgtagcttttttcacctcatccgataagctcgcagtgcatttcaattagtatagatatatatgtgaatccggttacggattagccaaggtgagaagtgctgcataccctgcgaacgggtaggtgcgacttatcggttgcatcacccccttatgaatatgcatatgacacatggaattgcacacgtttcagataggagactcttacataaatttaattacgaaatgccatatgaatgaaacatttgcctgagtcaccagttctaagaacataccttttgatagtagtctgaaaatatcagcgagatattataactgaaatggcatttgactattgctgatcaagtatgcaaattgctgatctagattcaattgcttgcgatcgtaaagtcatgcggtgaccttagtttgcgtgaggttttcaattaacacacgaaggtcccggcgaaaattggcttaattctatctaatcttatcttatctagtatattgaagagctttagaaataactatatgggtattatctttgtcataaaatgtgtttgagaaataggtttagaaattaatcaattcaattgtctttcatgttacaggaatattggcgaagaaatttattaaagtttgaaaataacgttcactcggagctgtcgatttcg

SEQ ID NO: 28832 - DNA, 1858 bp, DROSOPHILA
cggcattcaaacccaccagtcgacgtgagcacagttgtgtaaacattttatacagcaaaacttattttaagtgattttataatcttatcgtggtgcgataagaggtgaacgaaaacaattaacgatttggtggccgaaaaaaggcattaaaaaaaccaatgataaactgatacgttatcactgtttaaaatgtctctgtttcgacttcagaggaaaggagccagagaagaaattaagagtcaggcaaacaaaggagctaacaaccagaacacaaaatggcatctgttgtagctgatcttccgtcttatggacctatcgcttttgatcaggtggataacaacacgaacgcgacccagctattcaaaaataatataaacaaaaccagaatgaacgatttaaaccgcgaggagacgcgattaaagaccttcaccgactggccgctggactggctggataaacgccaattggcccaaaccggcatgtacttcacacacgccggcgacaaagttaaatgctttttctgcggcgtggaaatcggttgctgggagcaggaggatcagcccgtgccggaacatcagcgatggtcgcccaactgtccactgttgcgccggcgcactaccaacaatgtgccgatcaatgccgaagcattagatcgcatcctgccgccaataagctacgatatctgcggcgccaacgactcgacgctggagatgagggagcatgcctacgcagaaggcgtcatacccatgtcgcagctaattcagtcgattggcatgaatgcagtaaatgcggcaggcagtgtaactggaaccgcagccccgcagccgagggtaacggtcgccacccatgcgtcgacggcgacacaggccactggcgatgtccagccggagacgtgtcgtccttcagccgccagtggcaattattttccccagtatcccgaatacgccatcgagacggcacgcctgcgcaccttcgaggcttggccgaggaacctgaaacagaagccccaccagctggccgaggcgggtttcttctatacaggcgttggggatcgcgtccgctgcttcagttgcggcggtggtctcatggattggaacgacaacgacgagccctgggaacagcacgctctctggctaagtcagtgccgattcgtcaagctgatgaagggtcagctctatatcgatacggtggccgccaaaccagtgctggccgaggagaaggaggagagctcttcgattggaggggtcgcggtggccagcacacaggcttcagaggaagagcagcagacatcactctcatcggaggaggccgtttcgggggatgtggctccgtccgtagctcccacggcagccacacgcatcttcaacaagatcgtcgaggcgacagcggtggctactccctcgacaaacagcagcggctccacctccatacccgaggaaaagttgtgcaagatctgctacggcgccgagtacaatacggcattcctgccatgcggtcatgtggtggcctgcgccaagtgcgcctcctctgtgacaaagtgtccgctgtgccggaagcccttcaccgatgtgatgcgcgtatatttttcttaataaccccaatgcgcacccaagtcctcaaattcaaaataaacatgtctaaaaagaaaatgtgggcggaatgtgttaattataagcgtagaaaaaaatcgtggttcaacaggcgatcgcaacggccagctgtggggatgcccggcagctggccgttggactttagaagatcacaaagcctgccagttatcgtaagcctacattgtaatattagtttagtacagcacttctatgcgttatttataataaaactaatatattaccgaaaa

SEQ ID NO: 28833 - protein, 438 aa, DROSOPHILA; identical to SEQ ID NO: 12366

SEQ ID NO: 28834 - DNA, 3466 bp, DROSOPHILA
ttaactaaggcgatattgtgcctctcgctcaatctcgcaaaacgatgctttgtctgctgcttctctgtgcgtgtgtccgtctctttccacggcttttcgtcgagactcacatatacaaacggcgacacactggattggagctggactccgttttggatggcttggctttggctgcgtacccaaaataaatcgcgcttgcagtcccaaatcattttagttcttgacgcctttgttccacaaaaacttccaaccgccgtccatggctcgtgctttctctttcgctcgcgagacgctccaaaagtcgcgagtatgggaagagaatgtatccctcgctctttcacgcctagaagcggctgtagcacacacaagcacacgtaaacccagccgtatgcatatacatatattccctctactagcgagacgtgtgtacgtgcgtatgtatgtatgcttttttcacttctttctcctctgcgttctttgcaccaagtgtcgctgttgctatttgctaccgccgctcctcttgacgaataagtcgggacttgtatcagctctaattcggacttagtttacaaaatgcggctgctttttttccgcgatactcggattagtgatgtaaaaagacgttgatgcttcgaccactgaagtcagtgcgatatgtatcgataattgaatgccatcgattgctacgattaaaactgccaccgcagttagcggagacgctcaccattctctattcgccatttgaaagtatcggtgtaatttgttttcagagaaattaatttccgtttactgtgcaattcggtgtgaaagtgttcagatttatcaatgcgtattctgctttcgacttcgccaccaatctgtgctgcaagttaccattaccaggtccacctggttcccgccagttttctttcattgtggctagttgttgttcgtgccttcgataaagacgtttagaggtgtttttagagtttcgccatctggtcactatagccgtttcgttttttacgtgagtattgtgaatttggtgtgttgatttatatctcagttggagcctgcgtggaaatagtgtcagtacgtttaaaggcatcatcgtaaggttagtcggaaaacaaataaaaagcctacaaatagcaagcaagaacgctttcgcaaccacaagaaaaacgaacatacgcacgcatccatctgtggtagagtcggcttgtgtgggggtgagtggatgtgtgggtgagcatttctggaaagtgccgttctctatgtttcgattctacttatcccttcatcaccatttcatcgttgaatcatcacgaaagaaacatcgaaagtgcacaatcgtttgttatctttgtacgaaaacaacggtgatttccacacaggcataacctgcaagagtaatacgatacaaattttgatctgatatgacctcattttagtcggtttgaattttaaagagagcgactctgcaaactgcagggatatgaacatacaaaattcacaaatgattgtttgcatcctagttgcttatattcatttacacgcatgcttatatgcttacatctgttatcaataattgacgacttggtgcatgcgaagcaaacgcattgaaatgactattgggatccacacactgttaaaaaacacactgattgcactgccacacatttctcaactagaacctaatgttttatactgaacttaactgcaggaaagcccaaaatgcccagcatcaagttgcaatcttcggatgaggagatctttgacacggatatccagatcgccaagtgctccggcactatcaagaccatgctggaggactgcggcatggaggacgatgagaatgccattgtgccgttgcccaatgtgaattcgacgattcttcgcaaggtgcttacctgggctcactaccacaaggacgacccccagccaacggaggatgatgagagcaaggagaagcgcacagacgacattatctcatgggatgcagatttcctaaaagtcgaccagggcacactgtttgagctgatattggcagcgaactatctggacattaagggccttctggagctcacctgcaagactgttgcaaacatgattaagggaaagactcccgaggaaatacgcaagaccttcaacattaagaaggacttttcgcccgccgaggaggagcaggtgcgcaaggagaacgagtggtgcgaggagaagtaaagcgcggcatttcgcgggaccaacattaagttgaaacagctaggggattcgggaacgaattggatttgcagcattgcaactttacttagttgctactttcatttacatttttttttatttttaaccccagcagagactcgatttaaattgtgtataaatgatctgttgctgatttgattcgcggggttcattttttgtcgtaaatatatctcatatacatacatatgcgagattgtaacactctctttaacctattggagtaacacttgatttcactttaataaatataactacccaacacaaagacacagcctattttgtgggcttcccggaggggttagggtccaaggacttctcaaattaagaagtgctctttattcgttatcttgtgtttagaaacgtttgcaagcgtttgaaatggatacgcatgccatttatggtccagtcggtaaaattttacgtgttcccaagaaggtacatatatatcttagattatcttatctatagaaactacattcataagatcacgctttcggcgaatagcgagtaatactgtagctgccactttgccacttagtgtgcaattgaaatgcgcgccaacgcatgttctcatatgcggagcgtttagcagcccttaaaaagcttttcatgttgcttttaaaaagctacgacgggtgtggaaattagatttgtgacgctttatatatcttttttttatatcgtctggggtacagcatggttttaggattttagaagaaagcagtaattttgtaagaatcgaagaacggggggatatttataattttcatattaaccttgtctttgtttgcttttgaaattatgaatacttcgaaagataattatcttgtgcgcattccattctggcttagactgggttgagctaaaaatgatttgaaatacaaatttttaggtgtccgctgatatataaacagtatgatgtttttgcacttttttccctgaagttttccttgttgtctcgcttgccaatgctgaacaaagtagccaaaggacctttacttgaagctttgagagcggaaaatatattcggggacaattgctttaagtgtgcactaggcttggctagatgcccgtgccaaactttctttggaattgatcgctggccttagccaaaagtggaaaaaagaaaggataggatagtgccgcacgtattaagggtcttcttacaaaaggtaactgatattaattcatttgcatactaagcaagctaactcatctgttt

SEQ ID NO: 28835 - DNA, 1466 bp, DROSOPHILA
ttttacgtgagtattgtgaatttggtgtgttgatttatatctcagttggagcctgcgtggaaatagtgtcagtacgtttaaaggcatcatcgtaaggttagtcggaaaacaaataaaaagcctacaaatagcaagcaagaacgctttcgcaaccacaagaaaaacgaacatacgcacgcatccatctgtggtagagtcggcttgtgtgggggtgagtggatgtgtgggtgagcatttctggaaagtgccgttctctatgtttcgattctacttatcccttcatcaccatttcatcgttgaatcatcacgaaagaaacatcgaaagtgcacaatcgtttgttatctttgtacgaaaacaacggtgatttccacacaggcataacctgcaagagtaatacgatacaaattttgatctgatatgacctcattttagtcggtttgaattttaaagagagcgactctgcaaactgcagggatatgaacatacaaaattcacaaatgattgtttgcatcctagttgcttatattcatttacacgcatgcttatatgcttacatctgttatcaataattgacgacttggtgcatgcgaagcaaacgcattgaaatgactattgggatccacacactgttaaaaaacacactgattgcactgccacacatttctcaactagaacctaatgttttatactgaacttaactgcaggaaagcccaaaatgcccagcatcaagttgcaatcttcggatgaggagatctttgacacggatatccagatcgccaagtgctccggcactatcaagaccatgctggaggactgcggcatggaggacgatgagaatgccattgtgccgttgcccaatgtgaattcgacgattcttcgcaaggtgcttacctgggctcactaccacaaggacgacccccagccaacggaggatgatgagagcaaggagaagcgcacagacgacattatctcatgggatgcagatttcctaaaagtcgaccagggcacactgtttgagctgatattggcagcgaactatctggacattaagggccttctggagctcacctgcaagactgttgcaaacatgattaagggaaagactcccgaggaaatacgcaagaccttcaacattaagaaggacttttcgcccgccgaggaggagcaggtgcgcaaggagaacgagtggtgcgaggagaagtaaagcgcggcatttcgcgggaccaacattaagttgaaacagctaggggattcgggaacgaattggatttgcagcattgcaactttacttagttgctactttcatttacatttttttttatttttaaccccagcagagactcgatttaaattgtgtataaatgatctgttgctgatttgattcgcggggttcattttttgtcgtaaatatatctcatatacatacatatgcgagattgtaacactctctttaacctattggagt

SEQ ID NO: 28836 - protein, 162 aa, DROSOPHILA; identical to SEQ ID NO: 26646

SEQ ID NO: 28837 - DNA, 4854 bp, DROSOPHILA
cattggttgggaagactatgttttgggaacgtggggtaaaaactatttgctcattgtgtccaatttatactaaccagtatacatatttgcactttcctacgtaataatgcatgaattggataatcttcaaattttttttacattcataagaacagacgtcagtttatatgtaattccagtttagttaaaacttgtcttacccatatcttgcactaattccgaattcgagaccactgttcgttcctcacctgtcttgccgccattacatggtctgcgcgtctctctccctccgagtcctgctctctcactcccactcgtgtagcagagcaggtctattaggctgattgccgcttcgttttttgttggtttcgactggctttcgggcaagagaatgattatggccaaggcgatgatgtggttcactagccggctgcatcattaaattattattgcgggcatgtattttccagagagctgcaaaagcctaaaaaattgtaaatcgcgtgtctaatgctccattcgagatgcccgccggttcttgaacgccggtttgtttctttctgtccatctttccatccttccttcctacctcttttatttatttttttttttttggcctaatgtggcttaattatacaacaacaatatggttactgttttgcagcaaacaaagagctcggcgaacggccatcaaatccttgtcaagagtcccagtccccccatgatcggtggtcggtgatcggtgctcggttcaccggctatcaaaaggagatggatatgcgacctgagtttctttcttgagaaaacgcagctcgataatttaatgcaccttttcctctccagatttcctgagttctttcttttccgtctgccacctttgtcttggggacctggttcttgttttttcctgccgcgctgccttgtctaaaattccacaaattcataaatgttgatctggttcgtcatcgtcatcaaagtcggcatttctcgctgatagacaatggacaaaaaaacgaaggagcgctgtgtcgagggcctcgactacctgataccggtgatcgaaaagagcgacatccgttgacatttagcatttcataaagtcgttttccatcgcacacatgcgacgcaatgatctacttaaattaaaaggaaccttttaggtacggcgtaagagttttcgcgtacacacacacatttattcacattcacattcacatttattataagacaacgtcaagaataaacacatttcagacttcttcgattagttggaggcgagtcaagtggaggaaacgtggcttcctatgaagttattagattgcatggctggcaattgacaattaattgccatcgacggctgctaatggaaatggaatgagctcgcaactcgcaactaagaaactggcggcattttcgccatgtgtgaagtctgacgcaagttttcacaccaaacaaagcaacttgtgagattagtaatgaaaaatatacaagaaaagatttaaagaacatccgcacacaaaaattacaccttaaagtttgtgtgaaaaaaacaaatcatcgactttttccaggcataaagaattcgtgaagataaaattattttttttccaaatactttgctaacataattagcaaaataattcccaccatcaacttgtttttcagatcgcaaatcagtaaatccagaatcattaccattacacaatctaatttggcaattttagctaatttaataccagacattagccggtgtaggcaaactgcaattgtgtaattttgctaatagcaaacatttgttagaacgcttgcgtgtcggcaaacatcaaaggaaggctaagtttttattgcatttttattagataaaataatagacctcaatcaacatacaagagtgtgaaccgaaatacgaattgtttagaatcgaactttgtatttaaaggagtagctaagagttcttcagaatattgtttcacttattttttcagaatcacattactcattattatatctcgttctattttttgcagattgccaaactggtgccactaatagaatccggctgctcgcgtcgcgcccgctttttgctctgctcgtctctgtttccgctgtgcacgccggatgtgccacgccccgttgccgcctgcaaattgctgtgcgagactgttaggggcgagtgtatggaaaacgctccgccggaactgatggagctgtggccttcgttccttaactgcgacggactgccgcagccggagaagcacgagttgtgcatgcagattccacaggaggtggctgtgccaggcgggagtccaagtggtccgcccaccactggttcacctggcgtcgaagatcacccgcagacgtaccgcttttggaaaagcggagcatctcccacctctgacttggctggcgtcttgtgcccgcaaaactttagcggcagtccctttaatccggaggagtgcgtgccccagtgtcagcgggacgccttccacacgagctctcagaagaagacgtctgagaccctcattctaggcctctcggccgtctgcttcgtcctgacactgttcgccttggtgaccttctgggcggagcccaccaggtttggctaccccgagagaccagtgctcttcctgtgcctgtgctacaacctcttcagcgtgtgctatctggagcgaatcgtgttccacaatcaagcaaggatgcatgacgtcgagctgcaatggcggctgatgcgaccgggttgcttgctgacgcccccttgcctggcctcctacataaccacctcctatttaagcctgtgtgcagccagctggtggctgatatttgccctgtgcttctacctgtcctcccacaaaaagtggtccagcgaggcgctggaaaagaggtccgggctgttccacgttctggcctgggtgccaccgctggcgccccccattgccgccctgctgctggagaaggtgcgtccgagtgagctgactgggatgtgctacgcaccgggatttgtggagctgccagcactggtcctgctcctgcttgggctgtacttcaccctgagagcctccaggtctctgctctccctgcagcaacagttgcagcccaccctggcccaccaccgattcgggcagatccggaagcgctttgtgctcttctccctgctgtacttcgcacccacgaccgccggcgtcgtggcggctctttgcgagcggtacgcggattcagtgcccagctgctccacacccgatgactgcctctcacccactccgctcagtgcctggccagcgttggtccggatcttcttccagctggtgggcggaacgttgacagggttgtgggtgtggtcgcgcaaaacctgcgagagctacagaaatcggctgggtgccagcggcacacccacctcatccctgatgaatcaaagcaaggcggccggggctttgcccaaaaagcatttgtatacgagtgggaaatccatgctgcccacggggggaatcactcctctatatgctggtattagttttcacaatgtgcccgtctacaaccccaaccaatcgagagtttaggggatcttttagcccacatggggggctctagaaaaatctcgaactctactattgtacatataacatatacatacatcatagaaggctttgagccgcggtgagagaacatgatcgaacatacgcctagtttttaagcccgaaaaggagaaactgaaatgtgttaatagctttatagatcgcgctcccccaagtacccatcacctccagtttttattagtagttctctagctagtcctaagcctgtaaatagtaaaacgttttattcatagtagaatgaattgtaaataaattatatgaatcaaaaatgaatgtcgttcaaagtgggctccaaatgcattaggaactcaagataagcaagataaccactgcgcgttctcacggcatctccgtcagccacaaggctcaacacttcgcaagccccatttactatatgtgggttaatgatgcaaaagttgtcgctgcaatgagctaagggatggatggtgggtaggaattccgacggatcgcttaattgcaacaaaatggctaatttagttatgctattgtctgcgctccgagccgtggcaattagaaggaaaatgcttaatgacagatctcgacgttggttgccatcggttgccgactggttatgctccgccgcacctccacctgtggctctgcgtattctttcccctgtatatgtttgtacattttgcggacactccaactctttcgtatgccattcaagtaccacctgtattcggaccaagcgaaatatggtggacctaaaattatcaaacatggtggtcatgtttataaatgagtaaattacctaaaaactaagattgttttttttacttagatgggatgtgacaccctaacacccgattctttagcacagacactttccctgctctctggatgtttgggctgcgtcagaacacgggtaattggtatcaaccgaggcacaattaatttgattgaagctgccacaccgcatgccgctccaacgaacaacgaatccatcctacaaattgccggccgtcgtggcaggcaacaagccgaaacactgcggcaacatcggcacaatagcaacagcaactgtgcagcaagcgtgcaattaactcttgtgcgccaagatcaaagcgattaatgcggccccaagttcccagacgaagggacggaggccagggcatttggagcagcgaagggcaaggaacggaaaccaagacagagacgagatgaggcgggcgtggatgggggaaaggtattccaagcctggtctggcttggtctgtatcgtcattttcattctcgtcttt

SEQ ID NO: 28838 - DNA, 1881 bp, DROSOPHILA
atggacaaaaaaacgaaggagcgctgtgtcgagggcctcgactacctgataccgattgccaaactggtgccactaatagaatccggctgctcgcgtcgcgcccgctttttgctctgctcgtctctgtttccgctgtgcacgccggatgtgccacgccccgttgccgcctgcaaattgctgtgcgagactgttaggggcgagtgtatggaaaacgctccgccggaactgatggagctgtggccttcgttccttaactgcgacggactgccgcagccggagaagcacgagttgtgcatgcagattccacaggaggtggctgtgccaggcgggagtccaagtggtccgcccaccactggttcacctggcgtcgaagatcacccgcagacgtaccgcttttggaaaagcggagcatctcccacctctgacttggctggcgtcttgtgcccgcaaaactttagcggcagtccctttaatccggaggagtgcgtgccccagtgtcagcgggacgccttccacacgagctctcagaagaagacgtctgagaccctcattctaggcctctcggccgtctgcttcgtcctgacactgttcgccttggtgaccttctgggcggagcccaccaggtttggctaccccgagagaccagtgctcttcctgtgcctgtgctacaacctcttcagcgtgtgctatctggagcgaatcgtgttccacaatcaagcaaggatgcatgacgtcgagctgcaatggcggctgatgcgaccgggttgcttgctgacgcccccttgcctggcctcctacataaccacctcctatttaagcctgtgtgcagccagctggtggctgatatttgccctgtgcttctacctgtcctcccacaaaaagtggtccagcgaggcgctggaaaagaggtccgggctgttccacgttctggcctgggtgccaccgctggcgccccccattgccgccctgctgctggagaaggtgcgtccgagtgagctgactgggatgtgctacgcaccgggatttgtggagctgccagcactggtcctgctcctgcttgggctgtacttcaccctgagagcctccaggtctctgctctccctgcagcaacagttgcagcccaccctggcccaccaccgattcgggcagatccggaagcgctttgtgctcttctccctgctgtacttcgcacccacgaccgccggcgtcgtggcggctctttgcgagcggtacgcggattcagtgcccagctgctccacacccgatgactgcctctcacccactccgctcagtgcctggccagcgttggtccggatcttcttccagctggtgggcggaacgttgacagggttgtgggtgtggtcgcgcaaaacctgcgagagctacagaaatcggctgggtgccagcggcacacccacctcatccctgatgaatcaaagcaaggcggccggggctttgcccaaaaagcatttgtatacgagtgggaaatccatgctgcccacggggggaatcactcctctatatgctggtattagttttcacaatgtgcccgtctacaaccccaaccaatcgagagtttaggggatcttttagcccacatggggggctctagaaaaatctcgaactctactattgtacatataacatatacatacatcatagaaggctttgagccgcggtgagagaacatgatcgaacatacgcctagtttttaagcccgaaaaggagaaactgaaatgtgttaatagctttatagatcgcgctcccccaagtacccatcacctccagtttttattagtagttctctagctagtcctaagcctgtaaatagtaaaacgttttattcatagtagaatgaattgtaaataaattatatgaatc

SEQ ID NO: 28839 - protein, 526 aa, DROSOPHILA
MDKKTKERCVEGLDYLIPIAKLVPLIESGCSRRARFLLCSSLFPLCTPDVPRPVAACKLLCETVRGECMENAPPELMELWPSFLNCDGLPQPEKHELCMQIPQEVAVPGGSPSGPPTTGSPGVEDHPQTYRFWKSGASPTSDLAGVLCPQNFSGSPFNPEECVPQCQRDAFHTSSQKKTSETLILGLSAVCFVLTLFALVTFWAEPTRFGYPERPVLFLCLCYNLFSVCYLERIVFHNQARMHDVELQWRLMRPGCLLTPPCLASYITTSYLSLCAASWWLIFALCFYLSSHKKWSSEALEKRSGLFHVLAWVPPLAPPIAALLLEKVRPSELTGMCYAPGFVELPALVLLLLGLYFTLRASRSLLSLQQQLQPTLAHHRFGQIRKRFVLFSLLYFAPTTAGVVAALCERYADSVPSCSTPDDCLSPTPLSAWPALVRIFFQLVGGTLTGLWVWSRKTCESYRNRLGASGTPTSSLMNQSKAAGALPKKHLYTSGKSMLPTGGITPLYAGISFHNVPVYNPNQSRV

SEQ ID NO: 28840 - DNA, 3450 bp, DROSOPHILA
cgctttcgattccagcacaccaaaccattggtggactgtcagctgagcatctctcccagtaacacttttcttgtcgagttggacgctcctttaagagctattacaccaggacaatatgccgtattctatgacgacacagcttgtttgggttcggcccgcatcctcagcgctaatcccctaaagaaaaaaaacgcacagacgcagcaagctcaagccgcaaatctggttagctaatgatgtttcctctgagccagaaaataaaccaaatgtaagaaggcagtccaactgccaacacggcatgtatagatagcatggtaaatacgttttcataaatttaagcgccgagtaaattttagacgtgaatcgacacttttaattccatggtaaacactttaatttaaatttattattctaggtcaaatttacaattagtttttgaaaaaggacattttgcattttgtggtcctgggagcaatgataaagttattaacacacaatcgtacataaatagggtttggtaaaatcttaaactaagtgtacacgtgaggtctcgcgatataaaactagcttagcacataatatgattgagcagggatgtgtcggtagcaggtagaatagaaagcggcgtggattaggctaacagcaccgtgagggagtccagaaagcgtgtgaggtcgctctgccgcagctgcaccaccgctggctcgaaaaagtcctgcaatagagcgactccactcttttgcgccgcctgctcgaaggccttgccaaagaagtttcgcggagagtcttcccttaccgggacaatgcctaccagcaagcacatgccctccgaagcgttcaggggacaacttgcgatcaacggcaagtccgaagcctgcctggctctactcgtggccacatgtccgcgcaaaagaaagcgagccaacagtccaagggcataggggtatgagaagaacgcgtgttcctcctgcagaacgtagtagaaaaaggagcccgctgaatgaacttggcgtgcctccaagctgctctgcacctgccgaaagacagcagcatgcaaaagcttcgcctggtcgatgcctgcagacagcagctgcttgtgctgacgactcaaagcatccgaggcctccagaaagcaatcctccggagtcttgtgcttcttcacggactccatgatggcgagcagggcataaacgtagtccgccgcagcatatctgctgcggtagccgtagctcagcgtaaaggtgccgtaaactatgtccgctatgtcgtacttctccgccaggcgctccaccatcgagaagaactccttgcgcaacaccaaatccatggctccgtacgtttggcgggcgtgcaccaagggaagtcccatctcgagcagcagctcgtgtaatctcttctctccgcgcagtgtccacagcttcagctggcatgaggagtagcgggaatacctacgattatactacatgattaaatggcatagaatacactgtcaatgctcacctcatggattccgtgacgggccagtggcggtacaagaccagatgcaaatcattctcgaaggttatcttggaggcactcatcgtgttctgatcattcgttttgttcgtcagtcgggacacatgcgactggatttgctccagctccaaagtatacgctccactctcgatcttgcccagcagcagctgctccgtgatgcccacaatggcccaccagagcaggtccatgttgtcttttgagagcttccaggccaactcaaaaaccatcaaagcggcggacctgccgtagtagctgaactgcgtgtactcgaacataatcctgtcgcgctcagactcccactgtcggcgggctcgctgcttcaggatgcgttgctcgtgccgctccaggcgactgagcttacggctccttggcgcctgatcctcctggtccgattccccggcaccactgtcgtcgtgctgctgttccgtgtcagaggactcgtcctcatcctcgtcttcaccttcagagtcatagaaaattgtctcgaacgctggaatattctcctccaaggaggcatcccccaagatgcacacctgccgatcgctgtagatgttacacacatccaacgggcgatgtgaatcgcatatgaagaaggtcacgtcgtccgacggctgcaggagctccacaatatctacacagccgccgcagttcaccaacaccacgtacttaacgtcgccctggtgctctccataggcccgcttcagacccgtaacgcccattatgggcaccacggtgtacagcatgtgatcgtacttgaacaaggcctgcaggatgcgactggcgcagatggcatcgatgtcgtagttgaccacgatcaagatgcgcttgccaaccagctggcggtaaaagtcgttgcgcagatcctggacaaacatggtgaacacttctggcgggaatcccaatcgtctgcctaatctgtctacgtctagacacaacggtctctttccaatcgcttacgatgcaaagtagaattctacatgagtgcagtgcgttgcattttgagggtttccctgcggcttgcgctattttccagcttcccactgccgctccacttttgcttttctggcaatcgcaattggcgaatcaaaaacgcgggaaacagctggcttagccagtgtgaccagtgtgaaataatggaatggcgcggaaatacaatcgttgctgggaaaagaatattctgcgaatttccagaaattttgagctgccaaaaaccgaaattataatcacataatgttgaattttgagagctctttgcagttgctgctattgcagtaggagcaatatcttggcgctccagatacggtcacaccgcgacgcccatgtgttttgaattgccacaaaaacgaaagtctaccagtcgaccagctttgtgcgacaaaagcctcagaatatgagcagggacaacaagatgaagcacctgacccagcgggccatctcctcacgcatgaactacctgttccaggcctcgaatttaatggcagtaggcaatcaaccaaaattggccgcctattatggcaaactctgccgcaatgtgggcaccaaggctatcatgcacatgtaagtggcttctccagtggagtatgggcaaataattcatggcgtcaactggtttcaagggccccggccgtgaagcgttccctgtgcaggcgctgtttccttcccctgattcccggagtgaatacggagctgcatgtggaggaaggagcacaggaggccaagactgatgcacaagctcaatcgaacggagcagtcaaaacgaagaaaaagcgccatcgcaggcagcgcaagaagcccagaagccggaaaacagggaacaccaaccaggaggaatccgaggagcaaatccaagaaagtactgaacaggtctcttttttcttagagtgctcactctgctgcggccggcgaagctttgcg

SEQ ID NO: 28841 - DNA, 936 bp, DROSOPHILA
atgaacttggcgtgcctccaagctgctctgcacctgccgaaagacagcagcatgcaaaagcttcgcctggtcgatgcctgcagacagcagctgcttgtgctgacgactcaaagcatccgaggcctccagaaagcaatcctccggagtcttgtgcttcttcacggactccatgatggcgagcagggcataaacgtagtccgccgcagcatatctgctgcggtagccgtagctcagcgtaaaggtgccgtaaactatgtccgctatgtcgtacttctccgccaggcgctccaccatcgagaagaactccttgcgcaacaccaaatccatggctccgtacgtttggcgggcgtgcaccaagggaagtcccatctcgagcagcagctcgtactcccactgtcggcgggctcgctgcttcaggatgcgttgctcgtgccgctccaggcgactgagcttacggctccttggcgcctgatcctcctggtccgattccccggcaccactgtcgtcgtgctgctgttccgtgtcagaggactcgtcctcatcctcgtcttcaccttcagagtcatagaaaattgtctcgaacgctggaatattctcctccaaggaggcatcccccaagatgcacacctgccgatcgctgagctccacaatatctacacagccgccgcagttcaccaacaccacgtacttaacgtcgccctggtgctctccataggcccgcttcagacccgtaacgcccattatgggcaccacggtgtacagcatgtgatcgtacttgaacaaggcctgcaggatgcgactggcgcagatggcatcgatgtcgtagttgaccacgatcaagatgcgcttgccaaccagctggcggtaaaagtcgttgcgcagatcctggacaaacatggtgaacacttctggcgggaatcccaatcgtctgcctaa

SEQ ID NO: 28842 - protein, 311 aa, DROSOPHILA
MNLACLQAALHLPKDSSMQKLRLVDACRQQLLVLTTQSIRGLQKAILRSLVLLHGLHDGEQGINVVRRSISAAVAVAQRKGAVNYVRYVVLLRQALHHREELLAQHQIHGSVRLAGVHQGKSHLEQQLVLPLSAGSLLQDALLVPLQATELTAPWRLILLVRFPGTTVVVLLFRVRGLVLILVFTFRVIENCLERWNILLQGGIPQDAHLPIAELHNIYTAAAVHQHHVLNVALVLSIGPLQTRNAHYGHHGVQHVIVLEQGLQDATGADGIDVVVDHDQDALANQLAVKVVAQILDKHGEHFWRESQSSA

SEQ ID NO: 28843 - DNA, 4712 bp, DROSOPHILA
ggtgacacgaatgaggacaagcaaggccaccgtcaaacgcccgttatgggatacttgtcattgtggtgcacttttctgggccctcactcggaagccgctcacctgaacgccgggtaggaaatgggtaacagcttattgcataacccacaagcaggccaatgttgcccgggcgggattaggccagagacatagatgccgagaagccagcgcagcactgaaccagccaaatcgtgctataaaaaaaaaccctatgctgctttgtcacggaatagaaggagtcttgcaaagattccagaggtttaattgcgctcaagaccctctatgtacacatatttttccacagttgtcactgtgttcatattttcccctttaatcttcgccattcctgcgctgcttttgctgacttcattgcgagatgctttcgacgcaatcaagttgataaggaaaacggggaggcggcggtaagtgtggggcggggggtagcaagaccaaggcgtatagttccctctactgcattggcaaactttttcccaccaagagattttcataaactgcgaattcagtcaagtaaaatatgccatatattccatatatgtgtgtgagtgcgcttttagttcatatgtgtgtatcgcacgcacacccacccacacacacgcaaacgcacgtatgcaactgggttgacaagttgaaacatgatccaattcattaaatgaaaattatattttatgattcaaattgcatttccaaggcatcctgcacttgcgtgagtgagtgtgtgtgaagcgtggagtgtgcgtacatatacgtgtattgccctacactgaaaaaaaaaactgttcctagccattttgatcgattcggttcccccacacgacaaatctaactaaacacacccaattcgcatgtcgaacgcattgcaagaaccgattctagccagcagaccacccctaagagcccctccagctaagaagaaccgagtaagggcaaggatagtcccaaatcaaaggaagtccgcgaagaaagtccagcgatccgaccaccagaaggcagcgggactccagcgccttctttgggctccactcctctccactgcagcgggaagtaagccacaaaccggactgcagcaccgaccgcccaaaccgcgcaggaacagaccgccgagggagaggcctgatgcactggttatcatcccatcagctggcttaccgtacagcgaaatgctgtcgctggtcacaagaggccaagacgccatgctcagggtcatctgagaaaacgtaaaaagggttaagaggacggccaaaggtgaactgctccccgaactacgtgcctctgcccaagacttgacacagaagctcaagtggacatgggagcggtgcttcgagaccgcgccagccttcgcgcggtaacacaatcaaaagtatttttgattcgcgaccttgacgagcttactactgaagacgaactgaggtgggcctggagtcccagacagagatcacagcagcagtgttggcaatcaagagcctctgacaaacgcagtatggagggaagactgctgaaatagcagttccagccaatctggcggaaccgctgatcacgctgatcactgacagcggatgctagaggccggacccaggttcaggtggtggagactcagcgaggaatacactgccagtgaccacttggccatcatttgcgacctaggatgcccttcctcgacccaagcccagacagcagccctagccatgatgaaatacaaaaaaacatgcaaagaacatcgacgggcattcgtcatcgcaggtgcataaaagttcatgctttttgtcgaaatactctgcagtatgccgatttgccacgaaaggagagacggataaataacggatgagggcgaaaacgtgcaatcagaagtggctcttctctaacacacacacacacacacacatcttcactcgaaaaaaaatggagttgctgttgtttcctatttcgaatgtttgttatggaaggataaataacagatgagggagaaaagaaagcgtgacacacacacgcaccttaaaaaaaaatggagttcttgttgtttcacaacttatacactttacttcacaactgttagcgacttattattattaagtgggtttgtaggtgtactgcgacccagtcggctctattgtactactaccccttcatgactcaacgatccccctgaagtccaatgcactgtataaatgccagaattttattgtggttcaggggattctgtttctcttgatggccaagcgccatccatgcagcagaagcgacagagttcacttctgcaatgccaatttgtacaaatggctgtgaagccggcaatgccccgtaagaatgccgagtcaaaatgcgcacggtgtctagtcccgtgtgcgactagaatgcgagcataattctcaaaaactgcatcatgcccatttgcggaaaaaaacagaaaaaaagagacggatagataacggatgagggggaaaacgtgcactcagaagtgactcctcccacatacacaacacacacagtgttcactcgaaaaaatggagtttcggtcgtaaaaatggagtttcgctcctttcccatttctacagtttggtgagaaaatattacggttaaattactgacctaccttaactcgaaaaaatggaattcctgttgtttcccagttcgaatgtttgtcgaggaaagataacggataaaattacgcacgcaccgttactcgaaaaaaatggcgtttttgctgtttcccctttcgacacgcgcaaatccacaatgcgcggagctttgcttcatggcccgactgaatgaactgaactgacagcgcattaaacgccggtattattagtgtgaccaccgatgcgatagtttataataccatggtatacccaaaataaataccaaaaactaacggaaagcacatcaactgtttctgccgcataaacaaaaactgctgttcgtctaacgtgaaacacataactttgaaattattgctttgccaacaccgcccaatgattcgcaacgtagtggtgggcgtgtcgggcggcgtggacagcgccgtttccgcccacctgctggcggagcaaggattcaaggtgctgggtgtgtttatgcgcaactgggatgaggcggacgaagtgggtcgctgcagtggggaggcggatctgaaggacgccgagtgggcgtgccggcagctcggcgtggagctgcgtcaggtgaactatgtgcgcgagtactggacggcggtgttcagccagtttctggacgattaccaaatgggcttgacaccaaatccggacatcctgtgcaatcgccacattaagtttgacctctttcacaagcacgccttggaaaatctcggctacgatgccgtggccacgggtcactacgcccggaatagtctgggcaactacctggaggggattgcctccaacaacgacgcccgcttgctaatacccgccgatacgttcaaggaccagacattctttttggcaggtatttcccgaaaggctctgcaacgcacgatgttccctttgggagacttccagaagagccaggtcaaggacttggccaagaagattggcttccagcgactggccaaaaagaaggaaagcactggcatttgtttcgttggcaaacgcaacttcaaggacttcatacaggaggtaaagcacttgccgcgattgaaaaagcacatggctcaatttccttgatttcaccacggactcaaatctggtttccctccactttcagtacatcacttccaaacgtggtcccttcctagacatcgacagtggagccgttgtcggccaccacgagggcatccatcaatggactgtgggccagcggtgccgtctgagctcattccttcagccctattttgtggccaggaaagaggccgcaagcaataccatctatgtggcatctggccacaaccatcccgcccttctcagcacccacatagccgtcgatccgcccaactggctgtgttccaagtcccaacagattctttcggacactggcagcttgaggtgtcgctttcgattccagcacaccaaaccattggtggactgtcagctgagcatctctcccagtaacacttttcttgtcgagttggacgctcctttaagagctattacaccaggacaatatgccgtattctatgacgacacagcttgtttgggttcggcccgcatcctcagcgctaatcccctaaagaaaaaaaacgcacagacgcagcaagctcaagccgcaaatctggttagctaatgatgtttcctctgagccagaaaataaaccaaatgtaagaaggcagtccaactgccaacacggcatgtatagatagcatggtaaatacgttttcataaatttaagcgccgagtaaattttagacgtgaatcgacacttttaattccatggtaaacactttaatttaaatttattattctaggtcaaatttacaattagtttttgaaaaaggacattttgcattttgtggtcctgggagcaatgataaagttattaacacacaatcgtacataaatagggtttggtaaaatcttaaactaagtgtacacgtgaggtctcgcgatataaaactagcttagcacataatatgattgagcagggatgtgtcggtagcaggtagaatagaaagcggcgtggattaggctaacagcaccgtgagggagtccaga

SEQ ID NO: 28844 - DNA, 846 bp, DROSOPHILA
atgtgctttttcaatcgcggcaagtgctttacctcctgtatgaagtccttgaagttgcgtttgccaacgaaacaaatgccagtgctttccttctttttggccagtcgctggaagccaatcttcttggccaagtccttgacctggctcttctggaagtctcccaaagggaacatcgtagttgcccagactattccgggcgtagtgacccgtggccacggcatcgtagccgagattttccaaggcgtgcttgtgaaagaggtcaaacttaatgtggcgattgcacaggatgtccggatttggtgtcaagcccatttggtaatcgtccagaaactggctgaacaccgccgtccagtactcgcgcacatagttcacctgacgcagctccacgccgagctgccggcacgcccactcggcgtccttcagatccgcctccccactgcagcgacccacttcgtccgcctcatcccagttgcgcataaacacacccagcaccttgaatccttgctccgccagcaggtgggcggaaacggcgctgtccacgccgcccgacacgcccaccactacgttgcgaatcattgggcgatgaccctgagcatggcgtcttggcctcttgtgaccagcgacagcatttcgctgtacggtaagccagctgatgggatgataaccagtgcatcaggcctctccctcggcggtctgttcctgcgcggtttgggcggtcggtgctgcagtccggtttgtggcttacttcccgctgcagtggagaggagtggagcccaaagaaggcgctggagtcccgctgccttctggtggtcggatcgctggactttcttcgcggacttcctttga

SEQ ID NO: 28845 - protein, 281 aa, DROSOPHILA
MCFFNRGKCFTSCMKSLKLRLPTKQMPVLSFFLASRWKPIFLAKSLTWLFWKSPKGNIVVAQTIPGVVTRGHGIVAEIFQGVLVKEVKLNVAIAQDVRIWCQAHLVIVQKLAEHRRPVLAHIVHLTQLHAELPARPLGVLQIRLPTAATHFVRLIPVAHKHTQHLESLLRQQVGGNGAVHAARHAHHYVANHWAMTLSMASWPLVTSDSISLYGKPADGMITSASGLSLGGLFLRGLGGRCCSPVCGLLPAAVERSGAQRRRWSPAAFWWSDRWTFFADFL

SEQ ID NO: 28846 - DNA, 2556 bp, DROSOPHILA
tcttcggcaggcgagcacatttgcttgtgtgcgactatgccccgactatgtagaagtccaggaggagcagggcaatctcctgaagtacccccaagtttggcttagggacaactgtcagtgtgccgagtgcttccacgccgccacaagagcaagaaaaagtcactgggatcgtggcccgctgaatataccagtgtcccaagtggcctacaacaaggagaggaaacagttggagatcatctggcaggacaagcacaggagcaccttcgatctaggctggctgagggaaagggactttggagagactggcagaaagcattacttggaggaggtctacaagccacccgctcaactctggggaaaaacggagttcgaggatgtgaaaagagaattccaatacgaggatgtgctggagcaagatgcagccctgagagtttggcttgaggcactggcagtccaaggattcgccattctgaaaggggcacccaacgacataaatgtggctaagaaattggccgaacgaattggctacataaaacgcaccacctacgggtaaatattaaccaatagatgacatacttcatcgtacagtaccagggtcataaaactcacatttgccgagagctgtattatctatcagtccactaaatattatcactatcggttgattgttacagccagaatcaggcaaatattttcaaccaggtgtccatttgtactcatgataaagatttgattaccacttactcacgctagatactactacagaatatgctagccacatttcataaattaaaagggaaaacaccttagttgcattactcaagttcagctataaattatctactatcccgcctcccctagcgacgttttcgaggttaaatccaaaccaaatgcgcgcaactacgcctatctaatgactcccctgccgcttcataccgacatgccctactacgagtacaaggcgggcatcaacatcctgcacaccctcgtccagtcggagtcaaagggtggagcaaatacgctgacagatggcttcaacgtggcctcgcagttgcaaaaactgcatccggaggacttcgaggtgctcaagtcggtgcccgttaactggtttgacatcggacacgacggcgatgactccaagcccttccacagtctctggagagcgccagtaatttgtttggatgtggatggccggttcgcgaggatcaaccagaacaccactaagcgggacagccggttctccgtttccctggcgcaggccgtgtcctggtacaaagcctacgataagttccttgagatcgcccagtccgaggcggtggagttcaagacccaagccggcgatgtgttcgtcttcaacaacctgcgaatgttgcacggaagaacggcttacgaggatgcgccgggcaacaagcgtcatttggtgggcgcctacgtcgactgggacattatttactccaagctgcgaaccctgaagttcccaaatgccaaggattgactgagggaatgttgtgagatttagttgaaatgtaactgtgaattaaatggtttttttttacacatggcacagcgaataaattttgggaggtgtataaatattgtgtctcaacttgcaaatgaatttcacttgaaacgtgtttgaatcctacgatgaacggcgccgatactatcgatacaagcccagtggtcgagcacttctcgatactgccgtggttgagtaactccgctctggcatcgcgataacatcgatataactgccacctctagcataatatatgtactacatttatacaaatataaatataatggaaatatgagaatttaaccaaacaccgcccgaaatatgagatcctccgagcacagatcctagcaatcgatctcctcataaagtgagtgagtcgcaagagacgaagggagcgagagagagaaaggagcacttaaattgcacattcgctgctgtttgtccgccgcgatgctgccctacaatgtgcgaaacgccggtggcggaagcgttggcggaatcctgcggcgcacgggccaaggttcgggcaccggaagcacgattcttggcaatggaaacagtccgggagcactaggagccggaaaagtgtcctccagcctggaaaaccacagacaaccgccgttggaactcctcgtgtttggctacgcctgcaagattttccgcgatgacgagaaggcgcgggaaatggaccacggcaagcagttgattccctggatgggcgatgtaaatctcaagattgacaggttaataattgggactaacccgagcaataattatacgattaatcagtacgcacaccactgccacaaacacacacacacagccacatacccaccaatgtcgtgtcccgttaggaccacactcccacacacagcagcggtcaaattgttagcagagtcagatacatacatatatgtaggtattgtgatcgatggtattgtgattatggcgttagaagaccgagcttgtcgctatttatagccctattttgcataatctaaacagaactgaattaatttctatttgataaaatcgag

SEQ ID NO: 28847 - DNA, 556 bp, DROSOPHILA
gtaaaaaaaaaccatttaattcacagttacatttcaactaaatctcacaacattccctcagtcaatccttggcatttgggaacttcagggttcgcagcttggagtaaataatgtcccagtcgacgtaggcgcccaccaaatgacgcttgttgcccggcgcatcctcgtaagccgttcttccgtgcaacattcgcaggttgttgaagacgaacacatcgccggcttgggtcttgaactccaccgcctcggactgggcgatctcaaggaacttatcgtaggctttgtaccaggacacggcctgcgccagggaaacggagaaccggctgtcccgcttagtggtgttctggttgatcctcgcgaaccggccatccacatccaaacaaattactggcgctctccagagactgtggaagggcttggagtcatcgccgtcgtgtccgatgtcaaaccagttaacgggcaccgacttgagcacctcgaagtcctccggatgcagtttttgcaactgcgaggccacgttgaagccatctgtcagcgtatttgctccaccctttga

SEQ ID NO: 28848 - protein, 138 aa, DROSOPHILA
MTLVARRILVSRSSVQHSQVVEDEHIAGLGLELHRLGLGDLKELIVGFVPGHGLRQGNGEPAVPLSGVLVDPREPAIHIQTNYWRSPETVEGLGVIAVVSDVKPVNGHRLEHLEVLRMQFLQLRGHVEAICQRICSTL

SEQ ID NO: 28849 - DNA, 2288 bp, DROSOPHILA
tcgtagcttagggaaatggccgatttcggtgtgggcagcggcgatgtggtgtccacatcctcgtcgtcgttctcctgcgagtcctccggttctcccaatgcgtggacaaactcgtagaagtcaatgcgcccgtcgccgtccacgtccacctccttgatcatgtcctcaactagatgtgcgatgtgggattacgaaacaatacacttgcaacgacgatatgggcacttactgtcctcctcgtcgagatcctcgcccagacactgcagcacggctcgcaagtcagaggctgttatgtatccccggttgtgcttgtcgaagacgcggaaggcgtcgcgtagttcccgctcctcctgatcggcggaggatagacctgacttatcctcgtacgtcatgtttgacaggatatcaacgaactcctcaaaactgacgttcccgtcccctgaaagccattgcataatgaggattttttgatgatttataaatcattataaaataaggttagtaagtcaaactttgttggtaacagttcctcgttctcaactgccatcgagcacttaccgtccacgtcgatctcctgcaacatctcctgcagctcttctactctggcaaattgtcccagtgaccgcatcactgtgccgagctcctctttggttatgcagccatcgccatccttgtcaaagagccggaaggcctcccggaattcccgcatttgtcccttggagatgcagcggcgtttatgcagggtctcgccgtcgattaggttgggtccgtcgccaattcccagctccaagtccgaggatgcatagcaaatttgacgggttttcgtctttcgtctgctgcggacgctcaaggcggttcgggcagaaggtcgacgtccctccggtttcgaggactgttcgtagtcgtcgtaggattcttcctcctcttcttcctcctccccatcttcctcccgctccccctccccttccccatcgtagtcgtagtcctccagctccgccccatgaaggtttctctgagcgtagctcacccgcgtgcccctccgctgacccactttaatgccttcgcaggagctggagtccgtgtccgcatccgcctgctctggatgcgaattggcagcacttcgttgtggttgcttgtccgtcaattttttccgcggcctctgacgacactgctctgtcgattgttgcttttcgctgctgaggtggtggccctcgcctcctggttgcccatcatcctgcatcgcctggttttgagtctcctgatcctcaccttcagcgactaccgctgacgcctgctcctcgtcgggttcatcgccactcaccgccgcgtttctcgtctagaatttaaagcacactagtgttaaacagtttttaatgtttaccaaatttgacccacaaacagattactttaatttattgtgtcctaatttgtttgtaggctatgctaagtcttttttgcatatgtgaattggttattgaggccaaatggataaatggatttgctgtttatttatttatttatttttttcttgtttactaaataattaaacaaaactcgttccaagtttgcttaataagtagaagtagaatttttatctcaactgcactcaccattagttggcgaaactcgcgggcaattgttgaaccagttaaaaatttattaactgccgtgaaaagccgttttccttccaacgtggcggccttcctcccgcttcagggaattcaggggcggaaaagaatcctcctgactgctttcggtataaaggatatgcaaattcccaattccaatcgattagtatctgaaaaatagagcagcatgcggggccacatgttaattaagcaattaatattgaaagcaatttgcaaattggacgcgtttgcaaatgacagctgcaaagtgtcaaagtgaccgacgccacacagaaactgaaaatgttagtgaatttatttaatttattcaatgacttcatgtcatatctgaaaaaatctttggagttatcctccaggactttggatgcaaataagcaggattataccaagaaaatatgtttatgtaattgagtattgcaagtgtcattccctcgtagaatgcaaacatagctcagagtcgtagcttaaatgtttaattgagttaataataacaacaccctaaatggcataatcagtgtaataatccatttgatttgctcacattcacgtcacttttcgaggccaacaataatggcataaaaagctgcttgtatgtgtggaattcaaaaatgctctatattatgctatatataacatatg

SEQ ID NO: 28850 - DNA, 288 bp, DROSOPHILA
atgaaggtttctctgagcgtagctcacccgcgtgcccctccgctgacccactttaatgccttcgcaggagctggagtccgtgtccgcatccgcctgctctggatgcgaattggcagcacttcgttgtggttgcttgtccgtcaattttttccgcggcctctgacgacactgctctgtcgattgttgcttttcgctgctgaggtggtggccctcgcctcctggttgcccatcatcctgcatcgcctggttttgagtctcctgatcctcaccttcagcgactaccgctga

SEQ ID NO: 28851 - protein, 95 aa, DROSOPHILA
MKVSLSVAHPRAPPLTHFNAFAGAGVRVRIRLLWMRIGSTSLWLLVRQFFPRPLTTLLCRLLLFAAEVVALASWLPIILHRLVLSLLILTFSDYR

SEQ ID NO: 28852 - DNA, 3305 bp, DROSOPHILA
cctttgcgatttaaagtgacgaaatgcatgggtcgacttcaggctcataaaatactgggatgtttaataaaacagtttacaagcgcaaaagtttcctttcagttaatagagctttcaaagctgcttaagaaccaaatctatacaaaggcgctgaaactgttaaaaagtataattgtgatatgtaaatgaattgctgattttcctaaagaacttgcggtaatggcacgccgttcagcataatacctaatgaacaaccttccaaaatgagagataatgtctgtatcgacaaatgtcgacaaaacagaggcatatgcgcccacttgatgattaccagtgcactgtgggtaaaaagccggaaattttgatattaattacaattttaaagatagcgtcttgattttgtatatttatatattttgtagatttataatacttgagataaataaataaaaattacattaataccaaaatttccggctttttacccatagtgcagtggtagcagtgccccagaaccagaagcccagttttagaggcaacctccccacccttcccattcaataggaaaacggagaagaccttcactgcgtgaactgtagttccgacttggtgggggtcctggtctcgtctctgtctgaaaatttgagtcagtcagatgccgagagcaaggatatttgcctgcttcctgaccaccaccctgcccttattgttccatcggcacggaaaaggatgcggaagcaatacgcccacactgtgaatgccagatgccattgaatttaagctggcaagagttcatcaagatttcgtatgccattaactgggtcatgggtcaccgcatttgcggtcgcgtctccgcatctgaaaagccgggatatttaagtgcgaaggtggtctgcggcatggcaacttttttaattaccagctttttccccacataagaccaaagaaattaaagacaaggcttcggttagttgctagcaactttcagtgcgagtgcgcattattcatttccattgtcagttccaagacaggccacaattttgaccacatcgaccttcaaggaatgctgatcctcgcggaactccgcgtcctttaggatcagagtccacacattgtcgcagcatctaaaggtttccagtctttcggccgtaaaggacatattgctcgtgccatgatccttgagagctgttgaaatgctcttgtcatatcttagtaaaaccaaattagcaatcttcttggttatatcgcccctctgcaacatacacgtgtgaactgataagtgcgaagggcctacatatatgtacatatgtacacgtgacgtgtaccaactcacctccatcatctcatccaaagtgtcctggagcgttctgcccagcgttgtggccctgtaatgttgatagttcatatcggctgaagatttgagctagaagcttagtacacacgcgctgtagaatttttatgaagaatgactttagcgcatggcattgacagtgacacactgacacactgacatcgattgcgaaatattatcgattacagggattaccactaacaatcagattcaaatgttcaagaaaaagttattaaaccaaagcatatcgcaagtgttgcccaaaagcatatgtaatgatccggggtattcaaaatggccacctaaaccgcataaaaaaaaacagattacgatgatttacttaattctaattgctactataattgctaatgtgatggccctaattgcttcttcttgccattaggttagatggtgcggtggcaatttacttgaagcactttctacacatttccagatttcatcacattgaatgttcgtttagttaaatgtcttatgtggggtaaatgaagatttggaaataaagaaggcatttctctttcgaacattcagaataaactttgctactagctccccaaaatacttgtgaattagaaactttgaaaaattacataaaactcgaacatggatgatttggctaacgagtacaccggcagtgaagagaggagtggagaagcctccaagctcggactcctggccagggtggaccgtctgctccggcgctggctgcctggatacagcttcattcgcggcaagcgtctctcgacatcggaaacctcgatcgtgcacggctgctcccacggcacacaggcggtgcgtggacgtggtgaccggatgaataataaggaggaggtgtacctggacaccggcatcgccaagtcggagttctgcgtccacctggagaccttgctgcgcaacaagctgctcaagaagcagcaggaattggccctggaacatcaggagagaagccgcgagatggagctggagcaggaacggcagctcaatcaacaagttcagcagtaggaaagtctacctattgtgttatttttcacttcaattgtgtatatatatttttaataccatcaatcagtcgtggcgaggcgaggcgaggcgcctcattaaaattaattaaaaataatcaccggcaatcatgaaaacaaaggaaatcaggacgcatgtggcatcagagaatattttcccctttaattttccaatgtctaatgcttatcagtagtcaacaattgattagcttataattgccaaattgatgaccattgatcatttaatatttcagtttgctttcatacggcttggctggcggacgtctttttcatcgtcttttttcatgtcattaagcgtgaaattaattaattgaactgaatttattattaaaatgccgtatagaaaagtacagcttgtcgattgttcatagaacagcgagccagttgagtcggcaatgttagtgtgcaattgaaaatgggaaatggaaaaaggaaaattgcgaaatgacaaccacttgtgatctcgatgtcaattgcgatgtcattaggctgaacgaacaacaattgtgtgtgtatgccaaaaacccttctaatgttctaatgtccgcagcattagcatagggtcctttaaacaacaaccccccagcaccaccactacggacgctgccaccaaccacaggactcctaaccactcatcatggctattccagtccatttgaggccgtgacaaagcccaaatcaaaacattgcttatacggatacggacagcaaacctgtatgtgcgaagtggatgttaatatgtgtgggccagttgggggtgggttgagggagagtcctcagggttggcattataattttgctggccaggcacttgagcacttgatgaccattaacgtaacttttgcgtacgttgctattccaaatacacagcgaaaaaacccagatatgttacgcat

SEQ ID NO: 28853 - DNA, 492 bp, DROSOPHILA
atgttccagggccaattcctgctgcttcttgagcagcttgttgcgcagcaaggtctccaggtggacgcagaactccgacttggcgatgccggtgtccaggtacacctcctccttattattcatccggtcaccacgtccacgcaccgcctgtgtgccgtgggagcagccgtgcacgatcgaggtttccgatgtcgagagacgcttgccgcgaatgaagctgtatccaggcagccagcgccggagcagacggtccaccctggccaggagtccgagcttggaggcttctccactcctctcttcactgccgctctcaaggatcatggcacgagcaatatgtcctttacggccgaaagactggaaacctttagatgctgcgacaatgtgtggactctgatcctaaaggacgcggagttccgcgaggatcagcattccttgaaggtcgatgtggtcaaaattgtggcctgtcttggaactgacaatggaaatgaataa

SEQ ID NO: 28854 - protein, 163 aa, DROSOPHILA
MFQGQFLLLLEQLVAQQGLQVDAELRLGDAGVQVHLLLIIHPVTTSTHRLCAVGAAVHDRGFRCRETLAANEAVSRQPAPEQTVHPGQESELGGFSTPLFTAALKDHGTSNMSFTAERLETFRCCDNVWTLILKDAEFREDQHSLKVDVVKIVACLGTDNGNE

SEQ ID NO: 28855 - DNA, 2321 bp, DROSOPHILA
ccgcaaactgggggcgaggatcgaaaggagttgccgcagtcctggccactttgactgcagcacaagctgctccagcgattgttggcggacttaacgcagttcgctttatggcacgccagttgactgccggagtcaggtttctgccttatccgctgtcgcagctacacggagagaaatagcgaatgcagatgaaaactcctttgagccgcaggacatgtgaaaaagatttcatttgattctctttgattcgaacatcactgcgccctctggggccttttctcttctaacaacaactgatgcccacagttcgaaaaacaatattttgttttaaaatatttatacatatacatgccactgcaattatttcccagtgctatagttaatgcaagtgccgtggcccaagacgccgaggcgatagcgatggcgatggagaatcggattggattggatctgaaatgcaatgcttaagctgaaacggctcccggcgtgcacttcgctcctcgctcagtcctcgccgtcagatgcagttaagtatacaattattaatagctgcactgctctggcctgcacccatttacctctcaaaaatgaatgtaaggcgatttgacccttaaacccgatctagagcactggcgctcaagaagaaagtttctgtgagaatacacaagccgattcgaaagctacagagactggcagattgttatccctgaacggttttgtttctaattgtcttggaaatatttcaactaaaaccgcagatggagaacatcatttaaaactggctagggatgtcaccaattattaatcctagggcctgtgagaattagataccagccatagactaccccactattccagtagttttcttctttgtgttatctggtagcactactggacagtcatccgaaaaagcaaaaaaaaaaaaaagggtactttgaaaaagtaaaactttggataatcattcagctgattttggtcaaaggtaaaagaaaaaaatacaatgtttagaaacgatatcccggcaccgacgagtccgaggagcaggatctgggtgagaaacctaccgccttgcacccgccaggagctggttatgctctgcttgccctttggcaaaatccttggctcgctgatcgttgataacgaagggttcatccagtttgctagggagagcgaggccacgagcgccatagacgcgctcgaccaaattgtcttcaaatcgaaggttctccaggtctcgaacgccacctttcctccaatcgaaggcggtcaggtgttagtttggtatgatgaggatggagtatacttcgaggatgaattttaggatgacgatgacgatgaaggccaccctggccaggcaggaattgtgcacaagcaagaggaagagaaatacgaacggcaaaaacacgaattaaaagatgaatagtgtggtgtatcgacaagcaaagcaaagaagaatctctgcaaaaaaaaaacacttcgactctctacaagaagaaaacatcaacagtctacaagaagaagatcgcaccaaattcctggaagaacgactcaccaacataactcaattcctatacttatacacgtctgaaatatgatctgaaataaactgaatgaatttcctggtcaaaatattcggagaagttttccttcggatgttggcaacaagggcaattaagcataaccccgttttgtacagtcagttcttcctccattattttggtttacctactatatgggtggcaaccaaggcactgctttggttatgggatcattgaagttcatttagaagatagtttcggcaaattcatataataatagaaattcaaataataataattcttaaaaaaaaaaaattgctaacgggcgatggttaccccttctgtgctccgcggaccagatgctatcttccctgatctatggcgaggattggattggactggactggactggcattacccgccggcgactttctgttatatttggctttcaacttttgggccaactcgcattatacgcttaataacggtcacataattatggagattttaacgtggcccacagcacaattgcattgtcagaagagggaatgccgaaaaatggggaaagccgctccgagcaaaatgatgattatatattttgacgtagtcttaagtgaaactgggaagcccctggcccgtataacttaagtccgctccaaagcgattgctacgtgctctgtgcaatggatatttctgttttgctcgctgcgttatttcgcattactttatttcgcgctcaatgaaagcttagctgcacggagcaaaaaggtgtgataccttatg

SEQ ID NO: 28856 - DNA, 321 bp, DROSOPHILA
atgtttagaaacgatatcccggcaccgacgagtccgaggagcaggatctgggtgagaaacctaccgccttgcacccgccaggagctggttatgctctgcttgccctttggcaaaatccttggctcgctgatcgttgataacgaagggttcatccagtttgctagggagagcgaggccacgagcgccatagacgcgctcgaccaaattgtcttcaaatcgaaggttctccaggtctcgaacgccacctttcctccaatcgaaggcggtcaggtgttagtttggtatgatgaggatggagtatacttcgaggatgaattttag

SEQ ID NO: 28857 - protein, 106 aa, DROSOPHILA
MFRNDIPAPTSPRSRIWVRNLPPCTRQELVMLCLPFGKILGSLIVDNEGFIQFARESEATSAIDALDQIVFKSKVLQVSNATFPPIEGGQVLVWYDEDGVYFEDEF

SEQ ID NO: 28858 - DNA, 2213 bp, DROSOPHILA
cagctccagctccagctgcggatacgaaaaaggcgaagcggattcgtggggcctggggatgacgggggaacgcaaatttctttgcgctattatctaagtcaaacagaagctgggcgaagcgagcgagcgccaaaactttttcacctccgacgatcggggcacagtgttaagggtgtgcgaagtgggctcggagtgggacgtgcaccgaaagaaaaaccactgaaagaactttgcatttagtataaaatagttgtactactcgctttgctgccggatcttaggactgatgagatatgatatctaaggtgtactgctagcaatattgctttaattgaaggggctcgactcatttctcttggtgcactgctgtagttaacggctttgcatgttggacaacgtcacaacttggcaacaaattggacttttgtttgtgtttgttaaaaggcttaatttgttgtgctttcggtctggctaaggaaacattatgggagagtgcggaggggtgcttttagtgggtggctttcgggggattgatggctgctgggtggtgggtggtgggtgttggaatggctaaagtgcttcacataacttgtcgctgtgtccaaggtgtgtgtatgtgtgtatatgtgtatgtgctgaggtgtgtctgcctaaatcaagctcaaacaatttcaactatttgaattgccgagccatggcaagagcattagagtgccgtttacgcacacacactgtccccaattacactgagcgaagtttcctgttcagtatctgaatatcaaaatattgtatacaaacgtagaatcatgacatgtccaaggagtgataaagtggatattaaaccttattactaaataccagataatcgatagaagttttaaacaatgttgggacctgactaccgagtactttttccagtgctcacacccacacacacacactggcatgggtgcatgtggcactcagctgctaacgacgtgcccaagtaaatgtcaaactaatgcccaagctccgcaccgcaggagccaggatgccaagccacgaacccaccacctgcacttccatctccatcagcacctggcccgattcccccaatcccccgattccccaaatccccgatgccccgtctcgccgactttggccgaccattctaccgcaaaccatcgacggccatcgccaactcaataatgtaatgtccctcattggcgcttaaagtttatgtatagccacccattttcagcatgttatgctagggatgagtagtcagtcagtaagtgctggctttgaactggttgtagtacacgggcttgactccaccacttcaacgcatctatctaagcttactgcgcccagttgattcgctctctccaaaaagaaagtggtcctggaacagctcggtcgtcgtggtcgcgtgtcacgccctcatccctggtggaagccgcgccttagaaggtgcacagttttatgcaagttattgcattcaacgctttccctcagctagcgacaatccgccaggtgtgcggctgagtgggattttgagtagtgcgcctggaagaacacaatgccaatgggagaaggcgtggatcggtgaaaaggggggtgggattttcaaggaggaagcgaattactgtgtcgactattagcctattccatgcaggtgccgtcgcgtgttacagtgaaccactttgccgacacctgttgccagcaggatgtcttaagggctgaaagccatccttcatcgcacctgtcgcagtgtcagagcgtcaatcaagcagtcaatcaatcaatcatgcaatcaagccgcccagttgactgccgcgtaattggatggttgcgaaaacttgcctacttaagcacttaaacgggcagctcgccttcgattgtgtgataactttatcaaagtcctataatcaaactttactcccactcccccccgccacccatcggtcggtcaacacttcgttgtgttttggagctactcctcctcttgtttctgatcctttgatgagcttaagaggatgcccgcctccgcatccgcattcgcattcgcaaaagcttgtttcgagcagcaactaacggtaacggtaacggtgcacgctaacggggtaatcgccggtaatgtgcgctcaaggcttagctcctttgctccaaccctgcaacccccatcccccccccaccattcattcctcttcattctcattttcatcccccat

SEQ ID NO: 28859 - DNA, 213 bp, DROSOPHILA
atgcccaagctccgcaccgcaggagccaggatgccaagccacgaacccaccacctgcacttccatctccatcagcacctggcccgattcccccaatcccccgattccccaaatccccgatgccccgtctcgccgactttggccgaccattctaccgcaaaccatcgacggccatcgccaactcaataatgtaatgtccctcattggcgcttaa

SEQ ID NO: 28860 - protein, 70 aa, DROSOPHILA
MPKLRTAGARMPSHEPTTCTSISISTWPDSPNPPIPQIPDAPSRRLWPTILPQTIDGHRQLNNVMSLIGA

SEQ ID NO: 28861 - DNA, 5806 bp, DROSOPHILA
acttttaattaaaccaaagaagaaggacacaacaaacaaaacaaaaacaaaaaaaaaacaaaaaaacaaaataggaaaatggaaaatagtagcaaacgaaactcaactttaatagccgtgcagattgcattgattaacttgagttgaaaatgaaggtttctggcgaaggacgctttttccgcgttagcaatcaacgaagctaagaaataagttaaatacactatgtacagcggtggaatggaaccaaactggaatcctctggcggttcagtccaaaggagctcacttgagagcagccttgttcttcagcggcaggaatgcggccataaagcacccggctgtgcaacaagaaacagggataagaatcgatttgggctaagacttcgataaacttacccagcatgaatgcactgatcatgaggaacggcggcacacagcccagtcccatcaaagccgggaagaaaatgttgcccaacagagaccccagacggccgaacatcatttccagcgagacaatcatcgtcctaaagagattgtaaaccagttatttccagaatcacattgccgaagtgatcaaaaacgcacctgagtgaggtgggaaagaggctgactgaggcgctgatcactgatgtggccgatatgctgcccatggtcacaaaaagcgaagcaagtgcgaccgtggatgctgctgagctggaccagtacatcccaatggaacagccggccgctatgaggagtccactggctaaagtttatggaaggttacaaatccattcatttgttccaccgattggtattggcagtacttactcattataagcttgacgccaaccaagtttaccaggaacccagccagcatgtatgccacaaagccagcaccggccacaatcagattgttggtgtaggtggagggtgttataattacatggcactcgaccgtgggatcattccgagttactgcctccagctggctttgggtgcgattaacactgtactccaagatgttgcagatgctcgtcgattgtgattctccgctcatcaagttttcgtactcgttgatggatgcaaacagttgtggcagccacaatcgcatggtgttttgtctaataacgatacaacatatattaatccaaaataatatcacagtattacttcatgatcaaggccctatatcgctgcaatataaacgaatcttcgttgtatttagtaaacttaccccaagagcacgcaaaagttgaggagatacacccaaagggataggcccaagtagggtttggtgaaaaggggacgaagctgcgtgaagcccgaacgcagggagctctttttcgagtcctgattctctggatcctgaacttcgacgcactccgtcggaagtttaagctcagtcggaattgtttcatccttcgcgtgcttttttaccggaacaattacttcattggccagcaatttgatctgttttagaatacatgcattgatgattaaatatttcgtcatagttgagtatacatactggaaacgagtccttgggttttctcgagttcaggtgatacatgaacttgaaggcatccagggcttcccggttgcgccccttggacatgagaaacttgggactctccgggaagaaaaagaaaagcacaaagctcagaagactgggaagtgcggtgacggcgacgaaaaactgccaggatgtcactgaaagggttcgatgttgcaattagaaaagttatttgatctatcgattaactagggccttgatttaatacttaaatcttaaattgcttaagatcacttgcttctgttatcacagcttcttgttatcaacttgctacactactgctatactcgtatttgctctcaataaaatcttttaagctgtatctgtatttaggtagcgttagtggcgcgtggagttcatatattttttgatgattgttcccaagggggatggggcctccggcattatcatctgctatcttcatatcactcctcacaaccactgataataagacaataacacagccaaacacgtaacataccctcgggacttacacgacaaagtccagatctgaatgttccacgtctcgggcaatatcagcatggccagtcccggtagcgttagcgttgcaattgagaacatgatgcccaccatcatcatgatacgctgtcgatgcttccgtccatggagttccgtcaaataggtcataagaacggcaaaggggccactcatactgcattaatagcacagatgctgcagtaggctcatttgcaactgggaagaggttagttacttaccaaaagcctccaaggtatttaaaaaccatcagttggatcctactttgactgagtgctccgcccaaaacgcatatcgtatcggcggcatagcccacaatcaggaggtttcttctgcccttgatgtcggccaagtagccccaaagcaccgccgaactgatcatgcccgcataggtaatggcattcaggatgcccttgtccaggaggctcagcttaagatcacactcggcgctgggcaggatgtaggacatcgtggaggtctcgtagacggtgcccatggccgctggcacggcggccaccagcaggaggatgttgaacattccaaagccagcggcatcgatggctgcctcgaaatcagctgccgcctctttttggggaggatccccaatttggtgctcggcagtcttgtgaggcttgggatcgccggattcactgggctcgctcatcgtgcgtattgtttgggtcgcctctgctaactgaagctgggccgttgggcggatacgttatatcttccagacggcgctggggcctcaaatcatctttgtttgcctatagtcgagggaaaacaaagcgatgcttatgccaattgcgctaatctagcgactaaggatcaccctacttgggatgctgcaggtggtagtagtgtgggattctctgagaatgagaatgagctctggtatgaacgctccacgtttgtttaactaaagaattttcgcggtggtgaccccgcgaactaaccctttaatccattaactttcttccattctcggacaggcatgaaaacaattaaacgcctccctgtttactcagcggtttatgggcccccatcatccgcatcatcaacggtatctggccccttcacgtatatgtgatcactctgcctgcgactgtccatgtgaatgggaggctttattgccaccgtgattcggtttactgatttgtagactccctgtaatgtacgcttgtcgcaggggtatattatttcgttggaaagattgtttttaaaaaagaaaggtgaaagtatctgaccagttttcagcacctagcactgttagcacaacttcgatataaaaggggggcaatacccccccaggccgaaggctccgtttattaaaatttactctgtgttacattcgacatatttttaatggtaatccacagtcggcatccgtaggtgtcgtcttcgcacctgttctgattacggctcctatgacgacacggcagcgcctcgctgatttacgtgggctccccgtttccatttccattttccagttttgccggcttggcaaccgttgcgtcgtcatcgggctaaactaattgcgatgattacgggttatgagttggtttccctgaaaacttttcgggattacgattactcatgtaggggcttagtgctgtggtctggttcggtcggggctgctctgctctgctcctggcgtgtgctgcgatttgttttcacagaatctgaatctggccggcacagtgggggcccgcccgccggtctcatgtggcatagatcaggatttgatattaattaagcggccttcgggcggaggagtgcggaggagcaagcaatagagcggagcttactccccagcgggagcttaggtcgcaacttaaaggatatggtatcggtttagtgtcgaccagtgtcggacctcgtcaaggtttcttgagaggaatgggtcgtgagaattaatggccgatgagatggtagcaacaaattccaagaaacctcgcccatgaccttccgacactcgactacaatttaatcaagtttgcaaaagagtgcaatgttttagtaatgatggcccttcgtttcaacctaaaacaccatttctttcgacaattgacctcgtgatgtgtgtgtttggagcaatggtttgttctgttttttttttttttataatgaattttatttttattaggaattttattttgattaggaattgtaatttcccatgccagggacctctggctgaagtgcgtttgtaaaatccagattatcttgcacttgagcaacatgattcattcattcatggtactcagtacattttaattaaaataaacaagaatttgacatgcaggagccgtgtttaaggtcacaaaagaaacccttgcccttgcccttgcctttcccattaaccgcatcgcctgcttctgagcactttcctcagcgactccgcatactgttctccactgcggccatgaccattcccagtggcatgtcataaaagacatgacgaaatctaccaagactgaaatttttccacgctacagtttgtttaatttcatcagctccagctccagctgcggatacgaaaaaggcgaagcggattcgtggggcctggggatgacgggggaacgcaaatttctttgcgctattatctaagtcaaacagaagctgggcgaagcgagcgagcgccaaaactttttcacctccgacgatcggggcacagtgttaagggtgtgcgaagtgggctcggagtgggacgtgcaccgaaagaaaaaccactgaaagaactttgcatttagtataaaatagttgtactactcgctttgctgccggatcttaggactgatgagatatgatatctaaggtgtactgctagcaatattgctttaattgaaggggctcgactcatttctcttggtgcactgctgtagttaacggctttgcatgttggacaacgtcacaacttggcaacaaattggacttttgtttgtgtttgttaaaaggcttaatttgttgtgctttcggtctggctaaggaaacattatgggagagtgcggaggggtgcttttagtgggtggctttcgggggattgatggctgctgggtggtgggtggtgggtgttggaatggctaaagtgcttcacataacttgtcgctgtgtccaaggtgtgtgtatgtgtgtatatgtgtatgtgctgaggtgtgtctgcctaaatcaagctcaaacaatttcaactatttgaattgccgagccatggcaagagcattagagtgccgtttacgcacacacactgtccccaattacactgagcgaagtttcctgttcagtatctgaatatcaaaatattgtatacaaacgtagaatcatgacatgtccaaggagtgataaagtggatattaaaccttattactaaataccagataatcgatagaagttttaaacaatgttgggacctgactaccgagtactttttccagtgctcacacccacacacacacactggcatgggtgcatgtggcactcagctgctaacgacgtgcccaagtaaatgtcaaactaatgcccaagctccgcaccgcaggagccaggatgccaagccacgaacccaccacctgcacttccatctccatcagcacctggcccgattcccccaatcccccgattccccaaatccccgatgccccgtctcgccgactttggccgaccattctaccgcaaaccatcgacggccatcgccaactcaataatgtaatgtccctcattggcgcttaaagtttatgta

SEQ ID NO: 28862 - DNA, 630 bp, DROSOPHILA
atgttgcagatgctcgtcgattgtgattctccgctcatcaagttttcgtactcgttgatggatgcaaacagttgtggcagccacaatcgcatgttggatcctactttgactgagtgctccgcccaaaacgcatatcgtatcggcggcatagcccacaatcaggaggtttcttctgcccttgatgtcggccaagtagccccaaagcaccgccgaactgatcatgcccgcataggtaatggcattcaggatgcccttgtccaggaggctcagcttaagatcacactcggcgctgggcaggatgtaggacatcgtggaggtctcgtagacggtgcccatggccgctggcacggcggccaccagcaggaggatgttgaacattccaaagccagcggcatcgatggctgcctcgaaatcagctgccgcctctttttggggaggatccccaatttggtgctcggcagtcttgtgaggcttgggatcgccggattcactgggctcgctcatctcaaacagaagctgggcgaagcgagcgagcgccaaaactttttcacctccgacgatcggggcacagtgttaagggtgtgcgaagtgggctcggagtgggacgtgcaccgaaagaaaaaccactga

SEQ ID NO: 28863 - protein, 209 aa, DROSOPHILA
MLQMLVDCDSPLIKFSYSLMDANSCGSHNRMLDPTLTECSAQNAYRIGGIAHNQEVSSALDVGQVAPKHRRTDHARIGNGIQDALVQEAQLKITLGAGQDVGHRGGLVDGAHGRWHGGHQQEDVEHSKASGIDGCLEISCRLFLGRIPNLVLGSLVRLGIAGFTGLAHLKQKLGEASERQNFFTSDDRGTVLRVCEVGSEWDVHRKKNH

SEQ ID NO: 28864 - DNA, 2848 bp, DROSOPHILA
cccagctcccttgctctctcctgctctttcgctgtttgtttcgagaagtttgtgtgccagggggatgtgtggataaaacgacgagcgcgcggccacggtttctgacgcactgacaatttctccgaaagttcagaacattgggggcttttctcagtggggtttccctgtcgtttggggatgaaagtgtagctttaagctatcgctaacgaaattcgttaggttattgcctttgctaactgggaaagcattgcaagtaacattttaaatggtaaaagtttctgcaggatattcgttctattcaagactacttaataaaaaaagctcacattaagcttacattcggttatttagagtttttattaaaagccaccaatagatcctgccatggcttatgcttccaaaagctgtgtacttaaccggcgtaaaagcttttcggtttgcatccttaggctgagctgaggagcttctcacctcaattgtcccctagatgttagtcccaaagttgtcctaatttcccaaactgtttaccgtatttgaggggcgtggactcatgaatcaatgtccattatgacctacattaccagcacataaagcgttgaccgcatcggggaacacgcggttaccccctgccacctgcaaataaacagcggaatccgcagttatctttgagtgcttcgtgataagaagctggcggagattaaaccgcagcaatcggttctgtggttctgcgtctcctgacgctgacaaggcatcttatcaactaccggctgatgatgggcctgataagtctgttgagtgtctgacacagcaaccatggcggtcgttttggggtcacccccgcaaacaagacgaatgatacgatacccagaaatgctgttttgtacttacatatgtgtattctacatgccatctggccgcgttagatgatttaattcagcttaattctgttctgtttaaccaacttttcctatttcgatgtggtaaaaacacatttttggttcattgtggttactacttatttattgaaaaaaaaaaggatggaggaaacgtaattacggggaacacgcttaacgaggcgtcagattgtgcttgccaccatcgatggggaagagggcgccggtggtgaaacttgccttggagctggccaaaaaggccactgcctcggccacttcggtgacgtcgcctacacggcccatgggatgcgaattgatggcccgctggagcattccgttgtactcctcgtcgacgatgccaatgttccgatggatgttggtcaccacgaaagccgggattcaccgagttcacgcgcacaccctgaggcgccatttcgagggccacaatcttggtgaactgatcgagggcggccttcgaaactccatagctcagtgctccggcgaagggacgaatgccggcacagctgctcacgttgaccacggctcccttggtcttcaggaggtgcgggagcaccgccttggtcaacagaatgacaccacgcagattggtattgagcaccgcgtcgaattcctcgatgtccagatcgatgaggccacccttgcccagaatgccggcattgttgacaagcacgtcgatgcgtccgaacttggccaacgtttgctggacaatcgcgtccgcatccttggtcacatcggccaccacgatttctgcctgcgtgcccttcaggctcttcttcgtggcctccagattggccacattgcgacccaccagcgccaaagtggcaccttcgcgagcaagaacttgggcgatggcggcaccaattccgctgctagctcccgtcacgatcaccaccttgttgctgagactcatattgaaacactggagtcggagtagcctggcggcggaatttatgggcgagctctcttctgcctcagataagattagtgctgcacttcacaaaaaattatctgggaaaagaaaaagcaagcaactcaactccgccttccaaaaagtggttgtaatttatggcataatttgcttgttagcaagctactatttcgttaattcattaaaaacatatgttcatatgtacatataagtggatgcttttgaccttgcaaaggtaaattatataataatttgagttacgatttccaatgatttacatataatcagtggcttctcttaaagctagttgtgctttattttaactttggaattcgctgaaaagctccaagcattttttcgcagtgcggacgtgacgtgaatcgctcgttgctctctccggaaaaacaacctgtagaggttcaccttgggtctccgagggtctttatcgatgctctagcatcgcattagcagccgcgatgcctcgactcgggtttttaaaagtcagagccgaaagtttttaattaaaactttccgtgggtcttgtctgatttcaagcattagcgaaatcaaggcatatctcctagaagacgggcctccgaaaacgccaccgctgccgccgaacttcgagttgagcgcctccgttgtcagataattagcatttccatttggcttgagtgcgcactcgtatatcaacgcctcctcgcgtagataagacgccaggggttccagctggaggacattgcgagcgattatggtacagtggaggcccagtacctccaatcgccatttggccaagatgaatgggagtgaatgaacagaatgtcaagataggagcgacccgttgctcacttcatttatatccacttaaagacgtgtcgacgtgtcgacgtgccgacccagggccgcgttttgttgacgaggtcacactgtacttgtgtacgattcggcccaaaaagttctgtgcttttgatggtgtatttggcactaatcgttttccttgctaagc

SEQ ID NO: 28865 - DNA, 848 bp, DROSOPHILA
cattgtggttactacttatttattgaaaaaaaaaaggatggaggaaacgtaattacggggaacacgcttaacgaggcgtcagattgtgcttgccaccatcgatggggaagagggcgccggtggtgaaacttgccttggagctggccaaaaaggccactgcctcggccacttcggtgacgtcgcctacacggcccatgggatgcgaattgatggcccgctggagcattccgttgtactcctcgtcgacgatgccaatgttccgatggatgttggtcaccacgaaagccgggattcaccgagttcacgcgcacaccctgaggcgccatttcgagggccacaatcttggtgaactgatcgagggcggccttcgaaactccatagctcagtgctccggcgaagggacgaatgccggcacagctgctcacgttgaccacggctcccttggtcttcaggaggtgcgggagcaccgccttggtcaacagaatgacaccacgcagattggtattgagcaccgcgtcgaattcctcgatgtccagatcgatgaggccacccttgcccagaatgccggcattgttgacaagcacgtcgatgcgtccgaacttggccaacgtttgctggacaatcgcgtccgcatccttggtcacatcggccaccacgatttctgcctgcgtgcccttcaggctcttcttcgtggcctccagattggccacattgcgacccaccagcgccaaagtggcaccttcgcgagcaagaacttgggcgatggcggcaccaattccgctgctagctcccgtcacgatcaccaccttgttgctgagactcatattgaaacactggagtcggagtag

SEQ ID NO: 28866 - protein, 199 aa, DROSOPHILA
MPMFRWMLVTTKAGIHRVHAHTLRRHFEGHNLGELIEGGLRNSIAQCSGEGTNAGTAAHVDHGSLGLQEVREHRLGQQNDTTQIGIEHRVEFLDVQIDEATLAQNAGIVDKHVDASELGQRLLDNRVRILGHIGHHDFCLRALQALLRGLQIGHIATHQRQSGTFASKNLGDGGTNSAASSRHDHHLVAETHIETLESE

SEQ ID NO: 28867 - DNA, 3287 bp, DROSOPHILA
gtctatccccgcgtccctgttagccttatgcttaaattaattcggcagactgcaaagtcaaaagctacctgcacctagctaaatatattaatatttacatatttatatttacatgttaaagcaaaaaatcgattaagcaattcattgataaaaaagtttaagacagtagagaattgacattaccgcagaattgctgataattgcagtaagaatattttgattttggacacttgtaattataaaaagtttgtgtgtctcttgctctttaagattcctctttgccaggaaaataactataaaatgaagatttgaagatgtaaaaggctagtgcttcaaactatgcacctgtaaataatatggtattgcaaagttatgcggcttgtaaattcatcttaactaacattccttcgatttcccagcgtttagcccatgtaaataactcacttgagtccggcgcagacgaaggctttaaagtgcgcgttgttactccgtttgtatggacgatgcattgccagaatcatgcccacggcgctgagcaaactttgcttggcggtcacagcctgcgcgtccacgatgtccagctggaagctctgcgacaactttctggcaggcgtgttgttgtactcctcgccgtgtttcaacctataataggctagtactagttcccaggcgtgcatggccctgcccaagccgaggaactgcgagtctcctccgacggcgggcggcactaccggaggcccagggtgcaggcacctcatgaagggaaccatcaaactggaggcagccgattccgctggtatgcgaagtccgtgttgtataagctgctgcaatgtgcgggcaaagttcttccgcacaaccgtagtcaattccctgccaatagtggcaatggaatcaccgcgtgcatgcgtcgtccgccggctcttgctctccttttcccactcgaagttggagtagctaatgtcttcgtcggagtcggaggatatggcgcccccggacgcatatggagccagttcgtgaccagttggcactgctcgccggcaacgaggcggcagggtcagtgctccgttttgtgagttaataaccggattgccagtgtcggagaattcggttgactccgcctgttgttgctgtttgcgcaaagctctcttgatgttggccaacttctcgcggtcgcagctcaaagtggcggccagtgcagctacttcctggatgtccacctcaagctgggcacgtagatccctaaattgggtgaatgatcaagtcaggttggtgttctttactttggtgttggtgcttacgatttccaaacttaaaatcttaagtttatctttaaataacattaatacttttggaaatggaaacatttaggtgattatttgtggcgggttaataagtgggggtatctccttggctaaaatccatttcgatctaagcctaaaagattctcttttacgcaaagctattagtaaaggtctcaaagtcttatctaaaatgtatatcgaatgctagtaattgggccgtgagaaaatggatcttacccccagtggttgcccttgtgcgtcttcttcagcgaattttgctggaattcgtcgtgagttcgtggtttcaccagatgcgtgctggcgaacatttgcatgaggaccgaagccttgtccagcaagccatgtgccttgctgtgcaagctctcgccggaagaatgggcacccaatcccgaggatggcggggtagtagctgtcgtagctggagcgtttgtggcaacgtaacttgcctgtgaactccgtgctgtctgctttgcagcgtagctgttgtacgcaccggatagaagcttcagtcgatccccaacggatccctcaatggcatcgcactgaaggaaggcaatgaagcgctccaagtcagttatctgcgtcttcagttgggccaccagttgctccttcatcttcagagggcccacaaactcgccgatggcattgtcgacctggtggcgcagttgttccgtgctaagggccggcagttcgtgctgctctacctggagattgagcttggcgcgcagctcgtccaggataaacttttgcttctcgagcaatacgtgctgcggcaggatgccaggttcgccagcctcgtaggctatttgttccagctcagtcagctgggacttcagttgttggatgagctggctatcaggaccatggtccttttcaccatcgcttgcgggcttatctggatgggattccttggactggactgcgtctggaattccttggaaggcgaagtcctcgaggtcgcgtaaaagttgatcccgctcctccgctggcgcctccacgatttggcggactctaagctggacgtgagcaaagtgggaggtcaaagccagcagagaacttgtcagaagctcctgctcctcctctatgcttcgcagacgggccagttcgctgccagtgcttccacgtcgcgcttctgacttttccagtcctggttctagttcgcaatccacgccagaactggcgctattcgcgtcatcgtagttggctcccaacggcgaccaccgttcgcttagcagctcctgctgctcttgttcgacctccacttcttcctcctcatcttcagcacgaacaggtccagctggcagctggccttcgatcgtcgagcaagagtccttggtttcctgggcctctgccattttcatttccatatggaaatgctgcaggggattgccttacccagcgtcgtttgtttccactgtttttgtgtttcctacgctcgagaaaaatcaatcgatggcttgttccgctttctgtgccagctggcccagctcccttgctctctcctgctctttcgctgtttgtttcgagaagtttgtgtgccagggggatgtgtggataaaacgacgagcgcgcggccacggtttctgacgcactgacaatttctccgaaagttcagaacattgggggcttttctcagtggggtttccctgtcgtttggggatgaaagtgtagctttaagctatcgctaacgaaattcgttaggttattgcctttgctaactgggaaagcattgcaagtaacattttaaatggtaaaagtttctgcaggatattcgttctattcaagactacttaataaaaaaagctcacattaagcttacattcggttatttagagtttttattaaaagccaccaatagatcctgccatggcttatgcttccaaaagctgtgtacttaaccggcgtaaaagcttttcggtttgcatccttaggctgagctgaggagcttctcacctcaattgtccc

SEQ ID NO: 28868 - DNA, 414 bp, DROSOPHILA
atggagccagttcgtgaccagttggcactgctcgccggcaacgaggcggcagggtcagtgctccgttttagggcccacaaactcgccgatggcattgtcgacctggtggcgcagttgttccgtgctaagggccggcagttcgtgctgctctacctggagattgagcttggcgcgcagctcgtccaggataaacttttgcttctcgagcaatacgtgctgcggcaggatgccaggttcgccagcctcgtaggctatttgttccagctcagtcagctgggacttcagttgttggatgagctggctatcaggaccatggtccttttcaccatcgcttgcgggcttatctggatgggattccttggactggactgcgtctggaattccttggaaggcgaagtcctcgaggtcgcgtaa

SEQ ID NO: 28869 - protein, 137 aa, DROSOPHILA
MEPVRDQLALLAGNEAAGSVLRFRAHKLADGIVDLVAQLFRAKGRQFVLLYLEIELGAQLVQDKLLLLEQYVLRQDARFASLVGYLFQLSQLGLQLLDELAIRTMVLFTIACGLIWMGFLGLDCVWNSLEGEVLEVA

SEQ ID NO: 28870 - DNA, 2279 bp, DROSOPHILA
gtgagagagagaatacgttggacattgaatagtgtgatctagtctaagccaaaaaatgtacaagtcagccgcccttagatgttgcggaagtgccggatggccaggtccaccggcaggtcgaagtcaaatcgagaaagagcatcgatggagcgcagtgagtcgcggaatccggtgcgggccacgtagctgtctgctgagtagtacgtgtccaccagttcatggcagctgaggatcaggttcagccactccaccagcaaatgggaactgtttgaaggaagagaaaagcatttcgaatgaaagaagtgtgataaaagccaaggtaaaggtctatccccgcgtccctgttagccttatgcttaaattaattcggcagactgcaaagtcaaaagctacctgcacctagctaaatatattaatatttacatatttatatttacatgttaaagcaaaaaatcgattaagcaattcattgataaaaaagtttaagacagtagagaattgacattaccgcagaattgctgataattgcagtaagaatattttgattttggacacttgtaattataaaaagtttgtgtgtctcttgctctttaagattcctctttgccaggaaaataactataaaatgaagatttgaagatgtaaaaggctagtgcttcaaactatgcacctgtaaataatatggtattgcaaagttatgcggcttgtaaattcatcttaactaacattccttcgatttcccagcgtttagcccatgtaaataactcacttgagtccggcgcagacgaaggctttaaagtgcgcgttgttactccgtttgtatggacgatgcattgccagaatcatgcccacggcgctgagcaaactttgcttggcggtcacagcctgcgcgtccacgatgtccagctggaagctctgcgacaactttctggcaggcgtgttgttgtactcctcgccgtgtttcaacctataataggctagtactagttcccaggcgtgcatggccctgcccaagccgaggaactgcgagtctcctccgacggcgggcggcactaccggaggcccagggtgcaggcacctcatgaagggaaccatcaaactggaggcagccgattccgctggtatgcgaagtccgtgttgtataagctgctgcaatgtgcgggcaaagttcttccgcacaaccgtagtcaattccctgccaatagtggcaatggaatcaccgcgtgcatgcgtcgtccgccggctcttgctctccttttcccactcgaagttggagtagctaatgtcttcgtcggagtcggaggatatggcgcccccggacgcatatggagccagttcgtgaccagttggcactgctcgccggcaacgaggcggcagggtcagtgctccgttttgtgagttaataaccggattgccagtgtcggagaattcggttgactccgcctgttgttgctgtttgcgcaaagctctcttgatgttggccaacttctcgcggtcgcagctcaaagtggcggccagtgcagctacttcctggatgtccacctcaagctgggcacgtagatccctaaattgggtgaatgatcaagtcaggttggtgttctttactttggtgttggtgcttacgatttccaaacttaaaatcttaagtttatctttaaataacattaatacttttggaaatggaaacatttaggtgattatttgtggcgggttaataagtgggggtatctccttggctaaaatccatttcgatctaagcctaaaagattctcttttacgcaaagctattagtaaaggtctcaaagtcttatctaaaatgtatatcgaatgctagtaattgggccgtgagaaaatggatcttacccccagtggttgcccttgtgcgtcttcttcagcgaattttgctggaattcgtcgtgagttcgtggtttcaccagatgcgtgctggcgaacatttgcatgaggaccgaagccttgtccagcaagccatgtgccttgctgtgcaagctctcgccggaagaatgggcacccaatcccgaggatggcggggtagtagctgtcgtagctggagcgtttgtggcaacgtaacttgcctgtgaactccgtgctgtctgctttgcagcgtagctgttgtacgcaccggatagaagcttcagtcgatccccaacggatccctcaatggcatcgcactgaaggaaggcaatgaagcgctccaagtcagttatctgcgtcttcagttgggccaccagttgctccttcatcttcagagggcccacaaa

SEQ ID NO: 28871 - DNA, 279 bp, DROSOPHILA
atggccctgcccaagccgaggaactgcgagtctcctccgacggcgggcggcactaccggaggcccagggtgcaggcacctcatgaagggaaccatcaaactggaggcagccgattccgctggtatgcgaagtccgtgttgtataagctgctgcaatgtgcgggcaaagttcttccgcacaaccgtagtcaattccctgccaatagtggcaatggaatcaccgcgtgcatgcgtcgtccgccggctcttgctctccttttcccactcgaagttggagtag

SEQ ID NO: 28872 - protein, 92 aa, DROSOPHILA
MALPKPRNCESPPTAGGTTGGPGCRHLMKGTIKLEAADSAGMRSPCCISCCNVRAKFFRTTVVNSLPIVAMESPRACVVRRLLLSFSHSKLE

SEQ ID NO: 28873 - DNA, 2648 bp, DROSOPHILA
tatatcctccatatgtatatgttatcactaatttgcaaagctaaactaagtccatatatacaaaccaaatatcggaggtgcaagtgacgaacacacactatattgaatgtttttgcttgttaaagtaaataataaaaatgaaaactcgaaatcacgaaatccatagccatcgaggatcacaatccgcccatttacggctgagcctgttcctgttcctgctgcagtttgtcccgcttgctctgctgggcagtcaggtggttctgcacgaagctgtggaagttttgttcttcggcggtgcccttcgcgtcctcctccatctcctcctcgtcttcgatttccgccgactcgggcaccagactaggtgccattaggaaaatgctgtttccagtgtgcggcggtgggtcctgaaatagttaagaccctgcagtgggtgcacaaatagccgaggaactgttcctacctgaagcgacaatcccaggggaacggcatggccgtcctcttccacatgatccactggctttggacccgtcgcactctccgccagtcgctcttggcgcttcttttcgtaaacaggcttgtagtccgtctcgtactcgtccacgctttcgagaatcttcgtcagtagctgggtgaagcctacgcctgtcttggccgagacgccgcacgttcttagattctcgtagaaggtgtccagggtgagcgacatggtgcgcgtgaggttgctcacgaagctgtgctcctcctcctgggcctcctggaaggcctcgaagtctgtcatccaatccatcacaaatccgcagtcctttaggtcgatctgtttgaagcggaaaagaagttttctatacatctggatatctgggttgccgggaaagtcgttaccttgttcagcgccacaaggaagggcaaacgggtcttgtacaggatggagcaggcgtacagcatgttggacatgaaggtggtagggcaagcactgcgctccacatccattacatagaccacaatggtgggaaacatggtggccagtccctcggttatgatgctcccggaagccgaccagttaaacacctcgatctgtccgggcgtgtcgatcacacaccacttgtgtccgcgctcgccagcgcgacgcactagctccgcaaactgtgccattttggtggtgaacatattgagcgcggtcacaatgccaccgttgggacccagttggtactgcttcatcacctcccggtagttgaccgtgtcccgtatgtccacgtgcgccgcgtacggtacttccctgcacgccggatccaggttgaccacgtacggattgaacttctcctgggcgtgctggatgagcttctgtgtgaacgtggtcttcccgctgccggccattcccagcaccagtatgcacacgggcgactcccggattccctcgctcagcgacagcgcctccagcttgatgctctccactccctctgccatttctctcacggcttcactaagaatcaaaacaaaaacaggaggcgcaaaaacaagcgtgcagaggcagtgtgaccgtcctatggaaagtgtgctctttgcgccgcctgaattcgcttcagataccaacaaacatcagctgttgttgctgctttttatcctgcgtggaaacatgtcggccattacatagttaacacactcccttaatcgcagcagccttcgtggaatcacacatcttcagttttgccagttcagtttttgcttgcccgccaaaaaaacaaatcaaaaaaaaataccgaagagtttagaacataccgtatatatcgaaagccataataagctttaaactagttgtacagtaataaaaatgccaccaccagaagccggcaattgaagcgcgtttatttgccgtgcattagttttattatttggcattgttttacataataaaagttgtgaagcaatggagacccgactggaagtgctcttgcgggagccgaatccattgttcacccgttggctggagcgctggctgcgcgaagcggagcgccgagaacagaagtcccagtttagcctgcgccaggcgttggagtccctaaaaagctaccctctgccattggccagcggacgagactgttccattctgcgcggctttgggggcaccctctgccagctaatcgacgaggaacttcgccatcacagaggcctccaattgctgccacaggaggccgtggttcaggagcgctacgagcagcaggtccaggcggtagtacgcaaggttcaggagaagcagctggaacaccagaaacgccagaataaatgcgacaggcccaggaagctaaccaaaaaagatctggcggagctggcagcccttgaagagcgggagcgcgtcgtgcgaatgaaaccaggtcaattccagttactccttttggtggatactcaggaaaccagtggcaaaaacaagagagttctggaccagacgaggagctacttggagtccttgggagcccgtcatgaagtgcgtcgcctgacaatcggcgatttcctttgggtggcccaggatcaagagggcaatgaactggttttaccctacattgtggagcgcaagaggatggacgacctggcatcgagtattcgggatggtcgcttccacgaacagaagcacaggctgcagcactgcggcctgcagc

SEQ ID NO: 28874 - DNA, 576 bp, DROSOPHILA
atggtgggaaacatggtggccagtccctcggttatgatgctcccggaagccgaccagttaaacacctcgatctgtccgggcgtgtcgatcacacaccacttgtgtccgcgctcgccagcgcgacgcactagctccgcaaactgtgccattttggtgttgaccgtgtcccgtatgtccacgtgcgccgcgtacggtacttccctgcacgccggatccaggttgaccacgtacggattgaacttctcctgggcgtgctggatgagcttctgtgtgaacgtggtcttcccgctgccggccattcccagcaccagtatgcacacgggcgactcccggattccctcgctcagcgacagcgcctccagcttgatgctctccactccctctgccatttctctcacggcttcactaagaatcaaaacaaaaacaggaggcgcaaaaacaagcgtgcagaggcagtgtgaccgtcctatggaaagtgtgctctttgcgccgcctgaattcgcttcagataccaacaaacatcagctgttgttgctgctttttatcctgcgtggaaacatgtcggccattacatag

SEQ ID NO: 28875 - protein, 191 aa, DROSOPHILA
MVGNMVASPSVMMLPEADQLNTSICPGVSITHHLCPRSPARRTSSANCAILVLTVSRMSTCAAYGTSLHAGSRLTTYGLNFSWACWMSFCVNVVFPLPAIPSTSMHTGDSRIPSLSDSASSLMLSTPSAISLTASLRIKTKTGGAKTSVQRQCDRPMESVLFAPPEFASDTNKHQLLLLLFILRGNMSAIT

SEQ ID NO: 28876 - DNA, 11287 bp, DROSOPHILA
ggcaggagtgctgccaccgctgatgttggctaatcctctgtccctgtcgcgatcccgctcaaatccacctccgccactagctccggtcacaaatccgcacaccgcactcaatccactggaaatcgaactggagcccagcccacagctagcgcgcccgcttccgctggtactcctgctcccagaggcgcttcctcctgctccacctcctccgcagcctcctccgccaccacctcgttccgtggatgccacgccaacgcctccgctgatcgactttagcattaattcatcacacgccggaaggatcctccgtcgtcctcgttgtgggtaatcgtgctccggttttcacaaattccagattttatatgcaattgtatacattcgcagcttaactcgtagctgttatcggctatcgataacgcaacagtatagccatggtatttggtatatttcacactgttcgctatagttcacacacatacactctcgcacggaagatttaactgaaccgaaccattataacggtagaaactgttaactttacttttccaataaagaacttggaatttaacttaaaactaaatgttccttagcattgccgcgtggcgcccacttgaaatgggttcaatgtggggcaggcgtgtctctttgcccattctttttaaatttttaaaattgtgtgcagactcaccacgttctggtggcattagcggccgacgagaatttcgtcgctgacttcgtagttcattttgttggcttgcatttaaagacgccatcgaacgtaggatatttaagcacaaacacaattattacgattttaaccaaccgcttaaccagaaaactgaactttttgtgacgctttgcagttggcgggcggcatgtctttggtatataatgtgtgtcaaatgaatttgcgtcaagttggcgtcggtgagttaggacggtatttatggtcggaaaatacgtggtcacactgtacatataaaaaacgacgagaagcgggtttgtctaaaataaattgttgaactaagttaaggtagaattaggacaatggccagcggatccaggacaaccattttgccccagtcgaaggaggcgcttctgaagtcctataatgcgcgcctcaaggacgacgttcgcagcatgctggagaattttgaaggtaagtgcggctcagttgctccgagcaatagattgtaataccgtgttctcctccagaaatactcaagctggcgcgccgtgagagccacagccagatttcgaagaccacgcagtgcgaacaggatgccctggaaatgcaggtccgcgcggccaacatgggtgagtaaatccactccctgggaaccagattcgagccatttccttcatgcattccgctttatagtccgtgccggcgagtctctgatgaagctggtggccgacctaaaacagtacctaatcctcaacgactttcactcggtcaacgaggccatcacaaacaattcgcagctgttcaggaacacacagagcgagtgcgacaagaagctgatgaaacttagggacgaaatggccatggacttgtacgacctggaggaggagtactacaccagcatttttaagtagcgctaggaggggaaggggttcaccttatttgtgatgaactggctttggccgaactgtagaatttaataagaaatcattaccacattcacttgtaaattttgtttagcaaacagctagtcgcgtcgcactcacaagacctgctcctgttccgcctccgaggacaaggagcgactgtccggagaggccgcgctcaggctgtcaactaggtcgcccgtgtaaaagagcaccgccttcgggacgatttgggtgcgtagcaggaagcccacttcgaaatcgttgccaaggatcagcttggtcttttcatccgcgagcgacaggtccaaggcctgcggcggagcaaagaagcgaaagaaggactcccgaggcatgaccttggtgactcggtgtgctctgttccttcgcctgctttccaccgtttggagagtgagattggagccatcgcgccagtggatgtggcagccttcgcaacgaactatttcgggcccttcgaacagaaagggatactccgggtccgccgagtgctgcagaaagtagcgcttcgtgagcagcagcgaggaatcgtgcaggaagctattgggccgaaactgaaagatgaccatgtagctgtcctggtcgtaagccaggcgcacatccattaggctctccagaagcggctcgtcgtgatcctggaccaactccgagagcaggggcacgttctggaaaactgtcagccaaaagcgtggaacacccagcgtagtcggcgaaaccggagccagtttttgcctcagctgtcgcagctcctcgttgttcccgaagtccaggtacagagcatcctgcgggtcctcgggccaggtcttctccgtttggatcggtggctccaccgaaccctccaaaatatcccgcctcgcatcgaagagcgcgcagctctggccgtagaaacgtcgctccagctcgtagacttcccggaagaactgctccgaaatgcgtacctgttgcagctgattgtgccgcagtgcccgtatgcggttctgcacgggctccgccagctggccgatcatgtgccgcagaaaggccttccggctgcgggcgggaaggtccgccggactcaaagccggctctgtggactcctgggtatatgtgcccagggagcgcaaggacccgctgatgccgtctgccctcgactccgtgtggctgtcttcctgggtaaccccctccgcgctgtcagccatcccaatcattgtgcaattcggtgcaataacttcgaaatttggcaacatatatgtatataaatctacaagtatattccagctctgcgactgggcacttggaaactactatgctagatcaaagctgttccttgatttccacagaaaccggcctactactgggaacgaaaattcggctgatgattccttggatttgcccagaagcaatcgcatttttgattacaataactgcgtaatctaacaaataatttcgcctacgaggaataccacttcagagttacgtgcataattaatgaaggcgaattccagaaacagtgcatgatttgccgaattccgggcaaatcggtggccaatatctgtcggcggttgcgttatcggagctacctgctcatgagcccagatatgggctgtggactggacactgaagggagggtcatgcccggcacttatcggcccaccataagctgacattgcggcaggtcggaaccggacggcagcataatgctccattcagatcccgagcatggtttattttgttggattgaagctatctgccccgccgctcgcctcttatctgcgacacctgggcacttgggcccagtcttggtgcctggtcttgggttttattggcccgacggagcgataagtggggcccgttgtcttttgggtgccataaaccgatggcccgaatcgccattatttattgggagaaaaaccgaagtagctgtccaatctaatccgttcgtctgtcgcatgctaatttatgggcgactaatcctcacggggggtccaattcctccaccagcgattcggtaatcttcctcatcgacccgagtccaccagattgcagctgcaccggatggcctccagtggatattgctgttggattgttggttaactgaattagtttggacttaccgatgacatcagcgcggccaatgacttcagaatctcgaatgtcattcaaacaaaatctctttattttgataggatgggtctcccccatacttttacatgctatcttaaactgaaaacaaaaacaattcgtcggcgtcctagaagatgaagtcttcgtcctggccctcctcttccagcaacgagaggcttctctcgaagcgcttgatgtcctggtaccagccggggtccccggacgatatatcctccggcctgccgcccttgtggcggtacaggaactcggcgtggccctggccgggaactccgttgaccgtgcaggccacaaactggttgaacaccttagactcccagtcgccgccgacgtagcgcagcgcggaggcctccacctggatttgcacgaggtactcccgctcctcggtgcgcacaatgaaattctggtgctgcggcggcgttcccttttcgccgtacgagtacagctcgaagttgctcccggtcagcggctgatactgccgctcggggctgcacacgtagcccaccttcagggaggacaggaagaaggacggctgactgaggctgcccaccaccatgctgctgccatcgtccataaagagggcaaagtacacgtaccggttgatggagcttaggcagcgctcggtgccgaagctgtggtcccggaagcccaccattttcagcgccagctccttgccatcgagcgtgacctggccggccagttctccgttctgttcgtagtgggtgcgcttctctacgatgtggttgacgctgcgcagcaggctgtagaacttttcgttccaggcctctctggctatggagtcggctatcagggcgctgctcagatctctgttgtagtcgaagtgctcagcggaggagctttcgaaacggaggtccaagtccacggctacgtcctgcacgtccggcccttgagttttcagcagtccggagtacttgagccgccacacacgcatagatgcctcctggtagacgtggaagcctccaccctggaacgcgttgctctccgctccatccgcggtggtgaagtataccatatcgggcagattcggcgaactgaacaggccgctttcgggaagccacaggtacagtgccgccttgaggactccgcgcctccttcgctccaaggtgaccattagtttctggccctccttgttggccgccatgaagctgaccacgtcatagctcttcgggtcgttgctgagctgctgcggcctgtcgaccttggccaggtgctcctcggagccgagcagctcctcgttccgacggtagatgcggtacctcaggcggcgaaggacaagcagggcgatccagaacttcacccggtaaaagatgcctttcagtgggtacttgccgaagattagtggcggcttcaggcccagtagcttaagtgccacgaccaccaaggccgttagaatgccgaagatcagcccgagcgctgcgatcatgttgtgtcccaagatgctcaaaatctgttcaaaattaaatcctctttggagttccgcggaatgtcgatcctcgtcaaaaatgctccgttaccgaacggcttggccaattggacgcgactgcgaggcctgcactggacaatgtgtggggaagtgggtcttgtgtcccgcttatcgccactcgataagccgccaccgtctaaacccacttttcggccccacctcctcggactgggcttatcgggtcggaatcgacgggctttgcggcgatgcatgactagctcgctaaatctggatctgtctgcgctcgcgatttctgattgatacattagctggactcgtcatcgtcatcgtcgccaggagcggccgatagccagctccagatagccgtggtgcaggctatcttctggtgcaaagtctgcttgcgtagaagttccacaacgattggccaagataaaaaattgcatagaccgagtgcttcagcaaatgtgttcgtgggtacttggatgtgacccgactggatgtagtggggctctggagctgacaatctcgccaaaagagagattttccaagtcgatggatgtgaaaactagctggagtgctgaaacctagccgttagaattcgattcaagtgcttcaagtgccagactcccattgccaacactagaaaatgtccttaagggacgcgaagagcacttgccaacactcggaaatcgcgcctgcgccggaaaacaacaagcgcctaatcaataaaaacataaaatttagtgcgcaaggagcatcagcatcagcagcaggaacaggaacaggacaaaaacaatattccccaaggactccaacagaacgcacagcaccttccgttgaggccgagaaagccacattcgattggcaggagcttcgaggacagaggatacgcagctaccaggtctgcagcccgcaagagtgaacattgaggatttgctgtcgcaaaggtaacaactgggaaaagtgttggaggagggggggggggggggtcgcggaagtggaggcagttgtgactcgaataaccaaactcttttggaccagggcccatctgaggctctgagcagccaggtgaaccagtcaggtccagggaagaaagctccagaggatcgaggcagccgcggaagcatcccaagcgcatacgaagaacaggacaagatgtacaagaccatcaggcacggggagaacagcttgcagtacacgattctgccccagaacgacgacttccgcatcgagggcaagctctcgggctcgggacgatcgggctccgccggcgggggagcctcctccaccgcctccgtcaaggccaagggccagcgacgccggcgatccttcttcgcctacttgggcttgatcttcgtgtgcaccgtgatcattggcgccgtgctcatacccttccttgtgtccgccgaatgtctgccgaaccccgcagaatggttcttgaagaccaaggcggccctgatccacagtccgcagccaggcggtggagattcggctggcacttcctccatactgcccacaggatcgccctttctgcagcagaacgtgggccggaatgtgaaaattgtgaaccggaatggcattgagcagttcgtaattcgggtgaacaaaaccaatccgagtgctagcaccaccaggagcaccaccactggccccaacatcgtggccaccagttccagcagcagcagcagcacctccaccacaacgacgacgacaaccgctccagcccccacaagcacaagcaccaccactacgacaaccagggagccgccggtgaccactccgaggtacccggccccgccgccgcctccgccggcgaccacgatcaccacccgcatcatccaggtgcccctactcaagtccgccgccaagaagcccataatgccgccagtgctggccaaagtccaggggccgcagatccaggccggaggaggccaaaactccaggctgcaggtacaggcgggcacggagcacgagtcgcaatcgaaattggaatcggaatcgcaatcggagggcggagggcaaaagagcaacggtgcctggataaagacgcactgggcctacatcgatccatcgacgtacttccaatggagcgtaagtcgcacgccacaacttagctgccctgttggccgccactaactcccattactcccattgcagggctacaaggacgaggatagcgtgctgctgcccgctctgctgggcttcgccctcatcggagtgattttgatcatcacggtctgcctggtggcacgcaacaagcgcaccattgtgtcctccgtccgcaagcggaatcgcaatgtgagtatactgtgcatttggcttgaccaacgaaccggaagtgggaggttgggtgttcgcttggtgagcggcgcgtgagcgggtgcgtgggtggtagcgcgtccttgagcccgttctcctgccgttgtagttgtttttgttgttgttgttcggcatcgcgattgaatcacgaatcctagcattaagtctgcatggctaggtgttccaaggtgttccacctgcactgcatcgagctccaaacataatcgactaattcgagctgcgcgctgttcgtgtagcacagtgaaagaggtggtgcggtcttttgtttacctttaagctgttaagtgaagtgtgaaaatagtgcaaatcttgaataattgtgtataaagaaccaaaactttgaataaaaatatatttggcgccaaatcgaactgcagccctggtcgtgagcgatggcagtgcggaaaatcatcgcacgaagatcgccatggcaacaaggaccaaaaaataccaaaaccaccacagcagagacggcgtcggcgcgggtgcgagcaagacggcagtcgcgcagagagagtgcgtggcactttagccagggctgggcaaaccacaaattggaaccagcgaaaaataccttcgaaatttgcaagctgagtgtgacaagaataaatagttcggccaacaaatcggcttcacagtgaaaagtgcaagcaaacaaaaagtgagaagtgcgcgatgtgccatccctggtgtaaacacgcacacacacacacacacacgcgcaggcggcacacaggtgagcaccagtagcgcagtcgacagcagcagcggcgcaggcagcggcagaggcagagcgcccagagcagatacttcagtttgcgtcgattgtgccgattgagattcagattcagttccagatcacaacccgaatcggagccgccagtgtgtgccagacgcaacgcaacggaacggaacgcaaggcaacgtctacgtcagcaaaatcacgctgcaagtcaccagttggccggaagattggcgaaaatcctgtgagtaaaaatggcaagcgtgcaacaacagttttgccagcgtgtcgcttggagtctcccagtgtgcgtgcgtgtgtgtgagtgagtgggagcgcgcagccgtgtgcgtgcgtgtgtgtgcgagcgtcggtgagcagtgccaacaaggcaaaatgtgtgtttgctgttggggagcatcttgaccaaagtagtcactcctcggagcgccaggaggcgctcaaagggtattcgcccgagcacgacaccattcggcagctgtgtgcacaggttcccattcatggaaagtgggcagaggcgcggaatatgccaggcgagcgcgcaggtatcagttgtgccggaccgcacttgtgggcacttgtggctggcagattggagccgggatgcggagtagcaccattggagcgcactgctactcagttggtgttcgttgctaaaagccactccgggcagcatcgacggcatcattcaaccgatgcaacagacggccaagctgaaagggcgacgtgtcacatatgcgaggctactacagatgctcccccgcaacaacaagggcaggaagtcacgcagggaaaggcgaacagccagcagatcttgaataaccaactcataaaccatttcagaaacccctgaaccagagcaatggccattaaaccgggactcggtcgcaagaccagcaacaagaacccgcctatcctgagccacgagtttgtgatccagaaccacgcggacatcatctcctgcgtagccatggtcttcgtggtcggcctgatgaacgagtcgacggcggcgttcgccagcgcgttcatatccctgcaccacaacgtcagcggtgaggaccccagccgggagcagccatatggcaagccatacacctacatcgccggcatcaaggattactgcgcgatattcttctacacgctgacctgcataatcatgcacgcgatcatccaggagttcgtgctggacaagatcagcaaaaaactacacctgtccaagttcaagctggcccgcttcaacgagtccggccaactggtggccttctacctgctctccttcgtctggggcgcccacgtgctgctgaaggagggctacctcggacaggtggcccagctgtgggagggcttccccgaccatcccatgagctttctgcacaagttctactttgtggtgcagctggcctactacctacacatgctgccggagctctacttccagaagatcaagaccaaggaggagcagcagcccaagatcgtgcactcgatcagcggcttcaccctgatcgtcctggcctacacgcttagcttccagcgcctggccctcgtgctgctcacgctgcactacttcagcgagctgctgtcgcacgtcttccagctgatcggcgtgttcgaccgcgaggagcgactggccaagctgcgggtggtgaacaatgccgtctttttcctgatccgcttcgctacgtccgtgatcggtgtgctcacgctgtactacggcatcgggggtgtgcgatccctgctggccttgggcggcctgatcgccctgcagggctacctggtcttctccttcatcacggagcagctgcgcgccaagcgcgaggccaagaaggaggccaagcgggaggccaagctggcgctgcagaccaaaaagccagccaagacgcccaaggacaaggtgaagcgcaagaaggagagcgacctgcctgaggcggaccagacctcgcccagtcccatcaagcagaagctcaagtgagagccgtcccggccgagcagagcaacaaaatcttccgcacacttccaattcaaaacgaatgagagatagagagagcagcaccatggacaggagcccaggttggattggtggacacttgccactgaccactgaacactggctacttggctccctgtttgatgtaatctcgttagctcaaaactaccactgcaacatttctgctgcatttacttcctcgacacacaaaagaacgaactatttcttagcctaaatgttttgtttcatttaagtttacgtcatttttaaaacaaattttttttatttttatacatacaaaaaaaaaaaatgaaaaaagaaacaaatacaacaaaagagaaaagcaaagcccacactgcgtgttttcaattgctcctcctccttctcctgcaacttcccattgtcctggtgattaccccaaggtgatccatatggtgatccgaagcctgaataacttttctctcttgcaggacatcgaggaacagggcgccgaggacaacgccaccctgctgaccaccaccaacctgtcggacgacgactaattggagctcgttcagatgattccctgttcgccctcggttccagcttttgatttccggcctgcttgagcgatccaaagtcgctggctgggccatcgcccacttcgcccatccgtttgagacacacacgattacccagacacctggacctgctgagatggctccacgccagctgatccagtatgctaatcccgatcccgatccccaaatttcccctccgcttctggccatgaggcaggcggaaggcggagcaaagagtaatccaagcacgaagaagactgtttctgaaactactgtttagctatccccaaatttttccaatgcttgtcttcaccccgcactgtcccccccctcttaccaatcacccatccttacaaaactgtgtgcgtgtgtgtgctgatagtgtgtgtgtatgtgtgtgtgtgtgatccccaagatacccgtta

SEQ ID NO: 28877 - DNA, 4775 bp, DROSOPHILA
tttgtctaaaataaattgttgaactaagttaaggtagaattaggacaatggccagcggatccaggacaaccattttgccccagtcgaaggaggcgcttctgaagtcctataatgcgcgcctcaaggacgacgttcgcagcatgctggagaattttgaagaaatactcaagctggcgcgccgtgagagccacagccagatttcgaagaccacgcagtgcgaacaggatgccctggaaatgcaggtccgcgcggccaacatggtccgtgccggcgagtctctgatgaagctggtggccgacctaaaacagtacctaatcctcaacgactttcactcggtcaacgaggccatcacaaacaattcgcagctgttcaggaacacacagagcgagtgcgacaagaagctgatgaaacttagggacgaaatggccatggacttgtccaaggcctgcggcggagcaaagaagcgaaagaaggactcccgaggcatgaccttgaagcggctcgtcgtgatcctggaccaactccgagagcaggggcacgttctggaaaactgtcagccaaaagcgtggaacacccagcgtagtcggcgaaaccggagccagtttttgcctcagctgtcgcagctcctcgttgttcccgaagtccaggtacagagcatcctgcgggtcctcgggccaggtcttctccgtttggatcggtggctccaccgaaccctccaaaatatcccgcctcgcatcgaagagcgcgcagctctggccgtagaaacgtcgctccagctcgtagacttcccggaagaactgctccgaaatgcgtacctgttgcagctgattgtgccgcagtgcccgtatgcggttctgcacgggctccgccagctggccgatcatgtgccgcagaaaggccttccggctgcgggcgggaaggtccgccggactcaaagccggctctgtggactcctgggtatatgtgcccagggagcgcaaggacccgctgatgccgtctgccctcgactccgtgtggctgtcttcctggaagatgaagtcttcgtcctggccctcctcttccagcaacgagaggcttctctcgaagcgcttgatgtcctggtaccagccggggtccccggacgatatatcctccggcctgccgcccttgtggcggtacaggaactcggcgtggccctggccgggaactccgttgaccgtgcaggccacaaactggttgaacaccttagactcccagtcgccgccgacgtagcgcagcgcggaggcctccacctggatttgcacgaggtactcccgctcctcggtgcgcacaatgaaattctggtgctgcggcggcgttcccttttcgccgtacgagtacagctcgaagttgctcccggtcagcggctgatactgccgctcggggctgcacacgtagcccaccttcagggaggacaggaagaaggacggctgactgaggctgcccaccaccatgctgctgccatcgtccataaagagggcaaagtacacgtaccgcgccagctccttgccatcgagcgtgacctggccggccagttctccgttctgttcgtagtgggtgcgcttctctacgatgtggttgacgctgcgcagcaggctgtagaacttttcgttccaggcctctctggctatggagtcggctatcagggcgctgctcagatctctgttgtagtcgaagtgctcagcggaggagctttcgaaacggaggtccaagtccacggctacgtcctgcacgtccggcccttgagttttcagcagtccggagtacttgagccgccacacacgcatagatgcctcctggtagacgtggaagcctccaccctggaacgcgttgctctccgctccatccgcggtggtgaagtataccatatcgggcagattcggcgaactgaacaggccgctttcgggaagccacaggtacagtgccgccttgaggactccgcgcctccttcgctccaagctgaccacgtcatagctcttcgggtcgttgctgagctgctgcggcctgtcgaccttggccaggtgctcctcggagccgagcagctcctcgttccgacggtagatgcggtacctcaggcggcgaaggacaagcagggcgatccagaacttcacccgggcccatctgaggctctgagcagccaggtgaaccagtcaggtccagggaagaaagctccagaggatcgaggcagccgcggaagcatcccaagcgcatacgaagaacaggacaagatgtacaagaccatcaggcacggggagaacagcttgcagtacacgattctgccccagaacgacgacttccgcatcgagggcaagctctcgggctcgggacgatcgggctccgccggcgggggagcctcctccaccgcctccgtcaaggccaagggccagcgacgccggcgatccttcttcgcctacttgggcttgatcttcgtgtgcaccgtgatcattggcgccgtgctcatacccttccttgtgtccgccgaatgtctgccgaaccccgcagaatggttcttgaagaccaaggcggccctgatccacagtccgcagccaggcggtggagattcggctggcacttcctccatactgcccacaggatcgccctttctgcagcagaacgtgggccggaatgtgaaaattgtgaaccggaatggcattgagcagttcgtaattcgggtgaacaaaaccaatccgagtgctagcaccaccaggagcaccaccactggccccaacatcgtggccaccagttccagcagcagcagcagcacctccaccacaacgacgacgacaaccgctccagcccccacaagcacaagcaccaccactacgacaaccagggagccgccggtgaccactccgaggtacccggccccgccgccgcctccgccggcgaccacgatcaccacccgcatcatccaggtgcccctactcaagtccgccgccaagaagcccataatgccgccagtgctggccaaagtccaggggccgcagatccaggccggaggaggccaaaactccaggctgcaggtacaggcgggcacggagcacgagtcgcaatcgaaattggaatcggaatcgcaatcggagggcggagggcaaaagagcaacggtgcctggataaagacgcactgggcctacatcgatccatcgacgtacttccaatggagcggctacaaggacgaggatagcgtgctgctgcccgctctgctgggcttcgccctcatcggagtgattttgatcatcacggtctgcctggtggcacgcaacaagcgcaccattgtgtcctccgtccgcaagcggaatcgcaatatcacaacccgaatcggagccgccagtgtgtgccagacgcaacgcaacggaacggaacgcaaggcaacgtctacgtcagcaaaatcacgctgcaagtcaccagttggccggaagattggcgaaaatcctgaggcgctcaaagggtattcgcccgagcacgacaccattcggcagctgtgtgcacaggttcccattcatggaaagtgggcagaggcgcggaatatgccaggcgagcgcgcaggtatcagttgtgccggaccgcacttgtgggcacttgtggctggcagattggagccgggatgcggagtagcaccattggagcgcactgctactcagttggtagcaatggccattaaaccgggactcggtcgcaagaccagcaacaagaacccgcctatcctgagccacgagtttgtgatccagaaccacgcggacatcatctcctgcgtagccatggtcttcgtggtcggcctgatgaacgagtcgacggcggcgttcgccagcgcgttcatatccctgcaccacaacgtcagcggtgaggaccccagccgggagcagccatatggcaagccatacacctacatcgccggcatcaaggattactgcgcgatattcttctacacgctgacctgcataatcatgcacgcgatcatccaggagttcgtgctggacaagatcagcaaaaaactacacctgtccaagttcaagctggcccgcttcaacgagtccggccaactggtggccttctacctgctctccttcgtctggggcgcccacgtgctgctgaaggagggctacctcggacaggtggcccagctgtgggagggcttccccgaccatcccatgagctttctgcacaagttctactttgtggtgcagctggcctactacctacacatgctgccggagctctacttccagaagatcaagaccaaggaggagcagcagcccaagatcgtgcactcgatcagcggcttcaccctgatcgtcctggcctacacgcttagcttccagcgcctggccctcgtgctgctcacgctgcactacttcagcgagctgctgtcgcacgtcttccagctgatcggcgtgttcgaccgcgaggagcgactggccaagctgcgggtggtgaacaatgccgtctttttcctgatccgcttcgctacgtccgtgatcggtgtgctcacgctgtactacggcatcgggggtgtgcgatccctgctggccttgggcggcctgatcgccctgcagggctacctggtcttctccttcatcacggagcagctgcgcgccaagcgcgaggccaagaaggaggccaagcgggaggccaagctggcgctgcagaccaaaaagccagccaagacgcccaaggacaaggtgaagcgcaagaaggagagcgacctgcctgaggcggaccagacctcgcccagtcccatcaagcagaagctcaagtga

SEQ ID NO: 28878 - protein, 1575 aa, DROSOPHILA
MASGSRTTILPQSKEALLKSYNARLKDDVRSMLENFEEILKLARRESHSQISKTTQCEQDALEMQVRAANMVRAGESLMKLVADLKQYLILNDFHSVNEAITNNSQLFRNTQSECDKKLMKLRDEMAMDLSKACGGAKKRKKDSRGMTLKRLVVILDQLREQGHVLENCQPKAWNTQRSRRNRSQFLPQLSQLLVVPEVQVQSILRVLGPGLLRLDRWLHRTLQNIPPRIEERAALAVETSLQLVDFPEELLRNAYLLQLIVPQCPYAVLHGLRQLADHVPQKGLPAAGGKVRRTQSRLCGLLGICAQGAQGPADAVCPRLRVAVFLEDEVFVLALLFQQREASLEALDVLVPAGVPGRYILRPAALVAVQELGVALAGNSVDRAGHKLVEHLRLPVAADVAQRGGLHLDLHEVLPLLGAHNEILVLRRRSLFAVRVQLEVAPGQRLILPLGAAHVAHLQGGQEEGRLTEAAHHHAAAIVHKEGKVHVPRQLLAIERDLAGQFSVLFVVGALLYDVVDAAQQAVELFVPGLSGYGVGYQGAAQISVVVEVLSGGAFETEVQVHGYVLHVRPLSFQQSGVLEPPHTHRCLLVDVEASTLERVALRSIRGGEVYHIGQIRRTEQAAFGKPQVQCRLEDSAPPSLQADHVIALRVVAELLRPVDLGQVLLGAEQLLVPTVDAVPQAAKDKQGDPELHPGPSEALSSQVNQSGPGKKAPEDRGSRGSIPSAYEEQDKMYKTIRHGENSLQYTILPQNDDFRIEGKLSGSGRSGSAGGGASSTASVKAKGQRRRRSFFAYLGLIFVCTVIIGAVLIPFLVSAECLPNPAEWFLKTKAALIHSPQPGGGDSAGTSSILPTGSPFLQQNVGRNVKIVNRNGIEQFVIRVNKTNPSASTTRSTTTGPNIVATSSSSSSSTSTTTTTTTAPAPTSTSTTTTTTREPPVTTPRYPAPPPPPPATTITTRIIQVPLLKSAAKKPIMPPVLAKVQGPQIQAGGGQNSRLQVQAGTEHESQSKLESESQSEGGGQKSNGAWIKTHWAYIDPSTYFQWSGYKDEDSVLLPALLGFALIGVILIITVCLVARNKRTIVSSVRKRNRNITTRIGAASVCQTQRNGTERKATSTSAKSRCKSPVGRKIGENPEALKGYSPEHDTIRQLCAQVPIHGKWAEARNMPGERAGISCAGPHLWALVAGRLEPGCGVAPLERTATQLVAMAIKPGLGRKTSNKNPPILSHEFVIQNHADIISCVAMVFVVGLMNESTAAFASAFISLHHNVSGEDPSREQPYGKPYTYIAGIKDYCAIFFYTLTCIIMHAIIQEFVLDKISKKLHLSKFKLARFNESGQLVAFYLLSFVWGAHVLLKEGYLGQVAQLWEGFPDHPMSFLHKFYFVVQLAYYLHMLPELYFQKIKTKEEQQPKIVHSISGFTLIVLAYTLSFQRLALVLLTLHYFSELLSHVFQLIGVFDREERLAKLRVVNNAVFFLIRFATSVIGVLTLYYGIGGVRSLLALGGLIALQGYLVFSFITEQLRAKREAKKEAKREAKLALQTKKPAKTPKDKVKRKKESDLPEADQTSPSPIKQKLK

SEQ ID NO: 28879 - DNA, 3408 bp, DROSOPHILA
ctcgaccagcagaggcttgtccaaatcgctaaactcactggacatgaccacgtcagtgaagttctcctccttgatgatgaactgcatgcagtgatccttaatgatcttaatactgtgttggggagtgtttacataaattagtttcatttaaatacgatccaaaggctatatctgctctcacttgctcttatccgcattgtagagcgcctccagcacgttaagcttgttaatcttgtagtccaaatactggatacagccgtgggccagccgcggcatggtaaacaaaccggcaagttggtaaatatctgtgatcagaatgatgatgttcttgctgtaagtgtccttcaagtcaattcgatcggtgtaaatgtaattcaatatgatttcaaaggcctcgggggaggcgttggccagtcgcacctccaacatgggtccgcggtccccgcccgcgcccgcattcagagccagtgcatctacctggcccaccccgtagaccttctccatctgctgctggcgtgcctcccgggctgccaaaatcttgttcctcagatacttcgagcgcgccgccacaaaggcgatgtgtgctagtatgcgaatctcctccgctccgacaataaactgaatgtcgcagaactgtttgtcctggaagaattttccgaagtcatcgcgcagcgtgcacttcgggtacgacgagaactggaagcgataggtgtcgccccttctcacactattgtccacggttccgccaaatatgtacatggcatcgcagatgactgccgaggcatggaacactctacccgaaggcacatccgaattctgttcaggctggatgacggaccagacctgcgagtctagatcgtagcagtgtaaatcgttgggcagcgttgagtccgccgatcccccgaagacatacaggaaccgatcgtgatgcaccatcgtgtggccatatcgtcgcgagggcggagctgaggtagcgcctcgcaagacgggctcattggaaatgcgtcgccaagttcgcgtcttgaagtggaactcaaagagcgagttcgttatctgcaagccactctgccccgaaaagacgtacatggcgtccctggccactgccacggggaaattgcagcacgtgggcggacgatcgcccagctgatccacctcctcccactgattttcaccggtgaggtttagcgtccacatgtcgttcagccgagcattgccatcgtagcccgcatagatccacattttgttgtcatacacggctgctccgtgagcggatcgaggaaccggctggcgtccggagaacttccattccacccacatggcgctctggaacttgtattcgaacagatcgttcttgttggtcaagtttgagttggagtgaatgtcgccggtgtaacccccaaagatgaacatagagctgccggccaccaccgccgagtggtggtatcgcggagcaggcggagttcctgttgcacatgcgcggccccatgacttgtccttaacgccgaagcgaatcaggtcgtttagcatgttcttgccgttgtcacctccgaatacaaacatcgcatccttgtaggccaccactgtgtgcttgcttcgcctgattgggaagaaagggatagggaatatagatattttcatctatatggcttcacaactcacttggcgcccacgaactcggcgcattcgagcatcctggtccactgatgcgtggccgtgtaggaggtgaagtccacgttcagggcattgcagctgtagctacccggggaagtggcctttccgcttccactgccacttccactgctggcattgcttgccgcgtcatatgccatactacatcccgatcctcctggtccgctgctgcagctgctgcccggaggatgcgaggaggaggccgctccaccaccgccattccctctagagcttctcattgaactggacatggacattcggagattcgcccgtatgtgctgggcgtctaagcagccggcggtggaggcgcttttcctggccttgttccgtttgctcgacttgaaggagctgcgcaagaagaaactctcgtggtgcggactcgaattctggctgggactctgctgattggcagctgccatacaagcggggcaataaaggatcccggcaggagtgctgccaccgctgatgttggctaatcctctgtccctgtcgcgatcccgctcaaatccacctccgccactagctccggtcacaaatccgcacaccgcactcaatccactggaaatcgaactggagcccagcccacagctagcgcgcccgcttccgctggtactcctgctcccagaggcgcttcctcctgctccacctcctccgcagcctcctccgccaccacctcgttccgtggatgccacgccaacgcctccgctgatcgactttagcattaattcatcacacgccggaaggatcctccgtcgtcctcgttgtgggtaatcgtgctccggttttcacaaattccagattttatatgcaattgtatacattcgcagcttaactcgtagctgttatcggctatcgataacgcaacagtatagccatggtatttggtatatttcacactgttcgctatagttcacacacatacactctcgcacggaagatttaactgaaccgaaccattataacggtagaaactgttaactttacttttccaataaagaacttggaatttaacttaaaactaaatgttccttagcattgccgcgtggcgcccacttgaaatgggttcaatgtggggcaggcgtgtctctttgcccattctttttaaatttttaaaattgtgtgcagactcaccacgttctggtggcattagcggccgacgagaatttcgtcgctgacttcgtagttcattttgttggcttgcatttaaagacgccatcgaacgtaggatatttaagcacaaacacaattattacgattttaaccaaccgcttaaccagaaaactgaactttttgtgacgctttgcagttggcgggcggcatgtctttggtatataatgtgtgtcaaatgaatttgcgtcaagttggcgtcggtgagttaggacggtatttatggtcggaaaatacgtggtcacactgtacatataaaaaacgacgagaagcgggtttgtctaaaataaattgttgaactaagttaaggtagaattaggacaatggccagcggatccaggacaaccattttgccccagtcgaaggaggcgcttctgaagtcctataatgcgcgcctcaaggacgacgttcgcagcatgctggagaattttgaaggtaagtgcggctcagttgctccgagcaatagattgtaataccgtgttctcctccagaaatactcaagctggcgcgccgtgagagccacagccagatttcgaagaccacgcagtgcga

SEQ ID NO: 28880 - DNA, 624 bp, DROSOPHILA
atgcgtcgccaagttcgcgtcttgaagtggaactcaaagagcgagttcgttatctgcaagccactctgccccgaaaagacgtacatggcgtccctggccactgccacggggaaattgcagcacctacccggggaagtggcctttccgcttccactgccacttccactgctggcattgcttgccgcgtcatatgccatactacatcccgatcctcctggtccgctgctgcagctgctgcccggaggatgcgaggaggaggccgctccaccaccgccattccctctagagcttctcattgaactggacatggacattcggagattcgcccgtatgtgctgggcgtctaagcagccggcggtggaggcgcttttcctggccttgttccgtttgctcgacttgaaggagctgcgcaagaagaaactctcgtgctccggtcacaaatccgcacaccgcactcaatccactggaaatcgaactggagcccagcccacagctagcgcgcccgcttccgctggtactcctgctcccagaggcgcttcctcctgctccacctcctccgcagcctcctccgccaccacctcgttccgtggatgccacgccaacgcctccgctgatcgactttag

SEQ ID NO: 28881 - protein, 207 aa, DROSOPHILA
MRRQVRVLKWNSKSEFVICKPLCPEKTYMASLATATGKLQHLPGEVAFPLPLPLPLLALLAASYAILHPDPPGPLLQLLPGGCEEEAAPPPPFPLELLIELDMDIRRFARMCWASKQPAVEALFLALFRLLDLKELRKKKLSCSGHKSAHRTQSTGNRTGAQPTASAPASAGTPAPRGASSCSTSSAASSATTSFRGCHANASADRL

SEQ ID NO: 28882 - DNA, 5055 bp, DROSOPHILA
cttggccaattggacgcgactgcgaggcctgcactggacaatgtgtggggaagtgggtcttgtgtcccgcttatcgccactcgataagccgccaccgtctaaacccacttttcggccccacctcctcggactgggcttatcgggtcggaatcgacgggctttgcggcgatgcatgactagctcgctaaatctggatctgtctgcgctcgcgatttctgattgatacattagctggactcgtcatcgtcatcgtcgccaggagcggccgatagccagctccagatagccgtggtgcaggctatcttctggtgcaaagtctgcttgcgtagaagttccacaacgattggccaagataaaaaattgcatagaccgagtgcttcagcaaatgtgttcgtgggtacttggatgtgacccgactggatgtagtggggctctggagctgacaatctcgccaaaagagagattttccaagtcgatggatgtgaaaactagctggagtgctgaaacctagccgttagaattcgattcaagtgcttcaagtgccagactcccattgccaacactagaaaatgtccttaagggacgcgaagagcacttgccaacactcggaaatcgcgcctgcgccggaaaacaacaagcgcctaatcaataaaaacataaaatttagtgcgcaaggagcatcagcatcagcagcaggaacaggaacaggacaaaaacaatattccccaaggactccaacagaacgcacagcaccttccgttgaggccgagaaagccacattcgattggcaggagcttcgaggacagaggatacgcagctaccaggtctgcagcccgcaagagtgaacattgaggatttgctgtcgcaaaggtaacaactgggaaaagtgttggaggagggggggggggggggtcgcggaagtggaggcagttgtgactcgaataaccaaactcttttggaccagggcccatctgaggctctgagcagccaggtgaaccagtcaggtccagggaagaaagctccagaggatcgaggcagccgcggaagcatcccaagcgcatacgaagaacaggacaagatgtacaagaccatcaggcacggggagaacagcttgcagtacacgattctgccccagaacgacgacttccgcatcgagggcaagctctcgggctcgggacgatcgggctccgccggcgggggagcctcctccaccgcctccgtcaaggccaagggccagcgacgccggcgatccttcttcgcctacttgggcttgatcttcgtgtgcaccgtgatcattggcgccgtgctcatacccttccttgtgtccgccgaatgtctgccgaaccccgcagaatggttcttgaagaccaaggcggccctgatccacagtccgcagccaggcggtggagattcggctggcacttcctccatactgcccacaggatcgccctttctgcagcagaacgtgggccggaatgtgaaaattgtgaaccggaatggcattgagcagttcgtaattcgggtgaacaaaaccaatccgagtgctagcaccaccaggagcaccaccactggccccaacatcgtggccaccagttccagcagcagcagcagcacctccaccacaacgacgacgacaaccgctccagcccccacaagcacaagcaccaccactacgacaaccagggagccgccggtgaccactccgaggtacccggccccgccgccgcctccgccggcgaccacgatcaccacccgcatcatccaggtgcccctactcaagtccgccgccaagaagcccataatgccgccagtgctggccaaagtccaggggccgcagatccaggccggaggaggccaaaactccaggctgcaggtacaggcgggcacggagcacgagtcgcaatcgaaattggaatcggaatcgcaatcggagggcggagggcaaaagagcaacggtgcctggataaagacgcactgggcctacatcgatccatcgacgtacttccaatggagcgtaagtcgcacgccacaacttagctgccctgttggccgccactaactcccattactcccattgcagggctacaaggacgaggatagcgtgctgctgcccgctctgctgggcttcgccctcatcggagtgattttgatcatcacggtctgcctggtggcacgcaacaagcgcaccattgtgtcctccgtccgcaagcggaatcgcaatgtgagtatactgtgcatttggcttgaccaacgaaccggaagtgggaggttgggtgttcgcttggtgagcggcgcgtgagcgggtgcgtgggtggtagcgcgtccttgagcccgttctcctgccgttgtagttgtttttgttgttgttgttcggcatcgcgattgaatcacgaatcctagcattaagtctgcatggctaggtgttccaaggtgttccacctgcactgcatcgagctccaaacataatcgactaattcgagctgcgcgctgttcgtgtagcacagtgaaagaggtggtgcggtcttttgtttacctttaagctgttaagtgaagtgtgaaaatagtgcaaatcttgaataattgtgtataaagaaccaaaactttgaataaaaatatatttggcgccaaatcgaactgcagccctggtcgtgagcgatggcagtgcggaaaatcatcgcacgaagatcgccatggcaacaaggaccaaaaaataccaaaaccaccacagcagagacggcgtcggcgcgggtgcgagcaagacggcagtcgcgcagagagagtgcgtggcactttagccagggctgggcaaaccacaaattggaaccagcgaaaaataccttcgaaatttgcaagctgagtgtgacaagaataaatagttcggccaacaaatcggcttcacagtgaaaagtgcaagcaaacaaaaagtgagaagtgcgcgatgtgccatccctggtgtaaacacgcacacacacacacacacacgcgcaggcggcacacaggtgagcaccagtagcgcagtcgacagcagcagcggcgcaggcagcggcagaggcagagcgcccagagcagatacttcagtttgcgtcgattgtgccgattgagattcagattcagttccagatcacaacccgaatcggagccgccagtgtgtgccagacgcaacgcaacggaacggaacgcaaggcaacgtctacgtcagcaaaatcacgctgcaagtcaccagttggccggaagattggcgaaaatcctgtgagtaaaaatggcaagcgtgcaacaacagttttgccagcgtgtcgcttggagtctcccagtgtgcgtgcgtgtgtgtgagtgagtgggagcgcgcagccgtgtgcgtgcgtgtgtgtgcgagcgtcggtgagcagtgccaacaaggcaaaatgtgtgtttgctgttggggagcatcttgaccaaagtagtcactcctcggagcgccaggaggcgctcaaagggtattcgcccgagcacgacaccattcggcagctgtgtgcacaggttcccattcatggaaagtgggcagaggcgcggaatatgccaggcgagcgcgcaggtatcagttgtgccggaccgcacttgtgggcacttgtggctggcagattggagccgggatgcggagtagcaccattggagcgcactgctactcagttggtgttcgttgctaaaagccactccgggcagcatcgacggcatcattcaaccgatgcaacagacggccaagctgaaagggcgacgtgtcacatatgcgaggctactacagatgctcccccgcaacaacaagggcaggaagtcacgcagggaaaggcgaacagccagcagatcttgaataaccaactcataaaccatttcagaaacccctgaaccagagcaatggccattaaaccgggactcggtcgcaagaccagcaacaagaacccgcctatcctgagccacgagtttgtgatccagaaccacgcggacatcatctcctgcgtagccatggtcttcgtggtcggcctgatgaacgagtcgacggcggcgttcgccagcgcgttcatatccctgcaccacaacgtcagcggtgaggaccccagccgggagcagccatatggcaagccatacacctacatcgccggcatcaaggattactgcgcgatattcttctacacgctgacctgcataatcatgcacgcgatcatccaggagttcgtgctggacaagatcagcaaaaaactacacctgtccaagttcaagctggcccgcttcaacgagtccggccaactggtggccttctacctgctctccttcgtctggggcgcccacgtgctgctgaaggagggctacctcggacaggtggcccagctgtgggagggcttccccgaccatcccatgagctttctgcacaagttctactttgtggtgcagctggcctactacctacacatgctgccggagctctacttccagaagatcaagaccaaggaggagcagcagcccaagatcgtgcactcgatcagcggcttcaccctgatcgtcctggcctacacgcttagcttccagcgcctggccctcgtgctgctcacgctgcactacttcagcgagctgctgtcgcacgtcttccagctgatcggcgtgttcgaccgcgaggagcgactggccaagctgcgggtggtgaacaatgccgtctttttcctgatccgcttcgctacgtccgtgatcggtgtgctcacgctgtactacggcatcgggggtgtgcgatccctgctggccttgggcggcctgatcgccctgcagggctacctggtcttctccttcatcacggagcagctgcgcgccaagcgcgaggccaagaaggaggccaagcgggaggccaagctggcgctgcagaccaaaaagccagccaagacgcccaaggacaaggtgaagcgcaagaaggagagcgacctgcctgaggcggaccagacctcgcccagtcccatcaagcagaagctcaagtgagagccgtcccggccgagcagagcaacaaaatcttccgcacacttccaattcaaaacgaat

SEQ ID NO: 28883 - DNA, 1302 bp, DROSOPHILA
atgaacgcgctggcgaacgccgccgtcgactcgttcatcaggccgaccacgaagaccatggctacgcaggagatgatgtccgcacgttgccttgcgttccgttccgttgcgttgcgtctggcacacactggcggctccgattcgggttgtgatctggaactgaatctgaatctcaatcggcacaatcgacgcaaactgaagtatctgctctgggcgctctgcctctgccgctgcctgcgccgctgctgctgtcgactgcgctactggtgctcacctgtgtgccgcctgcgcgtcttgcaaatttcgaaggtatttttcgctggttccaatttgtggtttgcccagccctggctaaagtgccacgcactctctctgcgcgactgccgtcttgctcgcacccgcgccgacgccgtctctgctgtggcccagtgcgtctttatccaggcaccgttgctcttttgccctccgccctccgattgcgattccgattccaatttcgattgcgactcgtgctccgtgcccgcctgtacctgcagcctggagttttggcctcctccggcctggatctgcggcccctggactttggccagcactggcggcattatgggcttcttggcggcggacttgagtaggggcacctggatgatgcgggtggtgatcgtggtcgccggcggaggcggcggcggggccgggtacctcggagtggtcaccggcggctccctggttgtcgtagtggtggtgcttgtgcttgtgggggctggagcggttgtcgtcgtcgttgtggtggaggtgctgctgctgctgctggaactggtggccacgatgttggggccagtggtggtgctcctgaaagggcgatcctgtgggcagtatggaggaagtgccagccgaatctccaccgcctggctgcggactgtggatcagggccgccttggtcttcaagaaccattctgcggggttcggcagacattcggcggacacaaggaagggtatgagcacggcgccaatgatcacggtgcacacgaagatcaagcccaagtaggcgaagaaggatcgccggcgtcgctggcccttggccttgacggaggcggtggaggaggctcccccgccggcggagcccgatcgtcccgagcccgagagcttgccctcgatgcggaagtcgtcgttctggggcagaatcgtgtactgcaagctgttctccccgtgcctgatggtcttgtacatcttgtcctgttcttcgtatgcgcttgggatgcttccgcggctgcctcgatcctctggagctttcttccctggacctga

SEQ ID NO: 28884 - protein, 433 aa, DROSOPHILA
MNALANAAVDSFIRPTTKTMATQEMMSARCLAFRSVALRLAHTGGSDSGCDLELNLNLNRHNRRKLKYLLWALCLCRCLRRCCCRLRYWCSPVCRLRVLQISKVFFAGSNLWFAQPWLKCHALSLRDCRLARTRADAVSAVAQCVFIQAPLLFCPPPSDCDSDSNFDCDSCSVPACTCSLEFWPPPAWICGPWTLASTGGIMGFLAADLSRGTWMMRVVIVVAGGGGGGAGYLGVVTGGSLVVVVVVLVLVGAGAVVVVVVVEVLLLLLELVATMLGPVVVLLKGRSCGQYGGSASRISTAWLRTVDQGRLGLQEPFCGVRQTFGGHKEGYEHGANDHGAHEDQAQVGEEGSPASLALGLDGGGGGGSPAGGARSSRARELALDAEVVVLGQNRVLQAVLPVPDGLVHLVLFFVCAWDASAAASILWSFLPWT

SEQ ID NO: 28885 - DNA, 2153 bp, DROSOPHILA
gaagattggcgaaaatcctgtgagtaaaaatggcaagcgtgcaacaacagttttgccagcgtgtcgcttggagtctcccagtgtgcgtgcgtgtgtgtgagtgagtgggagcgcgcagccgtgtgcgtgcgtgtgtgtgcgagcgtcggtgagcagtgccaacaaggcaaaatgtgtgtttgctgttggggagcatcttgaccaaagtagtcactcctcggagcgccaggaggcgctcaaagggtattcgcccgagcacgacaccattcggcagctgtgtgcacaggttcccattcatggaaagtgggcagaggcgcggaatatgccaggcgagcgcgcaggtatcagttgtgccggaccgcacttgtgggcacttgtggctggcagattggagccgggatgcggagtagcaccattggagcgcactgctactcagttggtgttcgttgctaaaagccactccgggcagcatcgacggcatcattcaaccgatgcaacagacggccaagctgaaagggcgacgtgtcacatatgcgaggctactacagatgctcccccgcaacaacaagggcaggaagtcacgcagggaaaggcgaacagccagcagatcttgaataaccaactcataaaccatttcagaaacccctgaaccagagcaatggccattaaaccgggactcggtcgcaagaccagcaacaagaacccgcctatcctgagccacgagtttgtgatccagaaccacgcggacatcatctcctgcgtagccatggtcttcgtggtcggcctgatgaacgagtcgacggcggcgttcgccagcgcgttcatatccctgcaccacaacgtcagcggtgaggaccccagccgggagcagccatatggcaagccatacacctacatcgccggcatcaaggattactgcgcgatattcttctacacgctgacctgcataatcatgcacgcgatcatccaggagttcgtgctggacaagatcagcaaaaaactacacctgtccaagttcaagctggcccgcttcaacgagtccggccaactggtggccttctacctgctctccttcgtctggggcgcccacgtgctgctgaaggagggctacctcggacaggtggcccagctgtgggagggcttccccgaccatcccatgagctttctgcacaagttctactttgtggtgcagctggcctactacctacacatgctgccggagctctacttccagaagatcaagaccaaggaggagcagcagcccaagatcgtgcactcgatcagcggcttcaccctgatcgtcctggcctacacgcttagcttccagcgcctggccctcgtgctgctcacgctgcactacttcagcgagctgctgtcgcacgtcttccagctgatcggcgtgttcgaccgcgaggagcgactggccaagctgcgggtggtgaacaatgccgtctttttcctgatccgcttcgctacgtccgtgatcggtgtgctcacgctgtactacggcatcgggggtgtgcgatccctgctggccttgggcggcctgatcgccctgcagggctacctggtcttctccttcatcacggagcagctgcgcgccaagcgcgaggccaagaaggaggccaagcgggaggccaagctggcgctgcagaccaaaaagccagccaagacgcccaaggacaaggtgaagcgcaagaaggagagcgacctgcctgaggcggaccagacctcgcccagtcccatcaagcagaagctcaagtgagagccgtcccggccgagcagagcaacaaaatcttccgcacacttccaattcaaaacgaatgagagatagagagagcagcaccatggacaggagcccaggttggattggtggacacttgccactgaccactgaacactggctacttggctccctgtttgatgtaatctcgttagctcaaaactaccactgcaacatttctgctgcatttacttcctcgacacacaaaagaacgaactatttcttagcctaaatgttttgtttcatttaagtttacgtcatttttaaaacaaattttttttatttttatacatacaaaaaaaaaaaatgaaaaaagaaacaaatacaacaaaagagaaaagcaaagcccacactgcgtgttttcaattgc

SEQ ID NO: 28886 - DNA, 153 bp, DROSOPHILA
atggtcggggaagccctcccacagctgggccacctgtccgaggtagccctccttcagcagcacgtgggcgccccagacgaaggagagcaggtagaaggccaccagttggccggactcgttgaagcgggccagcttgaacttggacaggtgtag

SEQ ID NO: 28887 - protein, 50 aa, DROSOPHILA
MVGEALPQLGHLSEVALLQQHVGAPDEGEQVEGHQLAGLVEAGQLELGQV

SEQ ID NO: 28888 - DNA, 3346 bp, DROSOPHILA
aagtagtcactcctcggagcgccaggaggcgctcaaagggtattcgcccgagcacgacaccattcggcagctgtgtgcacaggttcccattcatggaaagtgggcagaggcgcggaatatgccaggcgagcgcgcaggtatcagttgtgccggaccgcacttgtgggcacttgtggctggcagattggagccgggatgcggagtagcaccattggagcgcactgctactcagttggtgttcgttgctaaaagccactccgggcagcatcgacggcatcattcaaccgatgcaacagacggccaagctgaaagggcgacgtgtcacatatgcgaggctactacagatgctcccccgcaacaacaagggcaggaagtcacgcagggaaaggcgaacagccagcagatcttgaataaccaactcataaaccatttcagaaacccctgaaccagagcaatggccattaaaccgggactcggtcgcaagaccagcaacaagaacccgcctatcctgagccacgagtttgtgatccagaaccacgcggacatcatctcctgcgtagccatggtcttcgtggtcggcctgatgaacgagtcgacggcggcgttcgccagcgcgttcatatccctgcaccacaacgtcagcggtgaggaccccagccgggagcagccatatggcaagccatacacctacatcgccggcatcaaggattactgcgcgatattcttctacacgctgacctgcataatcatgcacgcgatcatccaggagttcgtgctggacaagatcagcaaaaaactacacctgtccaagttcaagctggcccgcttcaacgagtccggccaactggtggccttctacctgctctccttcgtctggggcgcccacgtgctgctgaaggagggctacctcggacaggtggcccagctgtgggagggcttccccgaccatcccatgagctttctgcacaagttctactttgtggtgcagctggcctactacctacacatgctgccggagctctacttccagaagatcaagaccaaggaggagcagcagcccaagatcgtgcactcgatcagcggcttcaccctgatcgtcctggcctacacgcttagcttccagcgcctggccctcgtgctgctcacgctgcactacttcagcgagctgctgtcgcacgtcttccagctgatcggcgtgttcgaccgcgaggagcgactggccaagctgcgggtggtgaacaatgccgtctttttcctgatccgcttcgctacgtccgtgatcggtgtgctcacgctgtactacggcatcgggggtgtgcgatccctgctggccttgggcggcctgatcgccctgcagggctacctggtcttctccttcatcacggagcagctgcgcgccaagcgcgaggccaagaaggaggccaagcgggaggccaagctggcgctgcagaccaaaaagccagccaagacgcccaaggacaaggtgaagcgcaagaaggagagcgacctgcctgaggcggaccagacctcgcccagtcccatcaagcagaagctcaagtgagagccgtcccggccgagcagagcaacaaaatcttccgcacacttccaattcaaaacgaatgagagatagagagagcagcaccatggacaggagcccaggttggattggtggacacttgccactgaccactgaacactggctacttggctccctgtttgatgtaatctcgttagctcaaaactaccactgcaacatttctgctgcatttacttcctcgacacacaaaagaacgaactatttcttagcctaaatgttttgtttcatttaagtttacgtcatttttaaaacaaattttttttatttttatacatacaaaaaaaaaaaatgaaaaaagaaacaaatacaacaaaagagaaaagcaaagcccacactgcgtgttttcaattgctcctcctccttctcctgcaacttcccattgtcctggtgattaccccaaggtgatccatatggtgatccgaagcctgaataacttttctctcttgcaggacatcgaggaacagggcgccgaggacaacgccaccctgctgaccaccaccaacctgtcggacgacgactaattggagctcgttcagatgattccctgttcgccctcggttccagcttttgatttccggcctgcttgagcgatccaaagtcgctggctgggccatcgcccacttcgcccatccgtttgagacacacacgattacccagacacctggacctgctgagatggctccacgccagctgatccagtatgctaatcccgatcccgatccccaaatttcccctccgcttctggccatgaggcaggcggaaggcggagcaaagagtaatccaagcacgaagaagactgtttctgaaactactgtttagctatccccaaatttttccaatgcttgtcttcaccccgcactgtcccccccctcttaccaatcacccatccttacaaaactgtgtgcgtgtgtgtgctgatagtgtgtgtgtatgtgtgtgtgtgtgatccccaagatacccgttacttataaatatgcataaatgcaagagctagcttgataacttgacgtgcgagggatgtggtggtgtccacgctggccactgagcccctccgtgcaccaccaatagctgggctctcggcacgaagatgtgacaatgttcgatctcatccgaagtactttccaaactaaccgagctttttaaacacaatccaccttttgtgtctgctgttcctgctgctctgaaaccaattggtggacgcatcgcggaaaagggagcaccgaggcacaaaagcaccgaggcacagccctcggaaaacgcactcaaatcaaatgaaacgtccagagatatgaatatttttttgcaagcgactacacctaatttgcagcacaggcaggcggggatggggatggggatgcaagtccgtcttggcccaaaacgcttggcgattcgattcgattcgattcagatgggacagttgggcagtgagcagtagggcggtgagaaaccgtagcgggggactactgttcgtctatataaactgtgtataactgtgaggcattgacaagtatttgagatgatctgtatttttgtaagcgtaatatttaaagcggcagccaataacgagacaaccaaatccagagaagcaactataaagcgtaagatatcgggcgcagcagccaacacacgcgacacacaatttatttgctcaacgcagtacacaccacacatgatacatacagcataaatgtaaatatatatatatttatctgcatacatatatatatatacagagtaagttacgcaaag

SEQ ID NO: 28889 - DNA, 798 bp, DROSOPHILA
atggccagaagcggaggggaaatttggggatcgggatcgggattagcatactggatcagctggcgtggagccatctcagcaggtccaggtgtctgggtaatcgtgtgtgtctcaaacggatgggcgaagtgggcgatggcccagccagcgactttggatcgctcaagcaggccggaaatcaaaagctggaaccgagggcgaacagggaatcatctgaacgagctccaattagtcgtcgtccgacaggttggtggtggtcagcagggtggcgttgtcctcggcgccctgttcctcgatgtcctgcaagagagaaaagttattcaggcttcggatcaccatatggatcaccttgggcgccagcttggcctcccgcttggcctccttcttggcctcgcgcttggcgcgcagctgctccgtgatgaaggagaagaccaggtagccctgcagggcgatcaggccgcccaaggccagcagggatcgcacacccccgatgccgtagtacagcgtgagcacaccgatcacggacgtagcgaagcggatcaggaaaaagacggcattgttcaccacccgcagcttggccagtcgctcctcgcggtcgaacacgccgatcagctggaagacgtgcgacagcagctcgctgaagtagtgcagcgtgagcagcacgagggccaggcgctggaagctaagcgtgtaggccaggacgatcagggtgaagccgctgatcgagtgcacgatcttgggctgctgctcctccttggtcttgatcttctggaagtagagctccggcagcatgtgtag

SEQ ID NO: 28890 - protein, 265 aa, DROSOPHILA
MARSGGEIWGSGSGLAYWISWRGAISAGPGVWVIVCVSNGWAKWAMAQPATLDRSSRPEIKSWNRGRTGNHLNELQLVVVRQVGGGQQGGVVLGALFLDVLQERKVIQASDHHMDHLGRQLGLPLGLLLGLALGAQLLRDEGEDQVALQGDQAAQGQQGSHTPDAVVQREHTDHGRSEADQEKDGIVHHPQLGQSLLAVEHADQLEDVRQQLAEVVQREQHEGQALEAKRVGQDDQGEAADRVHDLGLLLLLGLDLLEVELRQHV

SEQ ID NO: 28891 - DNA, 2765 bp, DROSOPHILA
ctccgcaaactgtgccattttggtggtgaacatattgagcgcggtcacaatgccaccgttgggacccagttggtactgcttcatcacctcccggtagttgaccgtgtcccgtatgtccacgtgcgccgcgtacggtacttccctgcacgccggatccaggttgaccacgtacggattgaacttctcctgggcgtgctggatgagcttctgtgtgaacgtggtcttcccgctgccggccattcccagcaccagtatgcacacgggcgactcccggattccctcgctcagcgacagcgcctccagcttgatgctctccactccctctgccatttctctcacggcttcactaagaatcaaaacaaaaacaggaggcgcaaaaacaagcgtgcagaggcagtgtgaccgtcctatggaaagtgtgctctttgcgccgcctgaattcgcttcagataccaacaaacatcagctgttgttgctgctttttatcctgcgtggaaacatgtcggccattacatagttaacacactcccttaatcgcagcagccttcgtggaatcacacatcttcagttttgccagttcagtttttgcttgcccgccaaaaaaacaaatcaaaaaaaaataccgaagagtttagaacataccgtatatatcgaaagccataataagctttaaactagttgtacagtaataaaaatgccaccaccagaagccggcaattgaagcgcgtttatttgccgtgcattagttttattatttggcattgttttacataataaaagttgtgaagcaatggagacccgactggaagtgctcttgcgggagccgaatccattgttcacccgttggctggagcgctggctgcgcgaagcggagcgccgagaacagaagtcccagtttagcctgcgccaggcgttggagtccctaaaaagctaccctctgccattggccagcggacgagactgttccattctgcgcggctttgggggcaccctctgccagctaatcgacgaggaacttcgccatcacagaggcctccaattgctgccacaggaggccgtggttcaggagcgctacgagcagcaggtccaggcggtagtacgcaaggttcaggagaagcagctggaacaccagaaacgccagaataaatgcgacaggcccaggaagctaaccaaaaaagatctggcggagctggcagcccttgaagagcgggagcgcgtcgtgcgaatgaaaccaggtcaattccagttactccttttggtggatactcaggaaaccagtggcaaaaacaagagagttctggaccagacgaggagctacttggagtccttgggagcccgtcatgaagtgcgtcgcctgacaatcggcgatttcctttgggtggcccaggatcaagagggcaatgaactggttttaccctacattgtggagcgcaagaggatggacgacctggcatcgagtattcgggatggtcgcttccacgaacagaagcacaggctgcagcactgcggcctgcagcacatcatctacctggtcgaggactatggcgataacgagcagctgggccttccactggactccttgcagcaggctctgactaatgccaaagttcaaactggtgtccgagtggtgcgcacggcgaatcattaccgatccatgagctatttggccggaatgagtcgcacccttggccagatattcgccggcaagaagttgcacagcgtggatcgcggcgccatcgaccaatccacctgcctgctcacgcattccgacctggggttgctcaagtttcgggccctatatgaggattccgcaaagaatgcccagctcacagtgcgcgaggttttcgtgcaacagttgctacagctgcattccctttccctcgaacgcgccatggctattgtggaaagataccccactccacgctggctgctggacgcatacgcggagtgtgcagaccaaaagcaggccaggctactcctcgccagcatcccgtgtggacccctggaacgtccactgggcgacaagatcagccagtgcctacacgaattctacagcacgcactttcgttaggattagcaattgattttatgggacatatctaaggttatatacacgagtttatacataagtgagagagagaatacgttggacattgaatagtgtgatctagtctaagccaaaaaatgtacaagtcagccgcccttagatgttgcggaagtgccggatggccaggtccaccggcaggtcgaagtcaaatcgagaaagagcatcgatggagcgcagtgagtcgcggaatccggtgcgggccacgtagctgtctgctgagtagtacgtgtccaccagttcatggcagctgaggatcaggttcagccactccaccagcaaatgggaactgtttgaaggaagagaaaagcatttcgaatgaaagaagtgtgataaaagccaaggtaaaggtctatccccgcgtccctgttagccttatgcttaaattaattcggcagactgcaaagtcaaaagctacctgcacctagctaaatatattaatatttacatatttatatttacatgttaaagcaaaaaatcgattaagcaattcattgataaaaaagtttaagacagtagagaattgacattaccgcagaattgctgataattgcagtaagaatattttgattttggacacttgtaattataaaaagtttgtgtgtctcttgctctttaagattcctctttgccaggaaaataactataaaatgaagatttg

SEQ ID NO: 28892 - DNA, 465 bp, DROSOPHILA
atgcgtgagcaggcaggtggattggtcgatggcgccgcgatccacgctgtgcaacttcttgccggcgaatatctggccaagggtgcgactcattccggccaaatagctcatggatcggtaatgattcgccgtgcgcaccactcggacaccagtttgaactttggcattagtcagagcctgctgcaaggagtccagtggaaggcccagctgctcgttatcgccatagtcctcgaccaggtagatgatgtgctgcaggccgcagtgctgcagcctgtgcttctgttcgtggaagcgaccatcccgaatactcgatgccaggtcgtccatcctcttgcgctccacaatctgcttctcctgaaccttgcgtactaccgcctggacctgctgctcgtagcgctcctgaaccacggcctcctgtggcagcaattggaggcctctgtgatggcgaagttcctcgtcgattag

SEQ ID NO: 28893 - protein, 154 aa, DROSOPHILA
MREQAGGLVDGAAIHAVQLLAGEYLAKGATHSGQIAHGSVMIRRAHHSDTSLNFGISQSLLQGVQWKAQLLVIAIVLDQVDDVLQAAVLQPVLLFVEATIPNTRCQVVHPLALHNLLLLNLAYYRLDLLLVALLNHGLLWQQLEASVMAKFLVD

SEQ ID NO: 28894 - DNA, 4040 bp, DROSOPHILA
tgctagtttgtccgatttacatcggcctaatccgcatatagttagttttatccttagggctttgtcctcttcgttaacaattttcctatttacagtttacaactcaaacttgatcaatttgctttgtcttttgcttagcattagtgatatatttcgcttgcgatttttaggggggcatttacttgcctatacaacaacaataatatcgattctatccaaatgtgaaaacaaaaattcgcttgaaatttcctcactttcgtttttataattcttaataaacatcatcagtcttgaacttagtttaggtttccttcacttttgcccctcatcctcgactctctttctgttgttaacttaagcaaatgttatgatgggtctcattttttgaaaagttgtgaccttgtgtcttttttttttgcgaatggaagtgtaaaattgggatatatggaagggatgataggggaggacgggacgggtcattcgggtcgggtcgggtcgggtcgggacgggactgactacaatccaagttcgaaggcacaatttcaaaagatttctctcccaactccgcgactaactaacgcctcttctatacactagccatactagtaagctctgcttctgtcttagatttcgatgcattctgacggaagatctttacaagggaccaaactcaatgggatattacaaacgttataaaagcattgttaacttacatgtattactcagttgagtaatatttaacaacgctctaaaaacaaactacaaatgccatcgaattgcaatcaaaaacagtgcctcgctacgtatggggtttggatgggaactctggacatatatagtaactaaactcagagacaagtgatcctctgcgcaacagagactcagggattagaggacgggttctgggttctccattttgggatcggagtccggttcggattcggattgtgaaacgcacggcatccgctggcctcctcacacgaaaaactcctcgttgccaatgttgctgcccgatgcttcaaccagttgccagggccaggaccatccgcctcctccgcccccgagaagtgtgaatcaccgctccgtggagtgggtggtgcccaatccgctgctgctgctcccagaaccggaagcggaattcaatccttggcggcggaagaagccgagggtgtccagcgccttaatagtgcgtcggattagctcgtccttgtatttccaaatggttttgtcctcgactgaatgctcccgatactcctcacagctcttcttcagcgtcttgacgcagtccgcccgatagtgctgcagctgggcgtccttggtgtccacaggatacgacttgcagacgccgcccaagcagctcagtggaaagtgattgtggagggtgagcacgcgctccggatcgtggaagcatttcacatactgattcggcttggtgtagttcttcgcacgatggacgtgctgcagcatgtgcatgtacttgggtatgtccttgtgccagccgtgttcgtgctgctggtcgtccaagaagtacacgttgcggaagttgtagctgtggaatccgtccggcttgatcttgcgcgactctggacgcactttgtccatcaactcggaccataaaaccgctccgcctttgggcatgatcacctcgtcaatgtccagcagtgcaatgtagtcgtacagatagagatttttatacagacagtcgttgtacggaataacctcgttctggcgcttgtggttcgtcttcttagttaggtaaaggtgctggaatcccggcacgtttggctgcccaccgggcaatgtcagcgggatcacttggaccttgccctcctgttcgtagtgattgagcactttggtgatgttgggatggacctgtcgagggataggtgaacgatgagtgtggattggctattgaatatcagtttgctgagcaattgttccaatggatattcttgagccatttggaagtagacttttgtgagtacatgtgcattacaatattacctgaagattgtagaagtagattttgtccgccccaaggatattgagcatttcgatccactcaatcagccgcacactcaggtcgtcgtagaggaagtccaatcccttgacgcagacagcaaatcccttcttctggtcgtcgggcggtcggttgtagatgacccgcagattgttcgtggccgtatcacactccttctccaccatcgacacggagctgggcaccacgccgtgaaagggcttgggaatctggcatgcgatcagatatggctggtagatgccctgcttgtagttgccccacttgttgtaccagatgtacttgtactcaaacgttttcacgatgaacggctccttttggccgtcaaaccagaactggcagtaggtcttcaccttgggctcaatcctgtcgatcattccaaggatccgcacagtgggtcccagcaacgaggtgcggcggatgtcgtaataagccccaaaaagctggaacgttccgttcgacgtgcgcagcgtctgccagtagatgttgttgaattccagctcgaaaatggaggggtacttcgcgcaggtcgacgacttctgctgcaggaagttcttattcttgctccagtaggcgatcggcagagaggggatgcgggactccacgtctcggaccaactggtcgtcgtccatggctgccagagaaaggaatgattgcggcaattagatttagtaaaattgttcttataggatcaccccattaaattatttgccgtcatttaatttgaccgcagcattcgtgctcacctgttcgattgtccaccagtatctcgctgggatcgaagtgatccgtggtcgtggaggtggtttccgcatagcgaatgtctttctgcagcaggatgcgtccgttgagtggcacctgctggtactcctggggcaccagattagtaccgtgcatcttgaacagtcctatgatgacgaaggaccagacgcacagcgaaaacaggatcttaaggatcaccttggagtgagccatgatgactggaactggttggcgccgaagtgatttactttttatggctgggatttccttttattcagcctgaggcgctgcaatgagaaatggaaaatgagaaatggtgggtcgttagaaggcgttgcttttgtcatttcatcctgtacttctctccaccccctaatcattcatttttaagctggcggccagccggtaggtctgtttccgttgcccaacctcaagcccccagacccaatcctcgttttccactttggtcaggcgcaaaatgtcaagttgaaaactgcgtgtaatattttctagcctggggcgaaaaatacccaccaggacgacgaggaacgagggagctgcagtgggtgaaggtccttagcctaatggaaaacaatctaaaagcgacacaatacagcagcagctacagtggtcttgaagtggcaaaatgcggctgcaatgtcagcccatatatgtatgttggacatgggggcattacaaaacagtattgcataaaatactggaaaactagaaggatttagtctagttttgccccactaattaacctgttttaaaatgtctatgtatctccctttctgctccaaccactgttcactttggaaaacaaccaattcacttgcattcggtggtgaagtagacacacacacacacacacatgtgtacttacgtacatgccgcccctggtacagtcgcctcccccaaaaggcgacgctgcaggcgacaatctgtttgcctatctgcgctttgtatctttgcaattgcgggctgtgcgtgcgacaaacgagaaaagacaaacgacggacatggacattggacgttggacattggacatcggacatagctcccttcgccattcaccattcaacattcgccattgaccattcagcatccagcgtccagcatttgaacactgtgtctggcggcaaggccttctaatatttatgacattgcatccagcttcttgcccactcggaatccctttgggtcaggaccacacacatccataactctgtgtacgttggcc

SEQ ID NO: 28895 - DNA, 567 bp, DROSOPHILA
atgttgctgcccgatgcttcaaccagttgccagggccaggaccatccgcctcctccgcccccgagaagtgtgaatcaccgctccgtggagtgggtggtgcccaatccgctgctgctgctcccagaaccggaagcggaattcaatccttggcggcggaagaagccgagggtgtccagcgccttaatacgtcttgacgcagtccgcccgatagtgctgcagctgggcgtccttggtgtccacaggatacgacttgcagacgccgcccaagcagctcagtggaaagtgattgtggaggcattcgtgctcacctgttcgattgtccaccagtatctcgctgggatcgaagtgatccgtggtcgtggaggtggtttccgcatagcgaatgtctttctgcagcaggatgcgtccgttgagtggcacctgctggtactcctggggcaccagattagtaccgtgcatcttgaacagtcctatgatgacgaaggaccagacgcacagcgaaaacaggatcttaaggatcaccttggagtgagccatgatgactggaactggttggcgccgaagtga

SEQ ID NO: 28896 - protein, 188 aa, DROSOPHILA
MLLPDASTSCQGQDHPPPPPPRSVNHRSVEWVVPNPLLLLPEPEAEFNPWRRKKPRVSSALIRLDAVRPIVLQLGVLGVHRIRLADAAQAAQWKVIVEAFVLTCSIVHQYLAGIEVIRGRGGGFRIANVFLQQDASVEWHLLVLLGHQISTVHLEQSYDDEGPDAQRKQDLKDHLGVSHDDWNWLAPK

SEQ ID NO: 28897 - DNA, 2183 bp, DROSOPHILA
tcacctgatggatgccacgtgccacgcaggctaaggaactttgaggcaaccggccgtctgatgctgctgctgaggacctcgatgttgctgctgtggtgctgcaaggaaatccggggtagagtttattaaaaaaaaaaaatacaaataaattgaagccaaaggcagggcattgtactttggtctaaccttcaagtgttttaattctatttggctttctgtctgaagtggcgagaacaaagaggggtatgtaaaaggtcttgaaatgcacggctccacggctccccagcggctttggaaacaatcgcatattgcatatgggatcagggcccgaacgggcaggcttaggtgtgaaaatggcccagatatgtgcatatgtatgtgcatgtgtgtgtatttgcgagcatgcgggaagcagcagttcaaggtttccactgccatgttcgttggcccactttcaaagggcgtgggcagaagtgaaagtgaattattaacacaattgctattagcgctgatagcaagtgcacatacggctgcagttttgctgtagctcataagtttttgtgtttctgccgccggcaaagtggctgcctgccaccacgccagaaggtcgaaatctggagagttggctcaccagctctctcttcaaccacttccacttcaaccatctcttcttccagaggaagtattcatttctgcataacatcatttgctatctatcagtctttgtgcatagtattgccttggatttcttataattagctgaccatcaacatatggctttggccatcagtgatttacttgtcccaacggaacttcattgaaagattcctgccggatcgccgctttcggccaacagttcatagttcccggtactctctttttagttctcagtgattaatgattgttgacaagtataacaacggccacgccccctgttttggctgctgtctaccgcccagaggagagaaggagccaaaacaaaacgtccgtcagctggttgtcagggtggcaggaagaggggcagattgggccattgggccagaagggagacggagcttagctgggctgcagattgctcatacgcagcgtggtccccttgagccaaaatgaagttgcttgcggtgctggcgctgctagtttggaacagttgacagcgaagcgaacccgagcggggcagcatcatgatttatgtcgttttatttaattttaattgaaaaacttgcacacgaagagcgacatgacgacaaacaaccaaaaaccccgaatgccaaaacagcacagcacaagcccagcacagcccagccaaatgtaattaaaatggcatttgctcgccattctgttccctttgagtcgcacattttccaccatcttgctttggcatcagcaatctgcacctaccaagtcctggaaatgcaaataaatagcaagacaaaggctcaaatgcaaatagaatgactttattaaatgggcgggcgggttggtttcgcttcggaagataaaacggctcagaatcgttgagcaagttcgcagttggtaaatgataaagacacgagggtagtcaaatgtactgggacttgactcttgaaaaggggatcgaaacaagtgaagccgtgtctaacaagccacgcgaccttttctccctgatttttcagcttgcgtctcccattatgacaaatgcaaatgacatactcgagaagaggcttgcagagcgggaaatatgaactgtagaaagtgggcgcagtctatgaacaagacattacaacggcaacagcaacagcaataatacaacgacagccacaagaaccagtcaaaagccgcacagtgggacgaagcgaagtcagtcgcccacaaacaaataaaccaaaaaagaaacgaaaataaaagaatggaattagaaatggaaatagaaatagagaaagaagtcgaggacaaaccacactcggtcttccttcgggattcgggaatatgagtgccttaggaaaccaactcgagggatttccgcaggcggctcggcgtccccttgatgtagttttctgccacaattcttggcctgctctccacggtgcggcagttgcacaaaaaaaatggcggggcacgggcagttggcaaccagaaaaactgccgccaacgctataaatcatgcggccagcagcaaaagcaacaaaagcgaccagcagcagaaa

SEQ ID NO: 28898 - DNA, 183 bp, DROSOPHILA
atgatgctgccccgctcgggttcgcttcgctgtcaactgttccaaactagcagcgccagcaccgcaagcaacttcattttggctcaaggggaccacgctgcgtatgagcaatctgcagcccagctaagctccgtctcccttctggcccaatggcccaatctgcccctcttcctgccaccctga

SEQ ID NO: 28899 - protein, 60 aa, DROSOPHILA
MMLPRSGSLRCQLFQTSSASTASNFILAQGDHAAYEQSAAQLSSVSLLAQWPNLPLFLPP

SEQ ID NO: 28900 - DNA, 3419 bp, DROSOPHILA
ccgattatgcgcggcatgatatcgtacagcctgatctggcccacgggcagcctcatccagcaaacggttgagggcaggcgctggggtgagtcggcattctttcgagcagctctcagctccttatccttctcgtcttcatcttacaggcacctacgactggtggcgcgtgctccggttcagcatgtacggtggtctgtttgttgctcctaccctctacggatgggtcaaggttagtgaccgtttacatggctgctgtttaggtctactcctattccgattgctcctcagatttccagcgccatgtggccgcagacatcgttgaggacgggcgtcattaaggcggcggtggagacgatctcgtacacccccggcgcgatgacctgcttctactttatcatgagcctcctggagtccaagacggtggagcaggcggtagccgaggtcggcaagaaattcctgcccacgtacaaggtactcttttgggattcgagggagaactgccgcctaacccaccaattccatcgctcttgcaggtggctctgtccgtatggccactggtggccaccatcaacttcaccctgatccccgagcgcaaccgggtgccattcatcagcgcgtgcagcctgtgctggacctgcttcttggcctacatgaagcacctggagcaccacgaggtggacggggccatttgatggacatgatcgtatttctcaaacagcattaaataaaatagtaattattgaacgaaatgaatggaattaaaaaccaagaacggtattctgcactaagtactggtcacactgggctcacctaggggtgaaaaaatatcgattgtgcatgggtttgttttatatttaaacagcattttgcaaaatagcccctctttccgaagatcaacaagcctaaagtaataaatttaataaaaaggtattttgaaataattcgcggtatatcgaccgagccccaccacatttcttatcgacactgtcccatcgctagccccacctagttgttgctgcattttttgggtgtgtgcgttgtatttgtttactgacaatccccagaaaagaaactcctctgctccaactgcgatccctcgagacccaggacagcagcatgcgcgaacttaacaagcagcagtcgcaggacaccacggactcgggcgtcgaaaagggcgactatccgcgggccaccagtaagtgacgcactcaagcatgcgggccgatctgcatttgcatccaaatactttcaatgcccaattccctttccagatggcgtggtcttcggcgccatagttacattcgccagctttttcgtgctgatgatgtccttttgctcgccgtactggatcgagtcctacgaggagacgcgggccagcttcaagaacatgggcctgtggcagtactgctttaaggacttcgtgtaccccaagtacgcgttcttgaagcagttcaccggttgccacaacatcttctcgcacgtgagtacagcaaactggccggttcttatccttgtcctgatcttctcccactcgtacaggagtattacgttatccgtgagtatctgctgcccggctggctcatggcggtgcagggcttcgtgaccatgtccttcatcatcgtgttccttgtgctggccctgctctcgcttaccatcatccgactgcctcttaaggccgttctgcagtacgagtggctgctcgtccgcctctcctacatgggcaccgccatctcgtgtatgtatctgcctcccgcccaataagtactagctaaacagcggtctcccacagctctgttcatgtttttggccgtatgcatcttcgggggctgcgcctaccgccgcgactggatgatgtaccccaagttcaacgtgctgggctggtcctacgccctggccgttgtcaccttcatgctccttggtctagccgctctgatcctgcagcgcgaggcccggcaagcctacgacgcccgcggcgagcagaagaacctggtaatgcaaatggagatgcaggagccgggttaccagccgccgcgccaccaccacagccagtcgcggagcctgcagggctacatataacagctgtccgcccgacttccatacattccgttccgattggatcttagcttaagttttcagacgcaatctcgtgcctcgaatctgcgcaatcgacgccgtccatagtgcctttaacaatcgaccatatgtatctatatacacgccgactcagccgagatcagctcgtatccgtttgtaattgtattaaatagcacgtacagctaaacgtaagatcagtgcgaccaaaaagatccactaactttttacacatctaccattatactttttatataggctcaaaaatgtttacagcttaaatttttagaccatattccaccttttataagcaaactggtgtagagacatatcaacattgaattaaatgtattatttgaacttgcgaagctaaacgtactgatcagattgatcatctccgccctggtttccccatcatgacccccagctacatgttcctggtgatgaggtgcggatgtgatctacacctaatatgtttatgtttgccttatcgaactgatagcgcctccgctgattgccaattgttagtttgggctgctggctcccagactcgacccctcgattcagtgagtttcgtgcgctctgtttcttctcatctgatctgcgatgactcagtttggcctgcacggctgcagctacattctgttctggttccttctcgcctgcgcggcggcggaccttcaggagaatcagcagtcgcgcatcatcaatggaagcgtggccaaggcggacgagacgcgccacctggtctccatccgccttctccgccacgacaacaactttggaagcggccacatctgcggcggggcgctaatcgcgcccagaaaggttctgaccgcagcgcactgcctgtacaagtaagtagtgatcccaccatggggtgcccgctcccttttgatcgaactcatgccagcagcaatcagagaaagcgctttcggcgggccagcgaattcgtagtggttctgggcacgctgaaccgcttcgagcaccgcaatggcaccatcgtgtcccaggtgagttccatggcctacatgcacaccttcagcccggacagcatgcgcgacgacgtgggcatcctttttctgcgcaccgggctgccgatgtctccaggcggtggtgtccatctcacagtggcccccatccagctggcgggccagatcacgccccccggcaagctgtgccaggtggccggctggggtcgaaccgagcaggtgagtcggatttgtagagccgtaggcaagccattgagcccgcagcttatctgactctttcccagagctccctctccaacatcctgctgacggccaacgtgagcaccatccggcacc

SEQ ID NO: 28901 - DNA, 1289 bp, DROSOPHILA
cccacctagttgttgctgcattttttgggtgtgtgcgttgtatttgtttactgacaatccccagaaaagaaactcctctgctccaactgcgatccctcgagacccaggacagcagcatgcgcgaacttaacaagcagcagtcgcaggacaccacggactcgggcgtcgaaaagggcgactatccgcgggccaccaatggcgtggtcttcggcgccatagttacattcgccagctttttcgtgctgatgatgtccttttgctcgccgtactggatcgagtcctacgaggagacgcgggccagcttcaagaacatgggcctgtggcagtactgctttaaggacttcgtgtaccccaagtacgcgttcttgaagcagttcaccggttgccacaacatcttctcgcacgtgagtacagcaaactggccggttcttatccttgtcctgatcttctcccactcgtacaggagtattacgttatccgtgagtatctgctgcccggctggctcatggcggtgcagggcttcgtgaccatgtccttcatcatcgtgttccttgtgctggccctgctctcgcttaccatcatccgactgcctcttaaggccgttctgcagtacgagtggctgctcgtccgcctctcctacatgggcaccgccatctcgtctctgttcatgtttttggccgtatgcatcttcgggggctgcgcctaccgccgcgactggatgatgtaccccaagttcaacgtgctgggctggtcctacgccctggccgttgtcaccttcatgctccttggtctagccgctctgatcctgcagcgcgaggcccggcaagcctacgacgcccgcggcgagcagaagaacctggtaatgcaaatggagatgcaggagccgggttaccagccgccgcgccaccaccacagccagtcgcggagcctgcagggctacatataacagctgtccgcccgacttccatacattccgttccgattggatcttagcttaagttttcagacgcaatctcgtgcctcgaatctgcgcaatcgacgccgtccatagtgcctttaacaatcgaccatatgtatctatatacacgccgactcagccgagatcagctcgtatccgtttgtaattgtattaaatagcacgtacagctaaacgtaagatcagtgcgaccaaaaagatccactaactttttacacatctaccattatactttttatataggctcaaaaatgtttacagcttaaatttttagaccatattccaccttttataagcaaactggtgtagagac

SEQ ID NO: 28902 - protein, 136 aa, DROSOPHILA
MRELNKQQSQDTTDSGVEKGDYPRATNGVVFGAIVTFASFFVLMMSFCSPYWIESYEETRASFKNMGLWQYCFKDFVYPKYAFLKQFTGCHNIFSHVSTANWPVLILVLIFSHSYRSITLSVSICCPAGSWRCRAS

SEQ ID NO: 28903 - DNA, 2588 bp, DROSOPHILA
gcaatttgtagacatggacacttcgagcgcagccttttgatatgcaattttgagcttgcaaaacggaatctgggattcgggattatgcaatcaaaaaaggaagcagggcgaaaaagagtgggcataaattgttggaatcacatagggcactgggcaagcctgttgcaggaataagtgaccgacctagcagccctgctctgcttaaatgtgccacatgcacaatggcacctgaaaaacgagttgtcactcaaccagagcagaaaaacgtaactcaccgcgaatatgcttctggctgtcctggcaaccctgacaggggcttgcccgcagatttcaatgctaatgatgcgtttctaacttgcagttatgtacttggtcattctgttacatatccattggcaacactacacgctcgctttcaagccaagtcgttgacaaccatgccgcaaagcgtcgacaactctgcacgcgtttaattacagcctggattggcctggtcatttatttatgtaggccgcgttcactcggccattaagtatatttcttcgttttctcattttcgttttcatgatcattttaatttttattcacgtttccgctttattgcgtcgtcgtgagtggcaaagggggttaagcgcttaagaagctctaaatgaacggtcattaaaaatgcgcacgcaatcaagagcccaccaggtgtcggcgcccacgacctgtaagctgtgagctgtgagctgtgagctgtgagctgtgagctgtgacccgtgacctgtgacctgctcccccgtggtcacaataagcgtcagtaagctaattttgcgctcgagtaacaagaagtacctacataattggagaaaaggtgctttgtgtaggaaactcacccgtcgggctgggcgtcagcgacatcatgtcgaagtggatgttcttctgctcgaaggagtagtccttgaggaaggtcagcttggcgccgcgcgtcttcgttaatcctgtgaccgcgttgttgatgctgcgcaggtactcgcgctttccgaagtttgtgtgcggcgcgatcaggccgatgttgagctgctccttgttggccgccgcgcccttgctcaggctgccgcctccgttggttagtcggaggccctggcaggatctggtgtccaggatcaacagggtcaagactgtgaggaggagcagcgagatgggcccgcttggaggggtgaggattcgctttcgtctacttgttgtgctattgtgctggcagctggcagtgttcaaagtggcgattggcgtatgctttcgcattgtggtaggcatgggcgtgggcgtgggcgtcggtccgtccgtgccgcgtttcagtttgacgcgactgggcatcatggctcgtggactattagatcctgaagttcgctgggatccggtgctcagtgctccggtggtctctagtgcatctggccgggatgcaagtgtctgggatgtgctattgtttggattgtggatggattccgttttcctgaacaggctgggtccgctctctggccgcttttccctctgttcgcttccccaggcagttgatgggcttgtattgactgctgcgcattgctaaagtcaaacgggcaacagaagttgtgtacagtacatgtaaccacccacccacgtcaacaaatacatatgcacactctcacacttgcacacatgcacacatgcgcacacctaggcagcaacatctgcagcagcaatggcaacactcgtcgttgacggtttccgccatttccgtttccgctactaatttgttatggccggaaaaggcaccgtggagtcgttttcgcgcatcgcaaaacttggcacccctctgcagggaatgtcgtgcgcaaccttttcggatccactgtgccgaacgtgccgcctgctggtcgccggcgaggcattccacctctatcctcatcgccctggactgaataataagagggagcagtataactgcctttggaatgatgagaactcgggggattttatcaactggactgctcaggtattgtaataggtgtcttgcattaaattctgggtacaatggaacgaagcattgccagcagcagtgaaatgacttccgaacaactgtggcagcgcagaaatgtatgctacacagatgtcagatattgtttcccagctcccagggtactcagcccttcgatgccccggcttcccgcccacacagtttttcactcggattcaatttgagcgcagcttgccattctacataaattaaatgcgacattggtccgcataatcgctgctctggcacacactctcgcctccgccagtgcctctgcctccaggttcccgtttcctgattcaggcaacacccaacacccaaccccaatcgctttccccttcacccccgcagggaatgcggcatttgctcgcgaaattttcactttgaatttcgaatgctgccagtagcgatagtaaaaacaggccagggcagggcaaaacaaggcggagcaaggcaaggcagcggaaacaggaatcgggaaacgggaatacggaatcggaaggcggaaagtggcagcgggagagttggaatgcgagaacgcggatacagatat

SEQ ID NO: 28904 - DNA, 588 bp, DROSOPHILA
atgctgcgcaggtactcgcgctttccgaagtttgtgtgcggcgcgatcaggccgatgttgagctgctccttgttggccgccgcgcccttgctcaggctgccgcctccgttggttagtcggaggccctggcaggatctggtgtccaggatcaacagggtcaagactgtgaggaggagcagcgagatgggcccgcttggaggggtgaggattcgctttcgtctacttgttgtgctattgtgctggcagctggcagtgttcaaagtggcgattggcgtatgctttcgcattgtggtaggcatgggcgtgggcgtgggcgtcggtccgtccgtgccgcgtttcagtttgacgcgactgggcatcatggctcgtggactattagatcctgaagttcgctgggatccggtgctcagtgctccggtggtctctagtgcatctggccgggatgcaagtgtctgggatgtgctattgtttggattgtggatggattccgttttcctgaacaggctgggtccgctctctggccgcttttccctctgttcgcttccccaggcagttgatgggcttgtattgactgctgcgcattgctaa

SEQ ID NO: 28905 - protein, 195 aa, DROSOPHILA
MLRRYSRFPKFVCGAIRPMLSCSLLAAAPLLRLPPPLVSRRPWQDLVSRINRVKTVRRSSEMGPLGGVRIRFRLLVVLLCWQLAVFKVAIGVCFRIVVGMGVGVGVGPSVPRFSLTRLGIMARGLLDPEVRWDPVLSAPVVSSASGRDASVWDVLLFGLWMDSVFLNRLGPLSGRFSLCSLPQAVDGLVLTAAHC

SEQ ID NO: 28906 - DNA, 8844 bp, DROSOPHILA
tacatcggcaggggtctgcaaggttgccggggaattattttcgaatgggtccgccagcaagctgtccaacatcgcattatcggcatcttctttgatcttgggctccatcttcggttcaatggtgtctagggacggctgtagatgttcgtccgaagtcggcgtcgccgagtggtggacaaggttaccatcctcaggatcgctgcaccaacctgatccggacatagggactccgcaggcaaacgcatgtggcggagtctcgcctgtgccctcccgtaggggagtggcctcgtcctcgttaatgccgcattccacgtagttttccactttgacctctagcttcatcggagcttccatgatgaaaaatcgcttttcactaatcttatgtacaaattaaatttgacacctttgaatttgtccaccaaattttagctgatgctgcagttctagagatggcaaattaaaggatttccagtaagtgtatttccacaagtccttttcttcccattattagttttccagggttcttttaaatttaatgaaatagagcataaagtaatcctgttttgttattttttatttttacacaactctggagttgccatcccacttttctacaacgattcattcaatacagtcgatggacctgttgatatatcgatagcgttatatggaaaactcaccacagctgttatcgactagctactttaacaagcattttgtcaattaaatgttatattgcaacatgtacggtgaaagttttaattaggagtcatttgaaagcaacttgatgtcaattaattaacaataccccttaaaaaggaatttaaaatatgcacacatagcgactacaaacagattgagtgtaaataaagacaagcagctgttttttgtttacaagcttcgttccttagttgttgttgggggctgtttttcagcgcctcaaccagctgatgaccacaaaaacttcaaaggtcaccttgagcttaatagaatcaaaagcaattgcttaagaatttcggctggtaacgtaaagttcaatttcgcatcttcatcacagcccaaaaagtacgaaaaatcatttaaaaatccagtgataaaatgaaaataatcaaataatttgcatacccatgaaaataaacaattttcaccgagcgtgaatgtgaatgaaagtgggcagataagttctagagcagataaaaaaagaccacagattactcacatggagcacttttgttgtgttctaaaatcgggactcctaaaaaacgatctataaataaacactcataggccatctaccggcagccaagtgcaattcattgacccacatatgcgagggtgtgagtgtgtgcgtgtgtttgttgtgaacttggtgtgcacaatttttttattccctgacctgaattttgaatgtgaattttcaatgttgataacgttcgctaatcgtgaggatccacattctcacgtaggcgccacatgtcaatagcaatgcatctgaaactaaaatgccttataaccctataagaaagcagtaaagcaaccccccgttagccgacgcccctgtgtgcaaattgtgcgagcgattatcgcgattgaaatgtacatattcgtttaatgctccatttgagatagcggcgtctgaaaattcctcgcattctgtagaccgtcgattttgcagcagttgcagtcatgctgagcgagggagtccactggctctggaggagcctgctccacatcctgatgcgttatcagctcttccgatggctttatggactaatagcgactgttgataacgaaccgctaccgttacaaatcaaaagcgaagaggaagcgttcggggaaaacaagaagaagaagcagctggcgagtctggagaatgccatctcccccggaaaattggattcagtcgcgattagaaccgttccaagtgcaaatgcgaatgcaatgggcaatgcaggcagtgccgagatcgtatcaaatcaaatcatccgccgccgtgaggtattatcatcgcccagtgatcggagtcccagtgttgtgtccatatgccataactatgtatatgttctagtgttccagtccacagagtgtgtgcttgtgtgtgtatgtggtgtgagtgtgccggcaatgaatataaaacatgccctccatctggcaatgcagcagtcaattccgatccgggttactaggagctcccaccaagcggacaatcatcgaaaattctagtcggactgtggtggtgttttaacaagatgcctttggctgtgcgtttcccgaccgcgaaatacccaaaatcaatctaaactgtggaacttctgtaggtctaaccactgaaaagcaagatatcaaacaaattatactgcaaaaccaatctaatcccccgatgattttggatcgcgatattggaactgaaatcgagatcaaatttgtagaaaaccaatttggttcgattagttaatgcacaatcgatccttacttaacaatttatttattaattgtcgtgcaatttaaaaatagaacttattgcacatttgtagctgtaattgtaatcctaatctctattggcgctaccagtggttcgaccttaagtgacataaagctatagacattcgactatacattccatgcattaaacccatgttcatgtgtaacgaatagtagtgacgattgtataatgcactcacggatctcctctcggattttcttagatgagcaccatgggcaaggagacggagtcgcatagcatacccatcagcgagggccaggatgcggagcatatcctgtaccgtctgaagcggggttccaagctgagtgttcatccggatgcctcgttgctgggcaggaagatcgtattgtacaccaactatcccgccgagggacagaagtttgtgcgtacggagtatcgcgtgctgggatggcaactcagcaatggcaagcagattacctctgtaatgcatccggaggcccatgtggtagatactgacattcgtagtcaggtggagctcaacatgtccggcacctaccacttttacttccggtatctggaaaggttcgaaactatacttttccgcattgattttgctttagcattaatgtgtgtcaacattttcagacccgacactggctgctccggagcagatggagctctatatgtgcaagtggagcccacgctgcatgttgggccgcctggcgcccagaagaccattcccttggactcggtgcgctgccaaacggtgctggccaagctcctgggaccactggacacttgggagcctaagctgcgcgtggcaaaggaggccggatacaatgtgatccacttcactcccatccaggagttgggtggctcccgatcctgctattcgctgcgtgatcaactcaaggtcaactcccattttgcaccccaaaagggaggtaagatcagttttgaggatgtggagaaggtcatcaagaagtgccgccaggagtggggggtaagacattgaattctagcataaacaagtctaaaactcttccctatcaggtggcctccatctgcgacatcgtgctcaatcacaccgccaacgagtccgattggctactacagcatccggatgccacctactcatgcgccacctgtccctacctccgccccgccttcctgctggacgccacattcgcccagtgcggagcggacatagccgagggcagcctggagcatgtaggcgtacctgcggtcatcgagcaggagtgccatttggaagcgttaaagtaccagttgcacacctcctacatgtccaaggtcaatatacacgagctgtatcagtgcgatgtgatgaagtacgtgaacgagttcatgtcccaggtgcgaactcgcgagccaccgaagaatgtggccaacgagtgtcgcttccaggaaatccaactgatacaggacccgcaatatcgacgcttggccagcaccattaatttcgagctggcgctggagatctttaatgctttccatggcgactgcttcgatgaggagtcacggttccgcaagtgcgccgaaaccctccgccggcatctcgatgccctcaacgatcgtgtgcgctgcgaggttcaaggctacataaactatgcgatagacaatgttttggccggagttcgctacgaaagagtccagggcgatgggcccagagtgaaggagatctccgagaagcactcggtctttatggtctactttacgcataccggcacccagggaaaatcgctcactgagatcgaggcggatatgtataccaaggctggagagttcttcatggcccacaacggttgggtcatgggatacagcgatcctctgagggattttgctgaggagcaacctggacgcgccaatgtctacctcaagcgggagctcatctcgtggggcgatagtgtgaagttgcgcttcggcagacggccggaggacagtccctacctatggcagcacatgaccgagtacgttcagaccacagcgcgcatcttcgacggtgtgcgattggacaactgccactccacgccattgcacgtagctgagtaccttctcgatgcagctcgtaagatcaacccagagctgtatgtggtggctgaactgttcaccaattccgattacaccgacaatgtgtttgtgaaccgattgggtatcacctccttgatccgtgaagctctttccgcttgggactcccacgagcaaggccgcttagtgtatcggtatggaggagtgcctgtaggtggtttccaagcaaactcatcgcgccacgaggccaccagtgtcgctcatgccctcttcctggacctcacccacgataatccgtctccggtggagaagcgttccgtgtacgatcttctaccatcggcggcactggtttccatggcatgctgtgccacaggaagtaaccgtggttacgacgaactggtcccccatcatgtgagcgttcattcgtttaagatttattcctgaaactaactcatacttttttcccagatccatgtcgtagatgaggaacgcacctaccaagaatggggcaaaggtgttgactcgaagtccggaattatgggtgccaaaagagcactgaatttgctgcatggacagctcgcagaggagggatttagccaagtttacgtagaccagatggatcccaacgtagttgcagttactcgtcattcgccaatcacgcatcagtcagttattctcgtggcccacactgcctttggctatccctctcctaatgccggacccaccggaatccgcccgctgcgtttcgagggtgtgctggacgagatcatcctggaggccagcttgaccatgcagagtgacaagccattcgatcgtcctgctccattcaaaaaggatccgaatgtaatcaacggctttactcagttccagttgaatctgcaggagcacatcccgctggctaagtcgacagtgtttcagacccaagcctattcggatggcaacaacacggagctaaactttgccaatctacgacccggcactgtggtggccatcagagtgtctatgcatcctggtcctcgcaccagtttcgataagctccagaaaatctcggctgccctgcgtattggatctggcgaggagtattcccagctgcaggctatcgtctccaagttggatctggtggcacttagtggtgcccttttcagctgcgatgatgaggagagggatcttggcaaaggtggcaccgcctacgacattcccaactttggaaagatcgtttactgcggattgcaaggattcatttccctgttgacggagatttcgcctaaaaatgacttgggacatccgctttgtaacaatctgcgcgacggaaactggatgatgggtaagtttgtaaagatagagatttatgtagttactttacaacataattcttttcagattacatttctgatcgcctaactagttatgaagacctgaaaccactctccgcctggttcaaagctacctttgagccactgaagaatattccacgctacctcataccctgctactttgatgccattgtcagcggggtttacaatgtgctcatcaaccaggtcaacgaactaatgccagagtatgtccattagagccgactgcattcatggagtttttattaagtctttaatttttacagcttcattaagaatggccacagtttcccacaatccctggccctgtccacgttgcagttcctctccgtttgcaagtcggccaatctgccgggattcagtcctgctctaagtccacccaagcctccaaagcaatgtgtgactctatctgctggtctgccgcatttctcaacgggtgagtttatctattatatttaacaatcgaaacggaataatggaatattcaaccatttatgtaggctatatgcggtgctggggccgtgataccttcatcgctctgcgtggctccatgttcctcactggccgttacaacgaggctcgcttcatcatcattggatttggtcagacccttcgacacggactcattccgaatcttttggacagcggcagcaagccgagattcaactgccgcgatgctatctggtggtggatgtactgcatcaagcagtatgtggaggatgcccccaagggtgccgagatcctgaaggacaaggtgtcccgcatatttccgtacgacgatgccgatgcccatgctccaggtgccttcgaccaacttctcttcgacgtgatgcaggaggcactgcaggtgcattttcagggcttgcagtatagggagcgcaatgcaggctatgagatcgatgcgcacatggtggaccagggctttaacaatcagatcggaattcacccggagactggctttgtattcggaggcaataacttcaactgcggcacttggatggacaaaatgggatcctcacagaaggccggaaacaagggacgtccaagtacgccgcgcgacggatcagccgtggagctcgttggcctccagtatgccgtactccggtttatgcaaagcctagccgaaaaggaggttatcccgtacaccggcgtggaacgaaagggtccatcgggcgaagtgaccaagtggagctacaaggagtgggcggatcgcatcaagaacaactttgacaagtatttctttgtatccgaatcggaaacctgctcggtggccaacaagaagcttatctacaaggacagctatggagccacccagagttggacggactaccagctgcgatgcaacttccccatcaccttgaccgtggctcccgacctgtgcaatcctcagaatgcctggcgtgcactggagcgcgccaaaaagtatcttctgggaccgctgggcatgaagacgatggatcccgaggactggaactatagggccaactatgacaactcaaatgactccaccgattgcactgtagcccatggcgcaaactaccaccaggggccggagtgggtatggcccatcggtttttacctgcgggcgcgcctgatcttcgccaaaaagtgtggccatttggacgagaccattgccgagacctgggccatactacgggcccatctccgagagctacagacatcccattggcgcggattgcccgagttgaccaacgataatggctcctactgcggtgactcctgtcgcacgcaggcctggagtgttgctgccattttggaagtcctgtacgatctgcactccttgggagcagacgtggcctaaaccaccgtaaatactcatattcaaacctgttagttgctaccaaaaactgttattagtgttacgtttgataattgtacggatacaagatggaatgagattcgatgcctgaggtcccttgaaattttgctattcctattctattaaagttgcaattgtttttaagcgttctttttcgtctaagagaagtaactatctcggcacacacgcatgcaggagcattgggggggatcgatggagccaaagttctttcgaggcatgtcccgtcccgtatattttggaatggtgttagcctcgggaatcgttggagctttcattggtgaaaccgcttcctgggaaataggcttgaccggaggtagaggcttttcacgctttgctttcgatttaccatcctctattttcagcttaaatagaaattaaccattgcgatataaatattattttaaaaatattacacctactcactttgccacattttctcaaggctaaaatggctgcctcgcatgttagatcgtaagctttctgcaacacaacttgttggataacatcaaggacgatggacattttgatggaattacaaaaaacctgggcttcacatacaattttgctagcaactccacgagaaatttgacacaatattcccaagtcatatgaactgtatataatttgtatatacttctagtctacagtttcttataaactaaataaatacatgtaaaggttatatacataaagctttgcatagttgtaaactatccgcattacgtctgcagcgaagtttgggttccatttggactcgcttggtaggattcgttttcagtaactatctcgacgtcatcatctttgatggatttgagatcgcgtccaatactttccatgttcaagctcaaggcagctgcagccacattattattcacttcatccagcttgggctggcgtaggcagttctcgtcgtttgaggcctcacgtttaacccttgccggtggctgctctgtcgcatccgccgaacttcgcagattgagcagctcccggcgaatggcctctacattgtcttcaaggttgggtttcttgatctccgagtcattcgatgatttcggctgagtagaattcaccattagggctagtggaatgggcaatcgtttgataagcgcttctttatctac

SEQ ID NO: 28907 - DNA, 4854 bp, DROSOPHILA
aattgcttaagaatttcggctggtaacgtaaagttcaatttcgcatcttcatcacagcccaaaaaatgagcaccatgggcaaggagacggagtcgcatagcatacccatcagcgagggccaggatgcggagcatatcctgtaccgtctgaagcggggttccaagctgagtgttcatccggatgcctcgttgctgggcaggaagatcgtattgtacaccaactatcccgccgagggacagaagtttgtgcgtacggagtatcgcgtgctgggatggcaactcagcaatggcaagcagattacctctgtaatgcatccggaggcccatgtggtagatactgacattcgtagtcaggtggagctcaacatgtccggcacctaccacttttacttccggtatctggaaagacccgacactggctgctccggagcagatggagctctatatgtgcaagtggagcccacgctgcatgttgggccgcctggcgcccagaagaccattcccttggactcggtgcgctgccaaacggtgctggccaagctcctgggaccactggacacttgggagcctaagctgcgcgtggcaaaggaggccggatacaatgtgatccacttcactcccatccaggagttgggtggctcccgatcctgctattcgctgcgtgatcaactcaaggtcaactcccattttgcaccccaaaagggaggtaagatcagttttgaggatgtggagaaggtcatcaagaagtgccgccaggagtggggggtggcctccatctgcgacatcgtgctcaatcacaccgccaacgagtccgattggctactacagcatccggatgccacctactcatgcgccacctgtccctacctccgccccgccttcctgctggacgccacattcgcccagtgcggagcggacatagccgagggcagcctggagcatgtaggcgtacctgcggtcatcgagcaggagtgccatttggaagcgttaaagtaccagttgcacacctcctacatgtccaaggtcaatatacacgagctgtatcagtgcgatgtgatgaagtacgtgaacgagttcatgtcccaggtgcgaactcgcgagccaccgaagaatgtggccaacgagtgtcgcttccaggaaatccaactgatacaggacccgcaatatcgacgcttggccagcaccattaatttcgagctggcgctggagatctttaatgctttccatggcgactgcttcgatgaggagtcacggttccgcaagtgcgccgaaaccctccgccggcatctcgatgccctcaacgatcgtgtgcgctgcgaggttcaaggctacataaactatgcgatagacaatgttttggccggagttcgctacgaaagagtccagggcgatgggcccagagtgaaggagatctccgagaagcactcggtctttatggtctactttacgcataccggcacccagggaaaatcgctcactgagatcgaggcggatatgtataccaaggctggagagttcttcatggcccacaacggttgggtcatgggatacagcgatcctctgagggattttgctgaggagcaacctggacgcgccaatgtctacctcaagcgggagctcatctcgtggggcgatagtgtgaagttgcgcttcggcagacggccggaggacagtccctacctatggcagcacatgaccgagtacgttcagaccacagcgcgcatcttcgacggtgtgcgattggacaactgccactccacgccattgcacgtagctgagtaccttctcgatgcagctcgtaagatcaacccagagctgtatgtggtggctgaactgttcaccaattccgattacaccgacaatgtgtttgtgaaccgattgggtatcacctccttgatccgtgaagctctttccgcttgggactcccacgagcaaggccgcttagtgtatcggtatggaggagtgcctgtaggtggtttccaagcaaactcatcgcgccacgaggccaccagtgtcgctcatgccctcttcctggacctcacccacgataatccgtctccggtggagaagcgttccgtgtacgatcttctaccatcggcggcactggtttccatggcatgctgtgccacaggaagtaaccgtggttacgacgaactggtcccccatcatatccatgtcgtagatgaggaacgcacctaccaagaatggggcaaaggtgttgactcgaagtccggaattatgggtgccaaaagagcactgaatttgctgcatggacagctcgcagaggagggatttagccaagtttacgtagaccagatggatcccaacgtagttgcagttactcgtcattcgccaatcacgcatcagtcagttattctcgtggcccacactgcctttggctatccctctcctaatgccggacccaccggaatccgcccgctgcgtttcgagggtgtgctggacgagatcatcctggaggccagcttgaccatgcagagtgacaagccattcgatcgtcctgctccattcaaaaaggatccgaatgtaatcaacggctttactcagttccagttgaatctgcaggagcacatcccgctggctaagtcgacagtgtttcagacccaagcctattcggatggcaacaacacggagctaaactttgccaatctacgacccggcactgtggtggccatcagagtgtctatgcatcctggtcctcgcaccagtttcgataagctccagaaaatctcggctgccctgcgtattggatctggcgaggagtattcccagctgcaggctatcgtctccaagttggatctggtggcacttagtggtgcccttttcagctgcgatgatgaggagagggatcttggcaaaggtggcaccgcctacgacattcccaactttggaaagatcgtttactgcggattgcaaggattcatttccctgttgacggagatttcgcctaaaaatgacttgggacatccgctttgtaacaatctgcgcgacggaaactggatgatggattacatttctgatcgcctaactagttatgaagacctgaaaccactctccgcctggttcaaagctacctttgagccactgaagaatattccacgctacctcataccctgctactttgatgccattgtcagcggggtttacaatgtgctcatcaaccaggtcaacgaactaatgccagacttcattaagaatggccacagtttcccacaatccctggccctgtccacgttgcagttcctctccgtttgcaagtcggccaatctgccgggattcagtcctgctctaagtccacccaagcctccaaagcaatgtgtgactctatctgctggtctgccgcatttctcaacgggctatatgcggtgctggggccgtgataccttcatcgctctgcgtggctccatgttcctcactggccgttacaacgaggctcgcttcatcatcattggatttggtcagacccttcgacacggactcattccgaatcttttggacagcggcagcaagccgagattcaactgccgcgatgctatctggtggtggatgtactgcatcaagcagtatgtggaggatgcccccaagggtgccgagatcctgaaggacaaggtgtcccgcatatttccgtacgacgatgccgatgcccatgctccaggtgccttcgaccaacttctcttcgacgtgatgcaggaggcactgcaggtgcattttcagggcttgcagtatagggagcgcaatgcaggctatgagatcgatgcgcacatggtggaccagggctttaacaatcagatcggaattcacccggagactggctttgtattcggaggcaataacttcaactgcggcacttggatggacaaaatgggatcctcacagaaggccggaaacaagggacgtccaagtacgccgcgcgacggatcagccgtggagctcgttggcctccagtatgccgtactccggtttatgcaaagcctagccgaaaaggaggttatcccgtacaccggcgtggaacgaaagggtccatcgggcgaagtgaccaagtggagctacaaggagtgggcggatcgcatcaagaacaactttgacaagtatttctttgtatccgaatcggaaacctgctcggtggccaacaagaagcttatctacaaggacagctatggagccacccagagttggacggactaccagctgcgatgcaacttccccatcaccttgaccgtggctcccgacctgtgcaatcctcagaatgcctggcgtgcactggagcgcgccaaaaagtatcttctgggaccgctgggcatgaagacgatggatcccgaggactggaactatagggccaactatgacaactcaaatgactccaccgattgcactgtagcccatggcgcaaactaccaccaggggccggagtgggtatggcccatcggtttttacctgcgggcgcgcctgatcttcgccaaaaagtgtggccatttggacgagaccattgccgagacctgggccatactacgggcccatctccgagagctacagacatcccattggcgcggattgcccgagttgaccaacgataatggctcctactgcggtgactcctgtcgcacgcaggcctggagtgttgctgccattttggaagtcctgtacgatctgcactccttgggagcagacgtggcctaaaccaccgtaaatactcatattcaaacctgttagttgctaccaaaaactgttattagtgttacgtttgataattgtacggatacaagatggaatgagattcgatgcctgaggtcccttgaaattttgctattcctattctattaaagttgcaattgttttt

SEQ ID NO: 28908 - protein, 1542 aa, DROSOPHILA; identical to SEQ ID NO: 20079

SEQ ID NO: 28909 - DNA, 4405 bp, DROSOPHILA
tcggctactccactccaattgtcggactaatttattgggtcttcgtcgcgtgctttgaattgtaatatttatactagcgaccggtatttgtatctcaagtacagattcattttttgtttactatcccttaagttgtaaattttctcaagaggtacttcaacatttaaaatgtttgtgatatttggcaaacttaagtaatcaaggcatattaggtttaataggaacatgaatactttgtcctttaatattttggatcgaattttaagttgataagtatcttaagcttgtgtccaaacattattacctctaatcaatgagaccaatttaatatagactattatattttataagcttcacattggcagaagggtatttttgggtctgtaaatatgatacttttattattttaaagccatttcaaagccaggtgttcaaagaaacataaaaaggttagttgctgacctaaaaacttcacatgctggttactgactttaatatagttgatagactaaaccgactcagttatacccttaatttaaatgtaaataggccaatatgatatgtttcattcattttaaaaatgaataaaagaaaacatgttttggtataaatatatatatatatagcaatatgttccttgtactgccaacatttcaactaactttgtatgagtgttttatgggttcactgataatgagattaggaatagattttcattgagtgggagtaaattattttcaattgcctgcttaaactaatctatagatttcagtcatttcatttcagtcatgattttattaaaaaaaaagaatgtttgatactaatttcattgagtacaaatggattaaaaggtgattaatgattgcgatagaactgttagattcactaaaaccaaaatccaactaatcttaacacaccacttttttgaaaaattaaagcagctattcagcttattttatatttatttccaagcttaatgaatgcaaataagtgcctatttcagatatgttattttcttaaacatatttattgtttattaaccaatttcgttgaacaatgtaataaacttttcgacataatatagagattctttaacagttttgagtagaaatgcacatataaataaaataaaatttctgcgaccagttgaactgtaaagcgctcagattaactgatttaaaacgttttgtttcagtgcgttggacattcgatccgtggcttagttggtcacatagatttcgaactccttgtaggccagctcctcgccgccgtacggaatgtagcagcatccgtgggagggctgcaccttgcccacagtgatagttccgtcgtgggtggcacggccgatgaacagtggttcgccctcggcggtctctccggcaggcagggcgttgggcgggatgtttccggcatccacgggcaaccactggccgccgccggcgcacagcacctcgtattcggcgtggccgtgctcaccacctccccaggctacgtaggtcactccgtgggagggatgcagcttgccgggaatgaggtcgccctcatggcgggcacgggcgatgtacagctgctcgctgctgtcgaatcctccctcgagggcgttgggtggcacctcaccgttggcggcgggcacccagcatcctggtccgcttcctgtgggcgcggcgaagcccatgacgggagccgatggagcgggctctgcaaggaaatagtggcatttgttagaaattcatgaaatcattagcaaatcttatacatatatgtatatataataggcaaatacatatttatagcaaggatatagtcttggagagcaattaagtgttattgatcagtactcaatagtaccaactctacgagtagcgggtatagtaatactcgatattcaaactgaagcagctgactagacaatagatgccattgagcagctgtagaacaatagctaacttagatcattacgatgggtaaactaatcagagagggtaaacacctgtgctttccgtttgatagaaaaggcgtggaacagagtgtaaactcaccatcaatcagccaggtgccgctggcaccccatcccgtgcagatgccgacgaagttgaccgggaacaggctaccagcatcgtaggaaaggaaggcggcggcgtctccttcgcggccaacggtgatgacattgtcgtaccagcgcacccagaagccacggaactctccggcatctaggatgcccggagtgggcacctcagcgacttcgggcttctggcggtccttgcggatcaccgacttggtgttctcccatcctcccagaaagatctcgaaaatgggaccgttctcctcgggcgcgggtgtgagtgccaaatgagcatccttgggggaacgcaccttgaaggtaaaaactccaccgctggcggggaagaattggtactccaacttatcgggggtgttgacttctgcaaatgagatggcatattagtacaaattctcagaggcaactgtacactcggctacgtttttctgagccaactgtacccactactactttgaaaggtgggaaagttttgaggtttgaattaacaacctcaaacatgagaatgttgtcataaaaaatacttgaactggaaagaattcgtagctatttttatgtttgttaggtttctacgtacatataaacatacatatatcagcatgtttagcgtctgtttttgttttcgcttgcttattagcaccattcgcatgatgtcatttagatcgccatcagttcttcgcaacaaattgttctagctaattccactcaagcttaatttcgagttttgagctctgagccggctctactgccactcgagcgacaaacatttgcccagatatatgcgaggtttgtgctattcactttgaatagattacacgaatggtttctcaagcagcattatttcgcatgacatcattggaggtgcatctttcgtctgacctccctagggtcaaccctgctgaattcctattgattattgtcggagttcaaggcgaagaccagtgactcatcgcatatggtgaacaatttcggacacctttggtcgagaatcaattcgatgggtcataaattaggccaaataaaggcagtccaatatgtatagcatattgccgttaattgaatctggacgatcacaaggtgaaagtcgcttgtatttttcactggtaaaaacccagcatagataaagaatgggatgtttcgattctaggaattggacgacacaatgctattttggtcgtgggccaaaaattccgccgcacatttccctatctttaaattcacccaattatccattccattatccaactgctcagggcactccacccacacccactgggaaactcaccgattggcatgattgctgtttcaatcaacgatgttcgcttactgagattctgattcaaactgccccaatggagcccaaatgccggcgaggtaagcaatgctaaaaaaccgagacggtgagagagtaaaagctccaagagctttggcgctctcacttgcaaagtgggagatcgttggccatatagaaagtattcgaactgtaccagctcgaatagctaacttattcacatagcggtatactgcacatgctaaggcttatctttaattattttaaaggcaattatttttcttaaatgtaaatcttaattaaaggctgataatttctagcataatggcatagctttaaaaaaaatttctttacttacaaatgtacatataactattttgtacatgggcacaatattagataattgtaatttcctttttaactttttgttccctggactttcacctcgtggtaagggcatgtaagcttcggtataactaaggtagttttgtcacctagttttgcttaagaggtctatgactcaggttggcaaaagctgctgcttagtcatcagaaccataagcaagcttttattgctaaaatgctttttctatgggcatgataattttcatatcgctatgcgaataaatatttactatttactactgtatgcaaggtgtacaattagtatgcaaggcacttaatgatgtgacctattccaaaaaaggaaggccctaaaaaaatctattaaataatgagctataaattggttaaaagaattggttgatcttaaaataatgaatttcttgagtataagagacttacttctatactctatgatgttccaatgcttctaaaatatatgattaactttcatttcagctagggtacattctattcgatcaacttgtgtttcgccttcgtttgccgttagtagtgtcgtcacttattttggcgtcatgtgccgcttttatattgtgcggtcacatggatatccaaaccagggcatcaaaagctactgtcaatgatttcaccgcaagggtccaaaatggttgatg

SEQ ID NO: 28910 - DNA, 876 bp, DROSOPHILA
agtaagcgaacatcgttgattgaaacagcaatcatgccaatcgaagtcaacacccccgataagttggagtaccaattcttccccgccttcctttcctacgatgctggtagcctgttcccggtcaacttcgtcggcatctgcacgggatggggtgccagcggcacctggctgattgatgagcccgctccatcggctcccgtcatgggcttcgccgcgcccacaggaagcggaccaggatgctgggtgcccgccgccaacggtgaggtgccacccaacgccctcgagggaggattcgacagcagcgagcagctgtacatcgcccgtgcccgccatgagggcgacctcattcccggcaagctgcatccctcccacggagtgacctacgtagcctggggaggtggtgagcacggccacgccgaatacgaggtgctgtgcgccggcggcggccagtggttgcccgtggatgccggaaacatcccgcccaacgccctgcctgccggagagaccgccgagggcgaaccactgttcatcggccgtgccacccacgacggaactatcactgtgggcaaggtgcagccctcccacggatgctgctacattccgtacggcggcgaggagctggcctacaaggagttcgaaatctatgtgaccaactaagccacggatcgaatgtccaacgcactgaaacaaaacgttttaaatcagttaatctgagcgctttacagttcaactggtcgcagaaattttattttatttatatgtgcatttctactcaaaactgttaaagaatctctatattatgtcgaaaagtttattacattgttcaacgaaattggttaataaacaataaatatgtttaagaaaataacatatctg

SEQ ID NO: 28911 - protein, 207 aa, DROSOPHILA
MPIEVNTPDKLEYQFFPAFLSYDAGSLFPVNFVGICTGWGASGTWLIDEPAPSAPVMGFAAPTGSGPGCWVPAANGEVPPNALEGGFDSSEQLYIARARHEGDLIPGKLHPSHGVTYVAWGGGEHGHAEYEVLCAGGGQWLPVDAGNIPPNALPAGETAEGEPLFIGRATHDGTITVGKVQPSHGCCYIPYGGEELAYKEFEIYVTN

SEQ ID NO: 28912 - DNA, 13463 bp, DROSOPHILA
ctcatatttttaagtcgcctatcaaatatagccttgcctaattgcaattgccgtgtccaatcgtcgtagcggaatggcctttggacgcatgcctccactcggggagtttgtccatcctttgccaggaagaggggtagcggcaccgtaaccgagcaatttggcaagtcctgcttcggattatcctgatgatcgtacaagagttggcccaacattccagtgttcaagccgggataagagaagtgcggcgcattttccaaaatgctgcgcagattatctggctcattgttatcctcagcatcttgatccggcggaagatcatcttcggaatcggattcgttgtcactagttttggtcttgacctgggcactgtatttggccgaattgagagctgtttgatagcgtcgcggcatgtctgtaattggagtataaataagaaatcggattttgctagctggccgatgtgttttgatgcatgtgagcctggcttacggatttcttcgatcagctatccagttctgcacgaaagaatttagttaacaaattgaatttgactcaatcaaacgccaaacgcacgacgtttcctctggacgcaagaaacagctgattagtgatgggtatttatgtctacccaaccgcatgcttgctgttatgagcattacaagcaaaatattcacaatatattaaaataatataggttttggattatctattacattacattggaagtgcaaaaatgtaacattgaaaaaaaaagcatcgtaaaatacctttttaaagaaatgtaaaggttttagacaccaataataagtaacatttacatttttaagtcaaaaatatttaagaatccgatgttttgataagcgacgatgtatcgctggtcggcgatactatttctaaaatatcggctagctcgatagcacctatatgaaaacatcgattcccgatgcatcgatgtttctccccatcactatcaaatttgctttgcgctgcatcgagaccgagaattaaagacttgaaagcagctggagaaattacaagaaattgatccccgaaaattactggcaatcgcgaacagcgggcgtgtgtgtgtgtgtgcgtgcgcgcgagagcgagagaataagtgaatgaaacagaacgagcacagaaattacacaagttgtaaaagaaaaggtgaagaaaaaagttggtcgagaccgaatattgattttttcatagacagtgcagttaaaacaacggtctctttttgttagccaaaaagaaggcgttggtaaaaagcggtagtagtttttatctcaattttgaggcctacaaaagaatagaagaaaaagcaacggaaagcgtcaggtgagttttttaaatccaaccacgcacacacctgcactcacacctacactaccgcacacaacgggcacaattaacatacatacaagtgccaaacagacaacaaaacaaatgccaattggaaaggtgtgaaagagaggggcgggtctggaagataacattaaccagttctaatcctactcccctccctctcgctccgcttgcatttgttttgttgcagttatctattactcttccctctctctctctctctctctctctctgtcttatcctgtctctctctctctgcgctcgcccccattaaaaagaaaagaaaacacactgcctcatctaaaacttttcatttgcatcccagtatctgtttttcaattagcactattgtatattttgcgcactcttctttttacttagttaacagttagttgttgtatgcacgtttttgtcgttgttgttcttgttgctcgccatatctgtactaattcatccatttatgatgttcgtttttattcgttattcgttttttttttgtgtatgtttggctttggtttcgtttgggttttcctcgcttttcctaactgctaatttttgacaaaacccaaatggcttctggctctgacgtaatggacccctgctgccctccccttcgctccattccgtctctcttcctctttatcgctctccctctctcggagctggcgcttttccactctaaacgacctccagaaaacttcgccgcaatcatttcagcagctgccacagtgaagcctgtgtgctgaaaaccaagttatgccagtaaaaaaaagtgcggttgcatgttgtcctgggattctaaattagtaggtttccttgattcctacaccttttttccatattctgaattgcaattaagttaaataagaaatttgacgatctaggcaattcgcaaaaaaacctcaaatcaacttcgagttgattttctagacaatagtcgaccaattttcctaactaaacaaaggaaaagcgaaatggaataatggggttgttcattaaaagcgacttgactgttatctctaatagttgccctaattggtttacctattggcagtgtttactgttcctgcagacatttgttattcgctgttttgtgaaattttattgcttctagcggtttttgggtgtggaaatgaatgggtgaggactccactttaacggctctactgtaacctgtcggcgccatcgccatggacaggatttcgtctcgtcctcctgagtatctgagtccagtacatacatgtatgtatacgtatctatatctgatgtttaactttcctgcatgtttaatgcgtaggtcagtttactcagaaggcaaacacaataaaaagttcgccgcacaaattgcttttggcgccttgttgctgctcctgttgttgttcttgttgttgttgttgttgacgctcttgttggccactcaggtgtttaccaacttccctggcaccttctcccttttctgcccttggtctgctgcggctctgtttttatgtaactttcaaatcgattgcaaacacgtaacagtagggcaacctgcgccgcccctcattgccccaccgtgccacgcccctagcctcccacctacccaactgatattctcccatatcctgcaacaacacgctctgacgttgagcgtgtgatttggttcgtttcggctgtacgattttttttcctgctggcctgcggcttgacatagcgtgacatttcctgtatgtgatttgctgccgttgtcggtgccccagaacccctgccacgccccctaccgatggggtatcttgtctctccgccccccaaagaacatttgaataatttctgttttgcaaatttgtaccccctcccacatcggaggcgatatccttgaaggactcggacaaattgcagtcaatacaatagttgagcaagtatttttaggggcagcagagaacttgttgttagccaccttccaaggaaatcgaacactgaaagatcttacaaaaaacaagagccattaaacgtattaaatgataatttaacaatgaattatgtatgtaactacagcagacttcctttaaaattatctcttttcacgtctaagtagaaaaagatacatttaaagcaaatcaaaagctcaaggattatgtaaatcacttttgttctcagaagaaaaaaaatcgtaattatttagtcttctgagtcggtaaatccgaagtagcattgaatcccaatcaagtacacagttcagcagtagattgagttcagattgctgtcttgagcttcggtttgttgttgcccgttgacctgccaacggttgccgtgggcgacctgccaaattgtcgatattccgtgcgctcctttcgctccgggccggaaaaacggaaaagccagggcacgtcgttcgcctgtcgccgtcccactctagccgatggctaatttcaatggctccacgctgcttgcacctcaagctcctcctctgcactcttcacgtgcaatcgcaattatgaataattcgccataaatggcacacgctgggctgcaattattggaattgaagtggcccagatgccgctgataaatcgcttgccaccaataagcctatagtacattatacattactacattatatgtacatatatatgtagaaatatggcgctaggcccattatatcatataccatttcgtgtggtcgaggtgaaaagtgcaagcgcaactttatcagcgcccataaatcgagcagcaaaaggtcaaagttgagctagactaacagcttttttagtggcgaaggatggccgcggaatttgcgagtgcccatgtacttggcaactttaaatgcggtgtcatttgtgtttaggttttcagactagggcaacaaatcattgttgtttttgtgtgattattcatcagttatatggttgataaaaccagtaattatgccataaaagttggtcattttatttgatcagctgaaatcaagcatgttcctttcaataacagttgataaaagaattgtcttgtatgatttcactgtacttacttacttaacttagttatttgtttaaccaaagataaggcttgatgagatgtttcgaaagatattggagagtcaagaatccagtttgaatcgcagctaccaagataagatagctggaaaccataaaagcgatgcatcgttccatttggaagtcacgacttatgccattctcttcattttacgtcgtgattttatgactaaagtttcaattcgaatggctaaattatgcagttaccattgcagctaaatgagcaataaaatacttaagtcgttggcttttgaataataaaactctagaacaactctggctcggcatcccaaatcatccggcttgtatacattttgctgtatgtttaccctggagccacattcatcatacgcactgaggtcccagctcggaaatgaattcaaattgcttggcttgactgggttctaaaacctaagacgcaaaaaatagtagccataacgagttttgttttgtttatcgtttgaacttatacacttgcccagtgaccaaccagtacataacatgtatataattatctgtatctggagctgcgtcatagcatttggagtgcttgaagcgtttgcatttgcttcgttgctgtccggtgattattagttgataaattcgagccgcatgacgcacttaatcagtgcaaaaaaaaaaaaaaaaaatactacacgacgaacgagaacgggaggaggaaaagatgtgtgtggcctcccggggatgtgtgaaattttcatgcctccgttccactttggcttcaagccagggcacgtggagagcaggcctcaacccttggcccaaactgggttaatgtaatgcatatgtgctacattggcgacgtaggagatgggaatggttcgggggggttgcagctgcagcagtctctgtgtgccccaatcccaaacccagatccaaaacccacatacccacatcgccttcctctcgcggcttggcctgcatattttgtttcaagtacgagcattgacgccccagctcagtgctcccccctgcagtggagcttggatagtgatggcagaaagtgaggttgaaggtcttgagattcggctgatctttaaggtgcaccagattctgattaacataagtccaataatgcttatttcatgtcatgtcaagtcacatagtgcactcactggaacgtttaagaacattcttatcgattcgatgtggaatagaaaatgttcttgctttgatttacttctatgaataaggatgtggaatttattacatttgactattcttttacttcttcaaacttatctcactctctcaaaagaaatcgattaacaactaaagggtttggattttgaatacatttttatttggccctggcttattatcgctgtttcttaaccataaagtttaaaagttgatcgctttaccgtatgactttgagcataactaaccgaattttggtgctggcttcgtcaaagcgatgccccactgtagtggcttgctgcttcttaaccaatgtcaatcatttgatactgtggacccccgccaatccggctttcgtgtgactcaatctcatcatcattctatttgcttttgttattataattttattttctttgtttttttatgtgatttatgttttgtgacgttgtgatgccgctgctgcgctgctgctgcccaaaaaaaaaaaaacaataataaacatatgaatatttgaatgtcaacgaaatgcccattgtatttgtctgtctgtctgccggctataatattacacacatcggcgctgatgaatcaaaagcattgtttataaaaaacttgaaaacagaaacgcacccacacaccgacacttgcatgcacagtggaacactcagttctgactatcagaaaagaataaataaaataaataaaaaacaaagcacaccaggctaagtacttaagcgagaaattcgagcgaagtcgaaagataactagccggttaacaaataaatcagaaatcaagcgaaagacccaaaaaagcatgccacagtcagagggcggctatgtatcgctgccggccgtcaatggcaatggcggcgccatctatcagtcgaccacagagcccacggccccgccctccgtttttgcgagcgtgaagcgggccattggccaggccatcaagtcctcgcccaccgacagcgaggagctgctccggtcggaccgcctgccggtcatcgtcggcggctccaggtaagtccatccaaccggggcttagccaccaacttttcgcctcctcctctctacgggcgacgcgacggtgagctctctccgccaatcattcttaatcacccaccacaatgtggccccacaaccattgcccccgcttaggcacatacacaaaacccccactgaacgcacgcaccacaccactgaatcattaaacaactgagtgacccactcgcagctacacagagaacaaaaagaacggagtcatcaaataaatttccaactttaatttattgacatatatatatgtatatactgcaaatgcttatctgaaaactaattcgcacagcaaacagccactttcgttgcaatttaattgtaattaattactcaacattctttcaaattacttgctcaacaattttccacaaataagattgcatcttctttgagccgttttctctgtgtagctcagttaaacagcgaacatcaaagctcaattttgcctttgccacctgacttcccataaccccagaagcttaattgcgattgcatgtcagcccaaaagaaatgtttgatttttgcttttcttgcttttgattgtttgtgcttgttgccaatgttgttgttatatttctcttcattttccaaggcaccttgcattattatattgaaattatttgcccagcagaaggaagaactaattgtatatatttgatgtaaactcaaaggttcacattccacattacatcatcatcatcatcatcagcataaagcttactgctctaagggaatttcccaattatacctttcttagatgaatcagacactttgcaatgaaaagtgccctgaaagtagagcattttgaaaagggtctaggccccaaaagaagaatagcgtcggaaatgtaacttcgtttctggttagccatgacccaaggtcaaactgcagtttgcagttgcagcagttttgtcaatacaacaatcccgagagcacagcaaacagagctcagaaactaaagtgaactcttgagtcgtttagtttgggtttagttggccgccggttgcgacccacattcgttttaatttgcggtcactcttcaaattattcatactcatacgcagtagagaatccacgattatacgattattcacgattgcgctggcgatctcaagtggccttaattagtatttccgcagccactggcatcgctcgtaagtgatttggtccacttaatgtgttatttccagatgcgagatcgcaccgtctgtttgcattccttcagccaagtgcattgctcttggctccctggcctggagttaaccgataccgagcagttctaaccggttggtggccgtaccggtttaagctggagattcaaagtaaattgaaaagaaagtccagcaagtgtatgcaaacagctgattaacacaaataatccatccgcttgcgtgctgtaccagaaattgattgttcagattaataatggatgtacagggaaatgtaaggcttacgtcggtagttagtaataatgcaataataatattttaattatggaaacacaaagctcaggacgttgcatatttcaagagctagtcagtcgcgttcataagtttcatcttatgaatttatgataataatagtttcctcggcacatctatttttctttgccataagagctgagctctgcttatgcaatttccctttggctcaatcacgtaaccaattaaaggtgataatgaaaacggccatgaccccaaacgtacatatgtatatatactagtgtgtatataatgtatgaggataatgaactctcatccctcacctgagcttatccccacaccaccagcattaactaattgagttcggtccctgcagtaaaagttttttgttagcccaagaaaaagaggaggatgtaggtaaacaaaagttttcgagcttttcacgtttttacaggggacgcaaaggagaggaaagtcaaattagtatgccagctggtcgcattttcctggcgccacttgtttgtcgctagccattttcatacatcgctaaaacatatccatcgacatttaccccgaatgacattgcgtgactcattcgcttacgttttacgttttacgtaacggaacgcgagaccttgacgagaattcccccgcttcattcaaccgggcaaacaaacaagtttgcttctccgctctttctttctactgttctatgtctgcttaattccctacttcacaaccgtcctgtgaatatatatttactcctaagatctcaaatttcaagtccacaagaaaatatgaatatatatacggtgaaagtttttagccgatttggaacagagtctgccagaaacttgcctcgatttttgcgttcctttggttattctttgcttgcatgctcatagaatctctttcagagaccgcgacaaatccggtaagacactgaccaccaagatgccgtcagctccaacacacactgccgaggaggcacatctgctggggtaagcaaaatgaaagaaagaaaagaaaatactcccagggtattgtgtaattaggtcccaaaatttccgaaccatccgaatcgaatgtatgtaagatatatgcaagacactcaaacaccccaaaaaacacaatcacaatacacaagtttagagtttttgcgtttgaattaatttttcgttacttttgttcattaacccttcacatagtttttgatttacgagtaaacgtattgttaagagacaaccattagttcgtaagtacttgccctagacttgagtttgacaactaaaccctgtaaaagcatcccaaattgttctatctctccgaatgtttattaaccgatatcttacgtcttgatttatttgagttttgcatacatttgaaccccataactagagtagaggagagcagcgagatcaactcacgcctgccatatatgtattacccccaagatcagtagcctcttagtatctagatgagatccgaatcaaggatgcatatcctgcgacacaaagacacttaaactcacaggatgccagtctatgaacagctacccagctgctgctgccgccgcctaaaaatcccaccaaaaacatattgtctcggggattaagggagagccatatgttactaacttacatcttttttttatccatcccaatagcaccatgcccgttgatcccatggatgacatcgaactgcgctccgtgcagctgcaattccccaatgcccgcggctccatcctggaggcctgcgaacagcgacgcgtgcccacagacaagggcgatgtccacgtggccatacagggcgatacggccaagccggccattatcacctaccacgatttgggcctcaactgtaagtgttcaaatacctgctcaaatcggatcgtactaatcggtattgttctaccattgtagacgccaccagctttgctggcttcttcaattttccagtgatgcgaggtctgctggagaacttctgtgtttaccacgtgactgctcctggccaggaggagggtgcacccactttgccagaggagtaagaaataattgcctaccgcgtaatacatttcttgtcaatctttcataatcgcaatactagctctttgttcagtaaattataagtaaacaaaagaaaactttcaaataattccaaattatataccatatatttctaaaaatattcctatcacttgcagttacgtctatccgaccatggatgatctggccgcccagctgcttttcgtgctatcccactttggcctaaagtcggtgattggtttcggcgttggtgccggggcgaatattctggcccgtttcgctcacgcccatccggacaaggtgggcgccctgtgcctgatcaattgcgtgtccacgcagtcgggctggatcgagtggggctaccagagcttcaatgcccgcttcttgcgcaccaagggcatgacacagggcgtgatcgattatctgatgtggcaccacttcggacgcaatccggaggagcgcaatcacgacctggtgcagatgtacaagcagcacttcgagcgtggcgttaatccgaccaatcttgccatgctgatcaacgcgtacatccatcgtaacgacctgcatctggcacgcactccgccaggtactccgggcagcgaaacggcggccaccacgctgaagatgccggtgatcaatatcacaggttcgctctcgccgcacgtcgacgacacggtgaccttcaatggccgtctagatcctacaaactcatcgtggatgaaggttcttacaaattttaaccaacatacatatgcggttgtaataattcaattataaccgaccgcatatctatgtattgttattaagttctgttcgattgtaataagcttgttttttccacacacagatttccgattgcgctttggtgctggaggagcagccggctaagctggccgaggccttccggctcttcttgcagggcgagggctacggtaagtgttagaacaccgcacaccacaccaccaagatccaccacagcaacaaaaacaactagaactacagcaacatcaaatgctacaacaactgaacaacctcagcaatctctgctacaatctcaacaatctactactgtacccactctatctaattcttctattaacccgcaactaccttaactacttaactacctaccacctaaatttcttagtcaagtacttccgacccggcgactgggatggcactcagttgagcagcttcatctagaagtccattccgtttggagcaagatatcccctccatagattcagttcagttcagttcagctcagttttcccacaggagatgctcctcctagcttagcccccgattttctccgtggagacacacgcacacacaaagtacacaaacgtccctgacccaacctgattttagtctaaacgaaaatctttgagaatcaaaagctttttgagatgcattgaaacgaaaccaaaaatctattgtgcaaaattttatatttacaaattggttagatatacaaaacaaaaaaaaaaaactaacaaaattgacattgatcgttcatatatatgttgataataaaccaaagtatttgtacgcaaccaaaagtatttccaaataaatcgaaaagttgttgaaaatcaagcgtttactttctacacacatatatttaactactttcaaaccccaccaacctatttccccgaatagttaggaccccaaagagtacacacaatttcgcatccacgacagcaaccaaacaaaaaaagatattcaagatgttcattactttgtttttcatttctttttcctttctccaaaactgcttgtttttgctaaaccaacatacaaaacaaaaaataaaaaaaaaaacaaaatatgaaaaaaaattctatgaaaaacaaacgaacaacacgcaacatgaatccaaatgaaaaacaaaatatatacaaacaaaatctttcacacgaaattgcaacttcaaacgatcaaataccccaaaatccgcaccccataattccataatcttcattcgatttcatggtctatgcaatccaatccatcgacttggtctctgctgcattcaccaacgacttttcccccgttctgtttcaattcgtttcaattctaactctgattttcttttcgtttcgaaattggtttttccaatccaactcaactcgaaatgatcgacaaataactaattaactaatgcaactgcgcgttcactgtaatttcaacaacaaaactaaatataataatcgtttatatggtatgtatatttgtacaccatcatattcgcacctgtgatcgtagtgtccgagaaacctcagtaggaagatctgccggagcaaccaagcagtaatatacccaacaaattgcaaacaaaaaaaaaaaaacaaataaacccgaaatctagttggaatgcatttagctaattaattaatacaataattcaaattaacattatatacaactatataggcaaagtagagcttaaaaaccacccatacacacacacacacagctagtcaaggttctttcgatattttaaggtgttaacgggtaaattaatatattgtcaaaatactaatagcagtacattttattttatgaaattatacaaatttatttatattttctataaatacaacttgtcttactaatttcctgacttaacgcccgacaccttaagattttgagagttgaatagtgaaaatgacttacactagcctgcatctgcgtagatttgcttctgagtacagtgcaacctcgttagctgggccattgatgcgctttcgcttttccaacgctctctttaattttctcctccacaaaaacacacactctcgcacacgccttttgtttcgaataactctttcatttatttgacctatcattttgttttgtttatttacacgcaaattgaaaacaaattatacaacaacgaaaacaattaccacaacaaccacaaacaactgaacattgaatttcgaaaaccccaaaagctgttggcacactgcaaaagttggcgcgcaaaatctcatcggtcagccggagcagttccacgcaaattgagctcactgtacagtgaacgacggcggcagagcagaactatgtgagcgaatggagagagcaacagcagtggcagcggcatcggcagaagcggcagcatcggccccaattcggtggggcagagtgagtgagagagagagagagagcaattggataatcacccgacgccgatacacccaaaacaaaaaattagaacaataaccacactgagaaaaatggtttacagctttgcttttaagggcaaaataatcttgcttcggtttctccacttctgtgatttgcgttgaaatttatcgttgctcttttgttttatgttaaatact

SEQ ID NO: 28913 - DNA, 1915 bp, DROSOPHILA
agaattaaagacttgaaagcagctggagaaattacaagaaattgatccccgaaaattactggcaatcgcgaacagcgggcgtgtgtgtgtgtgtgcgtgcgcgcgagagcgagagaataagtgaatgaaacagaacgagcacagaaattacacaagttgtaaaagaaaaggtgaagaaaaaagttggtcgagaccgaatattgattttttcatagacagtgcagttaaaacaacggtctctttttgttagccaaaaagaaggcgttggtaaaaagcggtagtagtttttatctcaattttgaggcctacaaaagaatagaagaaaaagcaacggaaagcgtcagcattgtttataaaaaacttgaaaacagaaacgcacccacacaccgacacttgcatgcacagtggaacactcagttctgactatcagaaaagaataaataaaataaataaaaaacaaagcacaccaggctaagtacttaagcgagaaattcgagcgaagtcgaaagataactagccggttaacaaataaatcagaaatcaagcgaaagacccaaaaaagcatgccacagtcagagggcggctatgtatcgctgccggccgtcaatggcaatggcggcgccatctatcagtcgaccacagagcccacggccccgccctccgtttttgcgagcgtgaagcgggccattggccaggccatcaagtcctcgcccaccgacagcgaggagctgctccggtcggaccgcctgccggtcatcgtcggcggctccagaatctctttcagagaccgcgacaaatccggtaagacactgaccaccaagatgccgtcagctccaacacacactgccgaggaggcacatctgctgggcaccatgcccgttgatcccatggatgacatcgaactgcgctccgtgcagctgcaattccccaatgcccgcggctccatcctggaggcctgcgaacagcgacgcgtgcccacagacaagggcgatgtccacgtggccatacagggcgatacggccaagccggccattatcacctaccacgatttgggcctcaactacgccaccagctttgctggcttcttcaattttccagtgatgcgaggtctgctggagaacttctgtgtttaccacgtgactgctcctggccaggaggagggtgcacccactttgccagaggattacgtctatccgaccatggatgatctggccgcccagctgcttttcgtgctatcccactttggcctaaagtcggtgattggtttcggcgttggtgccggggcgaatattctggcccgtttcgctcacgcccatccggacaaggtgggcgccctgtgcctgatcaattgcgtgtccacgcagtcgggctggatcgagtggggctaccagagcttcaatgcccgcttcttgcgcaccaagggcatgacacagggcgtgatcgattatctgatgtggcaccacttcggacgcaatccggaggagcgcaatcacgacctggtgcagatgtacaagcagcacttcgagcgtggcgttaatccgaccaatcttgccatgctgatcaacgcgtacatccatcgtaacgacctgcatctggcacgcactccgccaggtactccgggcagcgaaacggcggccaccacgctgaagatgccggtgatcaatatcacaggttcgctctcgccgcacgtcgacgacacggtgaccttcaatggccgtctagatcctacaaactcatcgtggatgaagatttccgattgcgctttggtgctggaggagcagccggctaagctggccgaggccttccggctcttcttgcagggcgagggctacgtgtccgagaaacctcagtaggaagatctgccggagcaaccaagcagtaatatacccaacaaattgcaaacaaaaaaaaaaaa

SEQ ID NO: 28914 - protein, 429 aa, DROSOPHILA
MPQSEGGYVSLPAVNGNGGAIYQSTTEPTAPPSVFASVKRAIGQAIKSSPTDSEELLRSDRLPVIVGGSRISFRDRDKSGKTLTTKMPSAPTHTAEEAHLLGTMPVDPMDDIELRSVQLQFPNARGSILEACEQRRVPTDKGDVHVAIQGDTAKPAIITYHDLGLNYATSFAGFFNFPVMRGLLENFCVYHVTAPGQEEGAPTLPEDYVYPTMDDLAAQLLFVLSHFGLKSVIGFGVGAGANILARFAHAHPDKVGALCLINCVSTQSGWIEWGYQSFNARFLRTKGMTQGVIDYLMWHHFGRNPEERNHDLVQMYKQHFERGVNPTNLAMLINAYIHRNDLHLARTPPGTPGSETAATTLKMPVINITGSLSPHVDDTVTFNGRLDPTNSSWMKISDCALVLEEQPAKLAEAFRLFLQGEGYVSEKPQ

SEQ ID NO: 28915 - DNA, 13477 bp, DROSOPHILA
tctgtacacgctgtctcatatttttaagtcgcctatcaaatatagccttgcctaattgcaattgccgtgtccaatcgtcgtagcggaatggcctttggacgcatgcctccactcggggagtttgtccatcctttgccaggaagaggggtagcggcaccgtaaccgagcaatttggcaagtcctgcttcggattatcctgatgatcgtacaagagttggcccaacattccagtgttcaagccgggataagagaagtgcggcgcattttccaaaatgctgcgcagattatctggctcattgttatcctcagcatcttgatccggcggaagatcatcttcggaatcggattcgttgtcactagttttggtcttgacctgggcactgtatttggccgaattgagagctgtttgatagcgtcgcggcatgtctgtaattggagtataaataagaaatcggattttgctagctggccgatgtgttttgatgcatgtgagcctggcttacggatttcttcgatcagctatccagttctgcacgaaagaatttagttaacaaattgaatttgactcaatcaaacgccaaacgcacgacgtttcctctggacgcaagaaacagctgattagtgatgggtatttatgtctacccaaccgcatgcttgctgttatgagcattacaagcaaaatattcacaatatattaaaataatataggttttggattatctattacattacattggaagtgcaaaaatgtaacattgaaaaaaaaagcatcgtaaaatacctttttaaagaaatgtaaaggttttagacaccaataataagtaacatttacatttttaagtcaaaaatatttaagaatccgatgttttgataagcgacgatgtatcgctggtcggcgatactatttctaaaatatcggctagctcgatagcacctatatgaaaacatcgattcccgatgcatcgatgtttctccccatcactatcaaatttgctttgcgctgcatcgagaccgagaattaaagacttgaaagcagctggagaaattacaagaaattgatccccgaaaattactggcaatcgcgaacagcgggcgtgtgtgtgtgtgtgcgtgcgcgcgagagcgagagaataagtgaatgaaacagaacgagcacagaaattacacaagttgtaaaagaaaaggtgaagaaaaaagttggtcgagaccgaatattgattttttcatagacagtgcagttaaaacaacggtctctttttgttagccaaaaagaaggcgttggtaaaaagcggtagtagtttttatctcaattttgaggcctacaaaagaatagaagaaaaagcaacggaaagcgtcaggtgagttttttaaatccaaccacgcacacacctgcactcacacctacactaccgcacacaacgggcacaattaacatacatacaagtgccaaacagacaacaaaacaaatgccaattggaaaggtgtgaaagagaggggcgggtctggaagataacattaaccagttctaatcctactcccctccctctcgctccgcttgcatttgttttgttgcagttatctattactcttccctctctctctctctctctctctctctgtcttatcctgtctctctctctctgcgctcgcccccattaaaaagaaaagaaaacacactgcctcatctaaaacttttcatttgcatcccagtatctgtttttcaattagcactattgtatattttgcgcactcttctttttacttagttaacagttagttgttgtatgcacgtttttgtcgttgttgttcttgttgctcgccatatctgtactaattcatccatttatgatgttcgtttttattcgttattcgttttttttttgtgtatgtttggctttggtttcgtttgggttttcctcgcttttcctaactgctaatttttgacaaaacccaaatggcttctggctctgacgtaatggacccctgctgccctccccttcgctccattccgtctctcttcctctttatcgctctccctctctcggagctggcgcttttccactctaaacgacctccagaaaacttcgccgcaatcatttcagcagctgccacagtgaagcctgtgtgctgaaaaccaagttatgccagtaaaaaaaagtgcggttgcatgttgtcctgggattctaaattagtaggtttccttgattcctacaccttttttccatattctgaattgcaattaagttaaataagaaatttgacgatctaggcaattcgcaaaaaaacctcaaatcaacttcgagttgattttctagacaatagtcgaccaattttcctaactaaacaaaggaaaagcgaaatggaataatggggttgttcattaaaagcgacttgactgttatctctaatagttgccctaattggtttacctattggcagtgtttactgttcctgcagacatttgttattcgctgttttgtgaaattttattgcttctagcggtttttgggtgtggaaatgaatgggtgaggactccactttaacggctctactgtaacctgtcggcgccatcgccatggacaggatttcgtctcgtcctcctgagtatctgagtccagtacatacatgtatgtatacgtatctatatctgatgtttaactttcctgcatgtttaatgcgtaggtcagtttactcagaaggcaaacacaataaaaagttcgccgcacaaattgcttttggcgccttgttgctgctcctgttgttgttcttgttgttgttgttgttgacgctcttgttggccactcaggtgtttaccaacttccctggcaccttctcccttttctgcccttggtctgctgcggctctgtttttatgtaactttcaaatcgattgcaaacacgtaacagtagggcaacctgcgccgcccctcattgccccaccgtgccacgcccctagcctcccacctacccaactgatattctcccatatcctgcaacaacacgctctgacgttgagcgtgtgatttggttcgtttcggctgtacgattttttttcctgctggcctgcggcttgacatagcgtgacatttcctgtatgtgatttgctgccgttgtcggtgccccagaacccctgccacgccccctaccgatggggtatcttgtctctccgccccccaaagaacatttgaataatttctgttttgcaaatttgtaccccctcccacatcggaggcgatatccttgaaggactcggacaaattgcagtcaatacaatagttgagcaagtatttttaggggcagcagagaacttgttgttagccaccttccaaggaaatcgaacactgaaagatcttacaaaaaacaagagccattaaacgtattaaatgataatttaacaatgaattatgtatgtaactacagcagacttcctttaaaattatctcttttcacgtctaagtagaaaaagatacatttaaagcaaatcaaaagctcaaggattatgtaaatcacttttgttctcagaagaaaaaaaatcgtaattatttagtcttctgagtcggtaaatccgaagtagcattgaatcccaatcaagtacacagttcagcagtagattgagttcagattgctgtcttgagcttcggtttgttgttgcccgttgacctgccaacggttgccgtgggcgacctgccaaattgtcgatattccgtgcgctcctttcgctccgggccggaaaaacggaaaagccagggcacgtcgttcgcctgtcgccgtcccactctagccgatggctaatttcaatggctccacgctgcttgcacctcaagctcctcctctgcactcttcacgtgcaatcgcaattatgaataattcgccataaatggcacacgctgggctgcaattattggaattgaagtggcccagatgccgctgataaatcgcttgccaccaataagcctatagtacattatacattactacattatatgtacatatatatgtagaaatatggcgctaggcccattatatcatataccatttcgtgtggtcgaggtgaaaagtgcaagcgcaactttatcagcgcccataaatcgagcagcaaaaggtcaaagttgagctagactaacagcttttttagtggcgaaggatggccgcggaatttgcgagtgcccatgtacttggcaactttaaatgcggtgtcatttgtgtttaggttttcagactagggcaacaaatcattgttgtttttgtgtgattattcatcagttatatggttgataaaaccagtaattatgccataaaagttggtcattttatttgatcagctgaaatcaagcatgttcctttcaataacagttgataaaagaattgtcttgtatgatttcactgtacttacttacttaacttagttatttgtttaaccaaagataaggcttgatgagatgtttcgaaagatattggagagtcaagaatccagtttgaatcgcagctaccaagataagatagctggaaaccataaaagcgatgcatcgttccatttggaagtcacgacttatgccattctcttcattttacgtcgtgattttatgactaaagtttcaattcgaatggctaaattatgcagttaccattgcagctaaatgagcaataaaatacttaagtcgttggcttttgaataataaaactctagaacaactctggctcggcatcccaaatcatccggcttgtatacattttgctgtatgtttaccctggagccacattcatcatacgcactgaggtcccagctcggaaatgaattcaaattgcttggcttgactgggttctaaaacctaagacgcaaaaaatagtagccataacgagttttgttttgtttatcgtttgaacttatacacttgcccagtgaccaaccagtacataacatgtatataattatctgtatctggagctgcgtcatagcatttggagtgcttgaagcgtttgcatttgcttcgttgctgtccggtgattattagttgataaattcgagccgcatgacgcacttaatcagtgcaaaaaaaaaaaaaaaaaatactacacgacgaacgagaacgggaggaggaaaagatgtgtgtggcctcccggggatgtgtgaaattttcatgcctccgttccactttggcttcaagccagggcacgtggagagcaggcctcaacccttggcccaaactgggttaatgtaatgcatatgtgctacattggcgacgtaggagatgggaatggttcgggggggttgcagctgcagcagtctctgtgtgccccaatcccaaacccagatccaaaacccacatacccacatcgccttcctctcgcggcttggcctgcatattttgtttcaagtacgagcattgacgccccagctcagtgctcccccctgcagtggagcttggatagtgatggcagaaagtgaggttgaaggtcttgagattcggctgatctttaaggtgcaccagattctgattaacataagtccaataatgcttatttcatgtcatgtcaagtcacatagtgcactcactggaacgtttaagaacattcttatcgattcgatgtggaatagaaaatgttcttgctttgatttacttctatgaataaggatgtggaatttattacatttgactattcttttacttcttcaaacttatctcactctctcaaaagaaatcgattaacaactaaagggtttggattttgaatacatttttatttggccctggcttattatcgctgtttcttaaccataaagtttaaaagttgatcgctttaccgtatgactttgagcataactaaccgaattttggtgctggcttcgtcaaagcgatgccccactgtagtggcttgctgcttcttaaccaatgtcaatcatttgatactgtggacccccgccaatccggctttcgtgtgactcaatctcatcatcattctatttgcttttgttattataattttattttctttgtttttttatgtgatttatgttttgtgacgttgtgatgccgctgctgcgctgctgctgcccaaaaaaaaaaaaacaataataaacatatgaatatttgaatgtcaacgaaatgcccattgtatttgtctgtctgtctgccggctataatattacacacatcggcgctgatgaatcaaaagcattgtttataaaaaacttgaaaacagaaacgcacccacacaccgacacttgcatgcacagtggaacactcagttctgactatcagaaaagaataaataaaataaataaaaaacaaagcacaccaggctaagtacttaagcgagaaattcgagcgaagtcgaaagataactagccggttaacaaataaatcagaaatcaagcgaaagacccaaaaaagcatgccacagtcagagggcggctatgtatcgctgccggccgtcaatggcaatggcggcgccatctatcagtcgaccacagagcccacggccccgccctccgtttttgcgagcgtgaagcgggccattggccaggccatcaagtcctcgcccaccgacagcgaggagctgctccggtcggaccgcctgccggtcatcgtcggcggctccaggtaagtccatccaaccggggcttagccaccaacttttcgcctcctcctctctacgggcgacgcgacggtgagctctctccgccaatcattcttaatcacccaccacaatgtggccccacaaccattgcccccgcttaggcacatacacaaaacccccactgaacgcacgcaccacaccactgaatcattaaacaactgagtgacccactcgcagctacacagagaacaaaaagaacggagtcatcaaataaatttccaactttaatttattgacatatatatatgtatatactgcaaatgcttatctgaaaactaattcgcacagcaaacagccactttcgttgcaatttaattgtaattaattactcaacattctttcaaattacttgctcaacaattttccacaaataagattgcatcttctttgagccgttttctctgtgtagctcagttaaacagcgaacatcaaagctcaattttgcctttgccacctgacttcccataaccccagaagcttaattgcgattgcatgtcagcccaaaagaaatgtttgatttttgcttttcttgcttttgattgtttgtgcttgttgccaatgttgttgttatatttctcttcattttccaaggcaccttgcattattatattgaaattatttgcccagcagaaggaagaactaattgtatatatttgatgtaaactcaaaggttcacattccacattacatcatcatcatcatcatcagcataaagcttactgctctaagggaatttcccaattatacctttcttagatgaatcagacactttgcaatgaaaagtgccctgaaagtagagcattttgaaaagggtctaggccccaaaagaagaatagcgtcggaaatgtaacttcgtttctggttagccatgacccaaggtcaaactgcagtttgcagttgcagcagttttgtcaatacaacaatcccgagagcacagcaaacagagctcagaaactaaagtgaactcttgagtcgtttagtttgggtttagttggccgccggttgcgacccacattcgttttaatttgcggtcactcttcaaattattcatactcatacgcagtagagaatccacgattatacgattattcacgattgcgctggcgatctcaagtggccttaattagtatttccgcagccactggcatcgctcgtaagtgatttggtccacttaatgtgttatttccagatgcgagatcgcaccgtctgtttgcattccttcagccaagtgcattgctcttggctccctggcctggagttaaccgataccgagcagttctaaccggttggtggccgtaccggtttaagctggagattcaaagtaaattgaaaagaaagtccagcaagtgtatgcaaacagctgattaacacaaataatccatccgcttgcgtgctgtaccagaaattgattgttcagattaataatggatgtacagggaaatgtaaggcttacgtcggtagttagtaataatgcaataataatattttaattatggaaacacaaagctcaggacgttgcatatttcaagagctagtcagtcgcgttcataagtttcatcttatgaatttatgataataatagtttcctcggcacatctatttttctttgccataagagctgagctctgcttatgcaatttccctttggctcaatcacgtaaccaattaaaggtgataatgaaaacggccatgaccccaaacgtacatatgtatatatactagtgtgtatataatgtatgaggataatgaactctcatccctcacctgagcttatccccacaccaccagcattaactaattgagttcggtccctgcagtaaaagttttttgttagcccaagaaaaagaggaggatgtaggtaaacaaaagttttcgagcttttcacgtttttacaggggacgcaaaggagaggaaagtcaaattagtatgccagctggtcgcattttcctggcgccacttgtttgtcgctagccattttcatacatcgctaaaacatatccatcgacatttaccccgaatgacattgcgtgactcattcgcttacgttttacgttttacgtaacggaacgcgagaccttgacgagaattcccccgcttcattcaaccgggcaaacaaacaagtttgcttctccgctctttctttctactgttctatgtctgcttaattccctacttcacaaccgtcctgtgaatatatatttactcctaagatctcaaatttcaagtccacaagaaaatatgaatatatatacggtgaaagtttttagccgatttggaacagagtctgccagaaacttgcctcgatttttgcgttcctttggttattctttgcttgcatgctcatagaatctctttcagagaccgcgacaaatccggtaagacactgaccaccaagatgccgtcagctccaacacacactgccgaggaggcacatctgctggggtaagcaaaatgaaagaaagaaaagaaaatactcccagggtattgtgtaattaggtcccaaaatttccgaaccatccgaatcgaatgtatgtaagatatatgcaagacactcaaacaccccaaaaaacacaatcacaatacacaagtttagagtttttgcgtttgaattaatttttcgttacttttgttcattaacccttcacatagtttttgatttacgagtaaacgtattgttaagagacaaccattagttcgtaagtacttgccctagacttgagtttgacaactaaaccctgtaaaagcatcccaaattgttctatctctccgaatgtttattaaccgatatcttacgtcttgatttatttgagttttgcatacatttgaaccccataactagagtagaggagagcagcgagatcaactcacgcctgccatatatgtattacccccaagatcagtagcctcttagtatctagatgagatccgaatcaaggatgcatatcctgcgacacaaagacacttaaactcacaggatgccagtctatgaacagctacccagctgctgctgccgccgcctaaaaatcccaccaaaaacatattgtctcggggattaagggagagccatatgttactaacttacatcttttttttatccatcccaatagcaccatgcccgttgatcccatggatgacatcgaactgcgctccgtgcagctgcaattccccaatgcccgcggctccatcctggaggcctgcgaacagcgacgcgtgcccacagacaagggcgatgtccacgtggccatacagggcgatacggccaagccggccattatcacctaccacgatttgggcctcaactgtaagtgttcaaatacctgctcaaatcggatcgtactaatcggtattgttctaccattgtagacgccaccagctttgctggcttcttcaattttccagtgatgcgaggtctgctggagaacttctgtgtttaccacgtgactgctcctggccaggaggagggtgcacccactttgccagaggagtaagaaataattgcctaccgcgtaatacatttcttgtcaatctttcataatcgcaatactagctctttgttcagtaaattataagtaaacaaaagaaaactttcaaataattccaaattatataccatatatttctaaaaatattcctatcacttgcagttacgtctatccgaccatggatgatctggccgcccagctgcttttcgtgctatcccactttggcctaaagtcggtgattggtttcggcgttggtgccggggcgaatattctggcccgtttcgctcacgcccatccggacaaggtgggcgccctgtgcctgatcaattgcgtgtccacgcagtcgggctggatcgagtggggctaccagagcttcaatgcccgcttcttgcgcaccaagggcatgacacagggcgtgatcgattatctgatgtggcaccacttcggacgcaatccggaggagcgcaatcacgacctggtgcagatgtacaagcagcacttcgagcgtggcgttaatccgaccaatcttgccatgctgatcaacgcgtacatccatcgtaacgacctgcatctggcacgcactccgccaggtactccgggcagcgaaacggcggccaccacgctgaagatgccggtgatcaatatcacaggttcgctctcgccgcacgtcgacgacacggtgaccttcaatggccgtctagatcctacaaactcatcgtggatgaaggttcttacaaattttaaccaacatacatatgcggttgtaataattcaattataaccgaccgcatatctatgtattgttattaagttctgttcgattgtaataagcttgttttttccacacacagatttccgattgcgctttggtgctggaggagcagccggctaagctggccgaggccttccggctcttcttgcagggcgagggctacggtaagtgttagaacaccgcacaccacaccaccaagatccaccacagcaacaaaaacaactagaactacagcaacatcaaatgctacaacaactgaacaacctcagcaatctctgctacaatctcaacaatctactactgtacccactctatctaattcttctattaacccgcaactaccttaactacttaactacctaccacctaaatttcttagtcaagtacttccgacccggcgactgggatggcactcagttgagcagcttcatctagaagtccattccgtttggagcaagatatcccctccatagattcagttcagttcagttcagctcagttttcccacaggagatgctcctcctagcttagcccccgattttctccgtggagacacacgcacacacaaagtacacaaacgtccctgacccaacctgattttagtctaaacgaaaatctttgagaatcaaaagctttttgagatgcattgaaacgaaaccaaaaatctattgtgcaaaattttatatttacaaattggttagatatacaaaacaaaaaaaaaaaactaacaaaattgacattgatcgttcatatatatgttgataataaaccaaagtatttgtacgcaaccaaaagtatttccaaataaatcgaaaagttgttgaaaatcaagcgtttactttctacacacatatatttaactactttcaaaccccaccaacctatttccccgaatagttaggaccccaaagagtacacacaatttcgcatccacgacagcaaccaaacaaaaaaagatattcaagatgttcattactttgtttttcatttctttttcctttctccaaaactgcttgtttttgctaaaccaacatacaaaacaaaaaataaaaaaaaaaacaaaatatgaaaaaaaattctatgaaaaacaaacgaacaacacgcaacatgaatccaaatgaaaaacaaaatatatacaaacaaaatctttcacacgaaattgcaacttcaaacgatcaaataccccaaaatccgcaccccataattccataatcttcattcgatttcatggtctatgcaatccaatccatcgacttggtctctgctgcattcaccaacgacttttcccccgttctgtttcaattcgtttcaattctaactctgattttcttttcgtttcgaaattggtttttccaatccaactcaactcgaaatgatcgacaaataactaattaactaatgcaactgcgcgttcactgtaatttcaacaacaaaactaaatataataatcgtttatatggtatgtatatttgtacaccatcatattcgcacctgtgatcgtagtgtccgagaaacctcagtaggaagatctgccggagcaaccaagcagtaatatacccaacaaattgcaaacaaaaaaaaaaaaacaaataaacccgaaatctagttggaatgcatttagctaattaattaatacaataattcaaattaacattatatacaactatataggcaaagtagagcttaaaaaccacccatacacacacacacacagctagtcaaggttctttcgatattttaaggtgttaacgggtaaattaatatattgtcaaaatactaatagcagtacattttattttatgaaattatacaaatttatttatattttctataaatacaacttgtcttactaatttcctgacttaacgcccgacaccttaagattttgagagttgaatagtgaaaatgacttacactagcctgcatctgcgtagatttgcttctgagtacagtgcaacctcgttagctgggccattgatgcgctttcgcttttccaacgctctctttaattttctcctccacaaaaacacacactctcgcacacgccttttgtttcgaataactctttcatttatttgacctatcattttgttttgtttatttacacgcaaattgaaaacaaattatacaacaacgaaaacaattaccacaacaaccacaaacaactgaacattgaatttcgaaaaccccaaaagctgttggcacactgcaaaagttggcgcgcaaaatctcatcggtcagccggagcagttccacgcaaattgagctcactgtacagtgaacgacggcggcagagcagaactatgtgagcgaatggagagagcaacagcagtggcagcggcatcggcagaagcggcagcatcggccccaattcggtggggcagagtgagtgagagagagagagagagcaattggataatcacccgacgccgatacacccaaaacaaaaaattagaacaataaccacactgagaaaaatggtttacagctttgcttttaagggcaaaataatcttgcttcggtttctccacttctgtgatttgcgttgaaatttatcgttgctcttttgttttatgttaaatact

SEQ ID NO: 28916 - DNA, 1501 bp, DROSOPHILA
ctgcatcgagaccgagaattaaagacttgaaagcagctggagaaattacaagaaattgatccccgaaaattactggcaatcgcgaacagcgggcgtgtgtgtgtgtgtgcgtgcgcgcgagagcgagagaataagtgaatgaaacagaacgagcacagaaattacacaagttgtaaaagaaaaggtgaagaaaaaagttggtcgagaccgaatattgattttttcatagacagtgcagttaaaacaacggtctctttttgttagccaaaaagaaggcgttggtaaaaagcggtagtagtttttatctcaattttgaggcctacaaaagaatagaagaaaaagcaacggaaagcgtcagaatctctttcagagaccgcgacaaatccggtaagacactgaccaccaagatgccgtcagctccaacacacactgccgaggaggcacatctgctgggcaccatgcccgttgatcccatggatgacatcgaactgcgctccgtgcagctgcaattccccaatgcccgcggctccatcctggaggcctgcgaacagcgacgcgtgcccacagacaagggcgatgtccacgtggccatacagggcgatacggccaagccggccattatcacctaccacgatttgggcctcaactacgccaccagctttgctggcttcttcaattttccagtgatgcgaggtctgctggagaacttctgtgtttaccacgtgactgctcctggccaggaggagggtgcacccactttgccagaggattacgtctatccgaccatggatgatctggccgcccagctgcttttcgtgctatcccactttggcctaaagtcggtgattggtttcggcgttggtgccggggcgaatattctggcccgtttcgctcacgcccatccggacaaggtgggcgccctgtgcctgatcaattgcgtgtccacgcagtcgggctggatcgagtggggctaccagagcttcaatgcccgcttcttgcgcaccaagggcatgacacagggcgtgatcgattatctgatgtggcaccacttcggacgcaatccggaggagcgcaatcacgacctggtgcagatgtacaagcagcacttcgagcgtggcgttaatccgaccaatcttgccatgctgatcaacgcgtacatccatcgtaacgacctgcatctggcacgcactccgccaggtactccgggcagcgaaacggcggccaccacgctgaagatgccggtgatcaatatcacaggttcgctctcgccgcacgtcgacgacacggtgaccttcaatggccgtctagatcctacaaactcatcgtggatgaagatttccgattgcgctttggtgctggaggagcagccggctaagctggccgaggccttccggctcttcttgcagggcgagggctacgtgtccgagaaacctcagtaggaagatctgccggagcaaccaagcagtaatatacccaacaaattgcaaacaaaaaaaaaaaa

SEQ ID NO: 28917 - protein, 343 aa, DROSOPHILA
MPSAPTHTAEEAHLLGTMPVDPMDDIELRSVQLQFPNARGSILEACEQRRVPTDKGDVHVAIQGDTAKPAIITYHDLGLNYATSFAGFFNFPVMRGLLENFCVYHVTAPGQEEGAPTLPEDYVYPTMDDLAAQLLFVLSHFGLKSVIGFGVGAGANILARFAHAHPDKVGALCLINCVSTQSGWIEWGYQSFNARFLRTKGMTQGVIDYLMWHHFGRNPEERNHDLVQMYKQHFERGVNPTNLAMLINAYIHRNDLHLARTPPGTPGSETAATTLKMPVINITGSLSPHVDDTVTFNGRLDPTNSSWMKISDCALVLEEQPAKLAEAFRLFLQGEGYVSEKPQ

SEQ ID NO: 28918 - DNA, 6733 bp, DROSOPHILA
agcgattagataacatatgggggggaatgcgaaaacccttcgactagaattgttgcttcgcttgccaagagctacatatgtatgtaagccgaactatggaaataatgtacgagtatttgagtaattagtgcgtattttttaaatcaattcgtattctaagcctacaactagtcaaacatacttatcgaataaactgagaagcatgaccaatataaatctgactttatttacttttctggttcacaaagaatgcgatgcaatgcaaatttatttgcgtcctccggtttctgataaggcggattggaatgaatcacccgattgtctgtgatttacaattagaggttttgttgcgaccattgagattactcaaaatgtccgcaatggggctatctaatcgaattggaggagcatggtgcgcacgtgagaagtgccaaaaaaaaaatcagagcatagtgaaacaataaataaataatcattacattccatatgtgcatacggaccaatgcaaacagtaggcgattaagcgttctacattctatcgtagcatgcaattttgagtgactaagctccatgaaacgttgtttctgagacctaattatcttaaaacagcattgaattgcttcctgtttgccgaaagaagcgcaagtgtaatcttagcatcagaaatattgccaactttttgggtcgtttcttatcatataatttgaaaagtgtgcagttttgggacaattgagataaagactatatttgtcccagtttgatgaaaaatggttcagatacttcagggcactgagcgaagcccctagcctcgggctatcgtcaagtgtccgccgtaatcttcaaaagtggtcaatacacttgactttgatgttttagtacacaatttaaattcaaatctttagttcggcgcgcagatctctgtcaacagctcgataattatcgaggccatatagaatgctgtcgttttccggcttaccaaatacggtcataccacccaaagctctccagaattttgcaataaaatcgcaaacaaaggtattaggagtattaagaggcgtaaaaaattcatttgaggagccaatagtttcgtgaaatctagtgtttcctcttttaagtggtcgccaagcatgccgttcgttggctgcctctaaaaacagtcaaatgcctgtgcaaatttctcgtgaaaaatccatagaatgcacaaaaaatgtttatcagtcactcacaaacacacgcacgcgccagcagtgagtgggagagagcgagagagagcacagctgccgccggtgcatgtcattgctgtgtgtgcgtgtgtgggtgaacttgagtgggaggcggaagatattggaaaaattcctccgcttttcggtttgtttatgtttaagagttgcctattgatttttaacaggcgcccgaaattttagtgccatttcggttcaaagtgtctgttgtactagttgaactttcccatttccactcacctcgtgcaaatcctaaaattaaaagaatcaaaaactttgtggtattaaattaaccccaaatttgagctcatttgagctattacgaagtgcacaaaataacttaacttagcaagtaaaacactcaccaaaatattttttaaaacttaaaaaaacaacgaatgtagcgtagttgataataacttattacttagtaaaaaaaatattacgataaattagttttaaaagtgttgctcataaattgaaatcgaatgagtcctataattgtagcattgcaaacgacgaatcccaatattaaacctacaccttaaaaacgaagtactattcttataaaaataatagatctctattatgtaactgatacaccctttaaaaatgtaacttgtgaaatacacccacaattaaattgtatttccccaccaacagatgtcttagctttagctggacgcaaaacttaaactgcagacagtaaaggacgaaatcacattactcgactcaaaagaagacacacggaagagagataccaacaagatggccatgtccaaggtgatccgtgtgctggagaagtccattgccccctcgccgcacagcgtattactggagcatcggaacaagagcgacagcatcctgttcgagtcccatgcggtggccctgctgacccagcaggagacggatgtcatccggaagcagtacaccaaggtctgcgacgcctacggatgtctgggtgccctccaactaaacgccggcgagagcaccgtgctgttcctggtgctggtcaccggctgtgtgtccatgggcaagatcggcgacatcgagatcttccggatcacacaaaccacttttgtctcgctacaaaatgcagcgcccaacgaagacaagatcagcgaggtgcgcaagctgctcaactcgggcaccttctactttgcccacaccaatgccagtgcatcggcatccggagcgtcatcgtatcggttcgatattacgctttgcgcccagcgacgccagcaaacgcaggagacggacaaccgtttcttctggaatcgcatgatgcacatccacctgatgcgcttcggtatcgattgccagtcctggttgttgcaagccatgtgcggctccgtagaagtgcgcaccgtctacatcggtgccaaacaggcccgtgccgccatcatttcccgactgagctgcgaacgggctggcacgcgtttcaatgtccgtggtaccaacgatgagggctatgtggctaactttgtggaaaccgagcaagtgatctacgtggacggcgatgttactagttatgtgcagacgcgaggatcggtgccactcttctgggaacagccaggcgtccaggttggctcgcacaaggtgaagctatcacgaggattcgagacatcggccgccgcctttgatcgacacatgagcatgatgaggcaacgttacggctatcagacggtggtgaatctgctaggcagctcccttgttggcagcaaggagggcgaggccatgctgagtaatgagttccagcgtcatcacggcatgtcagcccacaaggatgtgccgcatgtggtgtttgactatcatcaggagtgtcgcggcggcaatttctcggcgctggccaagctcaaggaacggatcgtagcctgcggtgctaactacggcgtcttccacgcgtccaatggtcaggtgttgcgcgagcagttcggtgttgtgcgcacgaattgcctagactgtttggacaggacaaactgtgtgcagacgtatctcgggcttgacacgctcggtatccagctagaggctttgaaaatgggcggcaagcagcagaatatttcgcggtttgaggagatcttccgacagatgtggatcaacaacggaaatgaggtcagcaagatctacgccggcaccggggccatccaggggggatcaaaactaatggatggtgcgcgatctgcagcaagaacaattcaaaataacctactggacaactcaaagcaggtacattgtggttttcaattaaaaattcaatttattatttacattactcccgttttttcatatttaggaagccattgatgtcctgctagtgggctccacgcttagctcggagcttgcggatcgggctcgcatcctactgccctccaatatgttgcatgcacctaccactgtgttgagagagctatgcaagcgctacactgaatatgtgcgtcctcgaatggcacgtgtagccgtgggtacctataacgtcaacggcggcaagcacttccgcagcattgtgttcaaggattcgctggccgattggctgctcgactgccatgcccttgcccgctccaaggcgcttgtagatgtgaacaatccgtcggagaacgtcgatcatccggtggatatctacgccattggattcgaggagattgtggatctgaatgcttccaacataatggcggccagcaccgacaatgccaagttgtgggccgaggagctgcagaaaacgatctcgcgggacaatgactacgtgctgctcacataccagcaactggtgggcgtgtgcctatacatctacatccgaccggagcacgcgccgcacatccgggacgtggccatcgactgtgttaagacaggattgggtggtgccactgggaataagggtgcctgtgccattcgatttgtgcttcatggtacttccatgtgcttcgtgtgtgcccactttgcagccggacagtcacaggtggctgaaaggaacgctgactacgcggaaatcacccggaagctggccttcccgatgggcaggacgctaaaatcacacgactgggtgttttggtgcggcgacttcaactatcgcatcgacatggagaaggacgaattaaaggagtgcgtacgtaatggagatctctcaaccgtcctcgagttcgatcaattgcgcaaggagcaggaggctggcaatgtgtttggcgaattcctcgagggagagatcactttcgacccgacgtacaagtatgatttgttcagcgacgactacgacacctcggagaaacagcgagcgcccgcctggacagatcgggttctctggcgtcgcaggaaggcgctggccgagggcgactttgctgcctcagcctggaatcccggcaaattgattcactacggtcgttcggagctaaagcagagtgatcatagacccgtgatcgctattattgatgctgagataatggagatcgatcagcagcggagacgtgctgtattcgagcaggttatccgagatctgggtccgccggactccacgattgtggtacatgtcctggagtcttcagcaactggagatgaggatggaccaaccatatacgacgagaatgtgatgtcagccctgattaccgagctatccaagatgggagaggtcactttggtgcgctatgtggaggacaccatgtgggtcacatttcgggatggagaatcggctttaaatgcgtcttctaagaagagtatccaagtatgcggattagatcttatcctggagctgaagtcaaaggactggcagcatctggtggacagcgagatagagctatgcaccacgaacaccataccgctgtgcgctaatcctgtagagcatgcacaactcctgcaggccattacgccggagttgccccagcggcccaagcagccgcccacacgtcccccagcccgtcccccaatgcctatgtcgccaaagaactcaccacgccacctgccccacgtcggggtcatcagcattgtgcccaagccggcaaagccaccgatgccaccgcaaccgcaatctcaacctctaattccgtcgccgcttcagccgcaggtggcgccgcctcgtccgccggcaatggacaccacgccatcctccaaatcgcaatcgccaacggaacttgtatccgctagttcttcgacgtcctcttcgggaaagacttcgcccacagctccagctgtgctctccggtccgccgacgccgccgcgccaaatgcagagcaagcaggccacacccgtctcgacgcccacgcgccaagtcggttcgcccaaggatccgattccatctgataccgcctacgaaaccgccagtaatatttacgaggagattcaggaggatgtgcctgcgccacgccatccgccgccggctggaccgccgccagtgataggagcaccaatgggcccgccgccaccgctgccgaatcgcaggggcccaccacccataccaaataggagcggcaatgctccaccgctgcccacgcgacccgccaacaactgagctgcaggctacgcacacggggttggttaagaattcaagaaatatcaagcgtaatccgcaactaatcatataatggctatatttacagctcgctgtcttgcactccgattgcattccgaatcgctgtatttaatgttatatatactcgaatatattgggccactctggaggagaactcctggcaatatccgcacttcgcatggaatctatgttactacctgtttgtttgtttcgatagtttctagccggaatcaaactgaatttaaagtaaacaaataagttccacatagctaaagcccaaactaccccactccggtactctcttttttttttttttacttactggccagacgtactcaacccaattgcaccggatttgccgagggcgaagaatgaatataatgaagtatatgggcgacaaagtattacactaatctgcataaatgtaatgtttaaataaattatagccgtactagtcaaattatgaagtaaagttataaaaactgaagaagcaatagaactctgtaaaagattccgattcgagcgacacacccaaacacatgtatccattgttattgaacaactattgagataaattacatattattccacattgttaaactatcgttgtattccgtcaatttgaggctacatccggatttctgtttcagttgactacaaatatatatcaatgtaattgagaaattccaattgctctgttcaaaagttgaagttacgcctaagattaaccaagtagcatactacaaaataaaaaagttggaccgtcgtagtcgctgctccaagtgaatattcgcaaaatgcattggaagttaataaaactcaatacaagagtcaagtaaaattacctgagagttttcgtaattaattgatttatttattcaataccagcttatcaagccaactcaattcaaacagaaacttaacaccgggagctgaacaagtcagtagtattgggcagctggatggactagaaccattt

SEQ ID NO: 28919 - DNA, 3797 bp, DROSOPHILA
ctctccagaattttgcaataaaatcgcaaacaaagatgtcttagctttagctggacgcaaaacttaaactgcagacagtaaaggacgaaatcacattactcgactcaaaagaagacacacggaagagagataccaacaagatggccatgtccaaggtgatccgtgtgctggagaagtccattgccccctcgccgcacagcgtattactggagcatcggaacaagagcgacagcatcctgttcgagtcccatgcggtggccctgctgacccagcaggagacggatgtcatccggaagcagtacaccaaggtctgcgacgcctacggatgtctgggtgccctccaactaaacgccggcgagagcaccgtgctgttcctggtgctggtcaccggctgtgtgtccatgggcaagatcggcgacatcgagatcttccggatcacacaaaccacttttgtctcgctacaaaatgcagcgcccaacgaagacaagatcagcgaggtgcgcaagctgctcaactcgggcaccttctactttgcccacaccaatgccagtgcatcggcatccggagcgtcatcgtatcggttcgatattacgctttgcgcccagcgacgccagcaaacgcaggagacggacaaccgtttcttctggaatcgcatgatgcacatccacctgatgcgcttcggtatcgattgccagtcctggttgttgcaagccatgtgcggctccgtagaagtgcgcaccgtctacatcggtgccaaacaggcccgtgccgccatcatttcccgactgagctgcgaacgggctggcacgcgtttcaatgtccgtggtaccaacgatgagggctatgtggctaactttgtggaaaccgagcaagtgatctacgtggacggcgatgttactagttatgtgcagacgcgaggatcggtgccactcttctgggaacagccaggcgtccaggttggctcgcacaaggtgaagctatcacgaggattcgagacatcggccgccgcctttgatcgacacatgagcatgatgaggcaacgttacggctatcagacggtggtgaatctgctaggcagctcccttgttggcagcaaggagggcgaggccatgctgagtaatgagttccagcgtcatcacggcatgtcagcccacaaggatgtgccgcatgtggtgtttgactatcatcaggagtgtcgcggcggcaatttctcggcgctggccaagctcaaggaacggatcgtagcctgcggtgctaactacggcgtcttccacgcgtccaatggtcaggtgttgcgcgagcagttcggtgttgtgcgcacgaattgcctagactgtttggacaggacaaactgtgtgcagacgtatctcgggcttgacacgctcggtatccagctagaggctttgaaaatgggcggcaagcagcagaatatttcgcggtttgaggagatcttccgacagatgtggatcaacaacggaaatgaggtcagcaagatctacgccggcaccggggccatccaggggggatcaaaactaatggatggtgcgcgatctgcagcaagaacaattcaaaataacctactggacaactcaaagcaggaagccattgatgtcctgctagtgggctccacgcttagctcggagcttgcggatcgggctcgcatcctactgccctccaatatgttgcatgcacctaccactgtgttgagagagctatgcaagcgctacactgaatatgtgcgtcctcgaatggcacgtgtagccgtgggtacctataacgtcaacggcggcaagcacttccgcagcattgtgttcaaggattcgctggccgattggctgctcgactgccatgcccttgcccgctccaaggcgcttgtagatgtgaacaatccgtcggagaacgtcgatcatccggtggatatctacgccattggattcgaggagattgtggatctgaatgcttccaacataatggcggccagcaccgacaatgccaagttgtgggccgaggagctgcagaaaacgatctcgcgggacaatgactacgtgctgctcacataccagcaactggtgggcgtgtgcctatacatctacatccgaccggagcacgcgccgcacatccgggacgtggccatcgactgtgttaagacaggattgggtggtgccactgggaataagggtgcctgtgccattcgatttgtgcttcatggtacttccatgtgcttcgtgtgtgcccactttgcagccggacagtcacaggtggctgaaaggaacgctgactacgcggaaatcacccggaagctggccttcccgatgggcaggacgctaaaatcacacgactgggtgttttggtgcggcgacttcaactatcgcatcgacatggagaaggacgaattaaaggagtgcgtacgtaatggagatctctcaaccgtcctcgagttcgatcaattgcgcaaggagcaggaggctggcaatgtgtttggcgaattcctcgagggagagatcactttcgacccgacgtacaagtatgatttgttcagcgacgactacgacacctcggagaaacagcgagcgcccgcctggacagatcgggttctctggcgtcgcaggaaggcgctggccgagggcgactttgctgcctcagcctggaatcccggcaaattgattcactacggtcgttcggagctaaagcagagtgatcatagacccgtgatcgctattattgatgctgagataatggagatcgatcagcagcggagacgtgctgtattcgagcaggttatccgagatctgggtccgccggactccacgattgtggtacatgtcctggagtcttcagcaactggagatgaggatggaccaaccatatacgacgagaatgtgatgtcagccctgattaccgagctatccaagatgggagaggtcactttggtgcgctatgtggaggacaccatgtgggtcacatttcgggatggagaatcggctttaaatgcgtcttctaagaagagtatccaagtatgcggattagatcttatcctggagctgaagtcaaaggactggcagcatctggtggacagcgagatagagctatgcaccacgaacaccataccgctgtgcgctaatcctgtagagcatgcacaactcctgcaggccattacgccggagttgccccagcggcccaagcagccgcccacacgtcccccagcccgtcccccaatgcctatgtcgccaaagaactcaccacgccacctgccccacgtcggggtcatcagcattgtgcccaagccggcaaagccaccgatgccaccgcaaccgcaatctcaacctctaattccgtcgccgcttcagccgcaggtggcgccgcctcgtccgccggcaatggacaccacgccatcctccaaatcgcaatcgccaacggaacttgtatccgctagttcttcgacgtcctcttcgggaaagacttcgcccacagctccagctgtgctctccggtccgccgacgccgccgcgccaaatgcagagcaagcaggccacacccgtctcgacgcccacgcgccaagtcggttcgcccaaggatccgattccatctgataccgcctacgaaaccgccagtaatatttacgaggagattcaggaggatgtgcctgcgccacgccatccgccgccggctggaccgccgccagtgataggagcaccaatgggcccgccgccaccgctgccgaatcgcaggggcccaccacccataccaaataggagcggcaatgctccaccgctgcccacgcgacccgccaacaactga

SEQ ID NO: 28920 - protein, 1218 aa, DROSOPHILA; identical to SEQ ID NO: 14028

SEQ ID NO: 28921 - DNA, 13713 bp, DROSOPHILA
ttgtactatatttataaccattttaatataaagctcaccggggtatccttttcgctacgctcctgggaaaacaaaaacagcgagcccactgaacacaaagctgagatttttcacaagaaaatattcaatgtgaaggcgaaaactgcgcaggcgcatgttttgtcaactggcaaaaagatacaaaagacagtcagacattcggaggccgaggctgaaaactctgacgttttcgtgacagcggcaacagcaacaactacaaatgccacaactgctacaataactgcatccagacgccgtgttgaccagttaccaattttggcagcggactttcatttattcgcgattcgattttggcagtttgggatcgctcgttcaaaagggaacatcacacatctgcttagctctctagagaaaatgttaactcatataacgactctcgttttgttatgataattttaatcatacgcacaaatactatcaatatattcaagtacctacactaggaaatggtgatgaaataacacaactaacacaactgtgaacaaacaagcaattcaaaaatttttaatttttgcctaatgcatacattacagacgccttttagataggcaaaaaaaagttgttaacttttattttacattacattctgtctacaccaatttactcaattaggcattcgtagcgacatctaccgcttatttacagtaccacttacagggtatggtgtataattcgggatggcaactgtaagatacgggattttgtcctcaaagtacgttattttatattatgattggtatttttagtgtactttttgaacatgatattttaacagaattaattgttttataattaattgaagtctccgcactctgaaaactctcttacacatcgatataacaacaacttcgatgatcgttgaaaatatcgatgcttcgtctatcgatactgacgaacatcactatcttcaacaagtgtgaactctcagttgagttttgaacttcaacaggtgttgaatacgcgctagactagaaagcgatcccacgatcaaccgactcggtaaagcaaaacaagccatcgaaatcaacaggcgagcacgtgattagcgtcccaagccataaagcatagaaaagtgccgaattgaaccactttcagcaatcgtagtgtcggccaaatccaataaagtttgtgtgtttctttcagcgatcaaaaaccaatatttggattaccctgcttcactttgagaaaagttgtctgcaagcagaccgctcataaggtgagtttccactcgtgccgatctggatttcggatcgtatctttagtccgagagtcggagttatggagtatctgcgggggagggggtttcactggaaaaaaaagtgcagtgcaagcgagggttaatatttcgtcactcagtgagtgagtgggataacgctatggacacccatgcagtccagcagttgtctcgttctctgagcgtatctttacgtcgctgcaagtgtgtgtgtgtgagcgtatctgctacctgagaatgttttacctggcgtatctgtatctcagaaaacataccgaaactctcacacacagatacgccaactgcagctgctcgtgtatgtgtgtgtgtgtgtgcgagtgtatgggtgctgtgccgtggtgacatataaattgaaaacccgagtcgcaattatctcgataaattcggcaagcaaagcgatcatattttcggctcacctaccactggcttatcagtcgagccaaattaatttccctgccccaaatactccgaacaaccgaaagcgtttaagccaagttaaggcaaatgcactgggaaagccaaacagtcggggaaaaaacagttaacgcgtttgcttttcacaacaacagcaacaacaagagtcaccagatagataagattacacctgtgtatgtattcgtgcgcattagtatatgtaagtataagtgatcaggggaaaaacgagagggaaaggtgctgaaaaaccggtaatgcatttgctcacaaaagaagtcaccttcataacaaactcaacgctctgctgcaaaaacacaacacgctcaactgtcacagtcggagagataaatctatatagtttaggttcgaccatgatcatagtttgcatataccacacactttacggcgggcgatgagcaaacagagtattggtttaggccataaacccagttggtaccgatctgcccgtctaaagggcataacaactcgtttttaatcggctttgagagcttcctgtagcatcgcccaattaatcaaagacgaaaactacgaaatattctcaaaatataaattatttatttctatgcataattcagaaccagttccaaacgattttcaattttaatgctcgccgcttttataaccatctccgttggctgggccgagcacgaagctggaatttaaatgaaatgtacatcgcacacaaataatttaccaagatctgggcaataaacacacgagttcatttgattttgaggtgcgactcggttttccagacgtaatcaaccagttcggaggagtgcactgtgaattcctggaaaacgatttcgaatgctaattttcaccctagctcgacttgactgcgacttggttcttgggcagggctttcgatctgtggcaggatcggcagtagtgtcttgtgtgtcaagctgtcgccagttggctgctagctgatggctgatgaattcagtgaggcattatctaatcgctacataagccggccgcacataggaaccaccatggctccatagctccatagctccatagctccgtacatccgtattgtacagataaagagcccaaagcaaacacgggccagttgagagttaatgaggtcacagcactctctgctttaggtgtttctggtttcatggctggtaattggtcggagtacgagttttggacgtatggctctatggctctacgtctacggcgtggagggcgaattatgaatacttaagcacatcttttatggatagccgtagttcgagttggagctgggcttaagtggccagccaaacatttgcgatcaactgggtgtgtgggtaaacttggtttagagccgtgtcttacacagaacttaagtgtcggcacatgtggcgtatgcgcaatgtctccgctttgctctggctcacttagaagtttttatttggcacatgattgccatacgaaaacagcgctgggtaaactatttcgagagtgatttaacgatccaggatgttgtattttaacagctttggctaacaatgatgtcatatgaatgggatttggatgcctatgccgccgagtgaaagccaaatgcaattctctatcgccgcttgttcactgatcaattgagcgtgacgctcggctcgcatatttcgcacccacattgcgttgactttttaccttaaccctgaatctaatcgatcaagcctgacagtcagacaaagtggcattagcattaatcaattcctgccataaaacattagtcaccgatggtcccaagccaaacgaaaccagctgacaactgagtaaatgttttggccctattctgcgcgactgcaactttctcctcttctgcaattgtacattggaacccagcatttggggcgttggacgctgaatctctttgcgggattgccttgatctgctttggtctgaccataactcaagatctccagatcttaagccgatttcacagcctcaaagtttgggttcagggtcttgcattggacttggctacacatatgcccatgtgcccgggctaatgaaatgcagagagacttggctaaaagtgactcagaggagtgtgcttacgtgctgtgcaagccgttttgaggctcggaatgcggcctgccacatggaacgtggccaactacgttggtggaggccaaaatgcagccattccagcccttaatttaagcgataaatgctgcaaaaaaaccaaaaccaaacgtaaatattatgtagaaccataaactgtctaattaggaagatacgctattgatcaaattgcttaagaggtaacagaagtggacacttttgagctttcctttgtcccacctagactgtattttcatggtagtcttaccaatggcaagcaaaactgttctttgttaattccattaacttgatgagtgtaaacgctgattgcaggccttttgacagtccgcgatcagtgcctttcaacgctcagtgatgagttctagcctcttaacactcgacacttaataaatatatattgtagatggctcaacgggttgacaattccaggcatttgtctctggaaacgctcgttcgaccgataaccaatacgtgatggcggaacgcttttgttattgaaaacaaagcctcgttcgagtgcaaagtttagtgcaaaaaggtcggatttatttttttaaatcacactcggctgggtaaacaaatcaggtttccgacgactaagcacaatgaaaagcgctttccagcttttcagctgggggcagaaagtcgtgccacaagccagactgctagaatcgacttatccggcactctaaaagtcggaagctgggatcgaaatacgatacagatatcgctaatgaaccgcccccgccaggtgaaagccggtttctcatttgcaccacctccttaagttcttaatttatgttacgcttcctgcttcagattcagggctatatatacggtgcaccgatcgatccaaacaaagggcaattgctggcaaggcgaggaagcaggcataaaactcggattcgaatggctgaaatcaatttatggagttttaatcactgaattcccatgcagggaattccctcagataacagcaaatgcactttatcgactaaaatgcagcacacaaggtgcaattttatttccgatcgatcagaaggcattacttcgcgataaattttgaaaaggtcttaactgagaaatgtcgtttcgctcacacgaacttgcagctgctgcaaaattttaccctgaagtgtaattagtttgccgacttggcaagtacgcgtctcttttaagctccagtgaccttcttagataagctaatcgatttcctataatcgaatagcaattttaattgattatgacacttctcactatatactacatatagtattacagacaatatgtacacactagacactacaaagtgtcattgcgattaaactatttacgtaaacattaacgactttattttgattgtaatagagcacattcggtgcgaagagttcaagcaactcgaacgtgacaccatcggttattatttagaaattccctttcgaaatgtttgagtttgagcgaattgaaatggcttttagcaagaatttttcgtaactggtaaagtcatctgcctgacttttggctgccaccgggctaacttggctcacacatctgctccgagttcgagtggcagtttccagccaaaaaccagtctggccatctttgtgagccaacagtttccccctttttgtaccaaccttttgtgccaactgcgtgttagtctgtgtggtcaaatgtcggcattttttatacttttgtgtttattttttatgtgcacgccttgggcaattttgtccattgtactgcctgtctgcctggctgcaaaaaattaacgttgcagaaattatattccagaatggcttcaaccgagtgggatacactatgatatatagatggaaatgttatatctgagcagttggccagtggtgtattttctagcagaaataacaatcgtaaatcgtcaaaatccgcagcaactcgtgatgctaatgaatcggtcaacaaatttgacgatgtcgtgatccgcagatttaaagccggatgaaattggcttgagccaccctaatgaaggcatcagctgaggcatttccgtttcgcctgtccctccactctttccatgaatcgatatcctttaaaggggacacataagttcccgaaaaaatgcaatattctacctacacgtccgtttctctcgtttcacttcctgttaacgccagctatttttacccagacatctcaatcactatctgcccacgcacacagactcatgatcgcattattttgggtatttcttggtatttgccagagacacatttgtgttgatcgtaagacggaatcaaggcgaaactacctgagttcgaggttcattagccaaccttgctaatcaacgggatctctctacccagaggaatgcagatatttttcgggcatatacttggtatattgactgcccaagggtcgcacccagtttccaatttccgatcgacgacgcacccatgcacaatttgataaccgggccccatctgctctccaatccacatgacatttctgggtaacttgatacttaaatgtgggttggcgggtctcatgggaagcgtttataattctaatctgttgacaaaaccgaccacatgccaaccgtctgtgaaccagttgataaaaaccgaaagacaaccaatggagccaaatcaaaatatactaataaattgaatagaggtttacgtttaaacaaatcgtgtcttgtatcaagactcgaaatcattttgttaggcgatactctgatactctgtggaagtgtgcctttaaacgaagcgatccaaagtgtttccgtatcgggttacgttaagtacggggccattatgtatgacagggccagatcagggtttatctcgatcgaatgtcaaagtgttctagaaacagtttcaggaaagcatttccccattagctggacgttaattagatgcacgacactacaaagcactcagttatagatttttatttactggcgggggagacagatcaatggagggatggggcttaccgattggatatatcccgactagtctaatctttacagctgtagatagccgcagcaatatgatgaattggctgactcacgaatttccgagtggaaaacgtatttgcatacatgtacaagtatggccagtgccagtgccagttaccggtttctctctaaacttgaacagagtctaccctcgtatagcccagttcaagcggacatctgtgtatacagacatatatacatacatatatcgctgcaatgacagaaatggaattaattatggtcggagtgtcggcggcgccttggccaaagctaaagccaaagccaatttcaagcgagccaaaaaccgctgtctttcttgactcgatgaaatgtgttagccgagagacctaaacacgtttaatgcgatctcgagactgcagttttcccttcgcgcttgtgtcaggctcccagtcaacctgacacccactcgcaacgcggagctggctgctaagcggtttgctgtggggtctaatgaaatgctctaacatacgatatgtgcgcacatatgttcccatagccgccatactgtgtattggctggataaatgcgatctattctggccgccttaactgcgcattttgcattttacactttgctggcggagtcggatctctcgcgatcccgggtcgtttgcctggttacgaaaagcaataatacccaaagctctttgtttaccactcggcgagccacggtctcgaattatgtgtttgctttgccatgaaaacgaaggcaaacacaggcggtctttcaatagggccatccgccatggaatccgcatcgaatgggtggaaaatgcattccaaaactacgtaaattgcataagagacctggagagcgtcgagttttcagtctggttttgagaatttcttagaatcagcgagctggcaaacgagttcataatcggcgtcaagaaacgctcagtggggattccctcatatcgaatcgattccaaaaagcacaatgtgattacccaatcgtttagttagggtaaccaaaccagtcgcgtgcaatcaaagggcaagcaaactgaaactcaaataaacaagctccagttgatgacagaccaactcgaatcgcgagattgagagtcagcaattctccagaaactattttcggcatatgcattactgttagatgatgtatacagtactaatcaataagggaagtactttgcggatacggtagtgcgaattgtgctttcactggattctgagtaacgtgttgaaaatacgcagcgaatcatatggggtgcaaaacaattgccattaaacgataagcaaacatttggaaattcgtcgattcgaatgtagtgtacctactaaattagcatgcgaaatgatgtcaactctccgggtgccaatgtgctaattggggcagtcaacttggctcaccatttcgtcatgcagatcggtgatttttaaggaaataggtggacaatgtgcgcattctgagaccagccatgagctcggccacctctccagaatgtggttgattcaataaacgcatatctacttatctggctccagcaattagcgataagatagggcccgttgggtgtgagtcgtctgtttttgtcattttctcagaagcggccattactgtactgtataacgttgaatttcctggtccatttcagtttgcccatctacaggaaaatgagtcgccagtcgacttgcaggctagtcctgctgctggcctttaccctggccctaatccacgccagccactcaaataccgtgggccccaagatccacttcattcatgacgatctgacggaaaacgagctgaactctggagaggaggtgagcccgaccgagagtctgcccaaaatctccacccccaaggtaaaggatttacccgtggagacgaccaccaggagccccacaaaaaaaaccacgtcctccggcaccgagaagtcccttagcgaggaggcttggaatgatctgatggaggcggccaagcacagccaagctttggctgatgatccacacttcaacaagatgctcaatactaccgtcgccgccggggagaagaactccaccgataccgacgatagcgaatactatgactacgatgatgattacaactatttcgatgaggagacggtgacgatttcccccagtcccaagaaggccaagagcaaccccaagctgcagcccattgtggatgccaccatcacgaagtccaaggtatacttcccccatcatccttaaattcaaataaatatgttttcgtactttacagagcaaatccaacgaccaaaagaccaaagagagtgctaacgatatcgacagcgactctcaatatgactacgacgagggtctggatgatgatgatgacgaggacgatgccgctgacgaccttttgaccgatgatgagcaagttgtcttcagcgaggacgttccgtgtccaagattctgccagtgtgcccggaatgtcaacagctatctggtggccacctgcagcagacttgacatgggcatccagaagtttggctctgacattacggatttggttgtgaccaatgtgggtcctaagtaccccatcctgatgggacccaacttcttccagaatctgggtcttaagaacgtggcttccatcaagatcgccaactgcaccttggagtacctgcacgccgaggccttccacggactgaacgagctgtacgctgttaacttgacggatgttggtttggctatcattaatcccgatacctttgttggaaacaagaaactgcgcatgctgaccatttcgggtaacgacttgagtgtgatgtccagcattcactatttgctgaaggtgagtgatttcaaaaacctttaccttgaaatccagctaataaattataattttgcagtcttccagcattgaggagctggacttctcgcgcaacaaccttatggagttgaatcccaaggccttctcccatctatccaatgtcgtctacattaacttgagccagaacagtctcaagaaactgcccgagaaggctttcgagaaggttactcttctggaagaattggatctgtcttacaactcgctgactgaattgccccgcgatatcttcaatggcaccaccctgtccatactgcacctgaagtacaataccttcaatggcgatctgcactttggcaccaaggatctgcagcagctggacttgagctttaactcgattgtccaagtgcaccacagcatgttcgacaagatgcccggtctgaccaacctgaacctcaagggcaatggcattaagaagatccaaccggactcgttccttactttgaagaacctgcgccacatcgatttgtccatcaacgatctggaccagatctcgggaatgctgttctttaagaactctgagctggatgtgatccgtttgaacgacaatcctcgtctgagccagttgcccaccgatggcttcttgagctacagtggggagttcaccgtctactacctggatatttccaattgcgccatcggtccattgggtcacaaggccttctccactatgccgcatttgaccaccttgaagttggcctggaacaacattaatcatctgccgcgcgagattttcactggactgcacaagctgattgacttggatctgagcaacaacctgatcacccgcatggacgatctgatcttcatggacaacggagagctgactaagctcagtctggctggaaatcccattagccgcttgtccgtccgcctcttcctgccgctgcaccaactgcgatgcctggacgtcaatgactgcgagcttaccaccttgctctccgatcgcgacttgggtgcgggttacaagatctttgacagcctgcgctcctttaacgcctctggtaatttgatcaagaagatctcttcggaggatgtgaagagcttcaagaacctgcgttctctggatatcaccaacaatccgctgaagtgcactcccgacttccaggagttcatcagctacgtcactcttcagatgcagatgactcccaagcgtctgcccgtgctggccaatctggaggacgatgctactattgtgcagctggagactctggctcaggctggttggtcgtctttggcccacgaggtgtgcaagcatgccgaaggatcagatctcttggacgaaaagaaggccgacagtgccgaagccaaactggagaagcgtctgaaggaaagcgtgaagaagcttaacgaggatgaggctaagttgctgagtgtcctggacaagagtgtgctagacaagagcaggctgagcagcatgcagaagatcatgaagggatcggtgaacactgaaaccgcgaagcctgaggaagatgctgacgaggagaatctgaacaatggcggcgaggataaggaggatgacagcagtgactatgacagtgaggaggatgatgatgacgatgatgaggacgatgatgatgacaacaacgatgatgatcgcttcgaggaggccaagaagaatgccaaggctaaggccgatgctaacaaggccttcgacacgttcgtgaacaaggaactgaagccagtcctgaagaccgatggtatccaggcggaggaagtggacatgtctcaggagacccgtgataaattccttctgggtaagttttagccaatcattcgttgatggaatgtattccaatcgtatgttttaccttctcagagaaactgggcttcgacagcgaaagcgaggagtcagatgagtacaccgagaagatgatcttccacggcgaactatcctacgacctggtggtcccactgatcgtcgtgtccttctgcctcctgatgatcgtgctgtccatcgcccgagtgatctacgtggtgctgcgcaagcgcggcgagcgctatcgcatggcgctgctggcctcaaagaactcgttcgtataccagaagttgagcgaggacatcgtgaagccgaccagcaaggagcagaaggagcccaagcatctgaagcagccaaaggtgcaccgatacgcgcccatcaatcaggtctaagtccacctagaatcagcagttccgggccggtggccgcggaaatcgaacgagttgcgctgtttttctaatttataagtatattgatagttgaaaaagtggaaaatcacatcagacaattgactaaacacaagcacaagaatgtaagaaacaggaggaggagcagtaggtggcagttaaaagtattagcgaaagtgcgaggaaacaaagcaacaactaaaaaatacttgaatccaaataagagattgaaagagagagaataaatctttgacaaaatcctttatccttgaaatatcctgtaccatcaaatactgttaagaccagtcaaaggtccttggcaacagcagaggtgggctttcagagaacgcgtttgatgagcaaccgtttcgaaagcaacggatttgcaatttatcaaacctctgcccacaatccgtatccaattagtccatatccgggaacaacttgaagatttagtgccattttgccaaaattcaaaccgagcgaaaattacttaaacacattaaggtttctaaactgagtgtcaagtcaggaacaagaaacgaggagcgaggaacagaaagtagtaagagttttagatgcgggtctgtgtagcaaacggttaggagactccctagaatgacgtctgatttttaatatgatcaagagatgagagaaataattaatgcataaactatgttaagacttttttattatcttttttccaatcgaaggcaagtaacagcttgacctattcgacattgaaaccgattccgaaaacaataaattattttaaccaaaccgatcgtaatctttacaatgcatacttaatagacatacacacttgcatacgtactttaaacaataacatgcctttcaataaaattgaatatattttatctgcgttcaataaaagactcaagttgaccgacatccccttcctcctttacgtaggtgctcaaattccgctggaaacagagtgccaattcgttatcttcccgatcccgtttcagttcctctctgacctgccgccacatccgttcaaatccactatcgaacggcattcccaggaagcgattatgtctggaacggagttcattgccgatctgctgccacattgcctcgaattccccgtcgtagggcatccctagaaatttaccctcacatccggaggattcgaacatgaaggagtactcaaacatgtttcagtctaaaatatattataattacaaaaattacaagctttttttggagcaactaatttgtaggatttaatccttttttttttgttttaatgatatgatatcatgtatgatttgtatgatattatattaatattaatatcttatatcatagtatttttggtcccagcgtcggtcttcttcctgcagcttaggaaagcaaactgagtagaggattctcaaacgaagtgcagaccaaaaaagaggccacaaaataatgctgaatgtacataagatccattgcgacaaagaacataaagtaaacaaaaatcaagcagggcatcaaatttcctgtgattctgtatagggtttttaatggtatttttcgtatatacacaagtccaaccaaaattaaatggttcactctaagctttttatacgcttaaaaaaaatagaattttgaaagctcaagtatggtcagatcttaaacgaagatccgttagtttaacatttttttttcttcaagagaacaagttgagcgtgggtaagttttggctccaaattaatagacctccatggacttctcaaagagttgcgacaggttttcctgcgtctgcgccctgggtgctagcttagtgatcctttcctggggcagggttccctccaccaaggcgggtatatcgctgctggag

SEQ ID NO: 28922 - DNA, 4318 bp, DROSOPHILA
cttcaacaggtgttgaatacgcgctagactagaaagcgatcccacgatcaaccgactcggtaaagcaaaacaagccatcgaaatcaacaggcgagcacgtgattagcgtcccaagccataaagcatagaaaagtgccgaattgaaccactttcagcaatcgtagtgtcggccaaatccaataaagtttgtgtgtttctttcagcgatcaaaaaccaatatttggattaccctgcttcactttgagaaaagttgtctgcaagcagaccgctcataagtttgcccatctacaggaaaatgagtcgccagtcgacttgcaggctagtcctgctgctggcctttaccctggccctaatccacgccagccactcaaataccgtgggccccaagatccacttcattcatgacgatctgacggaaaacgagctgaactctggagaggaggtgagcccgaccgagagtctgcccaaaatctccacccccaaggtaaaggatttacccgtggagacgaccaccaggagccccacaaaaaaaaccacgtcctccggcaccgagaagtcccttagcgaggaggcttggaatgatctgatggaggcggccaagcacagccaagctttggctgatgatccacacttcaacaagatgctcaatactaccgtcgccgccggggagaagaactccaccgataccgacgatagcgaatactatgactacgatgatgattacaactatttcgatgaggagacggtgacgatttcccccagtcccaagaaggccaagagcaaccccaagctgcagcccattgtggatgccaccatcacgaagtccaagagcaaatccaacgaccaaaagaccaaagagagtgctaacgatatcgacagcgactctcaatatgactacgacgagggtctggatgatgatgatgacgaggacgatgccgctgacgaccttttgaccgatgatgagcaagttgtcttcagcgaggacgttccgtgtccaagattctgccagtgtgcccggaatgtcaacagctatctggtggccacctgcagcagacttgacatgggcatccagaagtttggctctgacattacggatttggttgtgaccaatgtgggtcctaagtaccccatcctgatgggacccaacttcttccagaatctgggtcttaagaacgtggcttccatcaagatcgccaactgcaccttggagtacctgcacgccgaggccttccacggactgaacgagctgtacgctgttaacttgacggatgttggtttggctatcattaatcccgatacctttgttggaaacaagaaactgcgcatgctgaccatttcgggtaacgacttgagtgtgatgtccagcattcactatttgctgaagtcttccagcattgaggagctggacttctcgcgcaacaaccttatggagttgaatcccaaggccttctcccatctatccaatgtcgtctacattaacttgagccagaacagtctcaagaaactgcccgagaaggctttcgagaaggttactcttctggaagaattggatctgtcttacaactcgctgactgaattgccccgcgatatcttcaatggcaccaccctgtccatactgcacctgaagtacaataccttcaatggcgatctgcactttggcaccaaggatctgcagcagctggacttgagctttaactcgattgtccaagtgcaccacagcatgttcgacaagatgcccggtctgaccaacctgaacctcaagggcaatggcattaagaagatccaaccggactcgttccttactttgaagaacctgcgccacatcgatttgtccatcaacgatctggaccagatctcgggaatgctgttctttaagaactctgagctggatgtgatccgtttgaacgacaatcctcgtctgagccagttgcccaccgatggcttcttgagctacagtggggagttcaccgtctactacctggatatttccaattgcgccatcggtccattgggtcacaaggccttctccactatgccgcatttgaccaccttgaagttggcctggaacaacattaatcatctgccgcgcgagattttcactggactgcacaagctgattgacttggatctgagcaacaacctgatcacccgcatggacgatctgatcttcatggacaacggagagctgactaagctcagtctggctggaaatcccattagccgcttgtccgtccgcctcttcctgccgctgcaccaactgcgatgcctggacgtcaatgactgcgagcttaccaccttgctctccgatcgcgacttgggtgcgggttacaagatctttgacagcctgcgctcctttaacgcctctggtaatttgatcaagaagatctcttcggaggatgtgaagagcttcaagaacctgcgttctctggatatcaccaacaatccgctgaagtgcactcccgacttccaggagttcatcagctacgtcactcttcagatgcagatgactcccaagcgtctgcccgtgctggccaatctggaggacgatgctactattgtgcagctggagactctggctcaggctggttggtcgtctttggcccacgaggtgtgcaagcatgccgaaggatcagatctcttggacgaaaagaaggccgacagtgccgaagccaaactggagaagcgtctgaaggaaagcgtgaagaagcttaacgaggatgaggctaagttgctgagtgtcctggacaagagtgtgctagacaagagcaggctgagcagcatgcagaagatcatgaagggatcggtgaacactgaaaccgcgaagcctgaggaagatgctgacgaggagaatctgaacaatggcggcgaggataaggaggatgacagcagtgactatgacagtgaggaggatgatgatgacgatgatgaggacgatgatgatgacaacaacgatgatgatcgcttcgaggaggccaagaagaatgccaaggctaaggccgatgctaacaaggccttcgacacgttcgtgaacaaggaactgaagccagtcctgaagaccgatggtatccaggcggaggaagtggacatgtctcaggagacccgtgataaattccttctggagaaactgggcttcgacagcgaaagcgaggagtcagatgagtacaccgagaagatgatcttccacggcgaactatcctacgacctggtggtcccactgatcgtcgtgtccttctgcctcctgatgatcgtgctgtccatcgcccgagtgatctacgtggtgctgcgcaagcgcggcgagcgctatcgcatggcgctgctggcctcaaagaactcgttcgtataccagaagttgagcgaggacatcgtgaagccgaccagcaaggagcagaaggagcccaagcatctgaagcagccaaaggtgcaccgatacgcgcccatcaatcaggtctaagtccacctagaatcagcagttccgggccggtggccgcggaaatcgaacgagttgcgctgtttttctaatttataagtatattgatagttgaaaaagtggaaaatcacatcagacaattgactaaacacaagcacaagaatgtaagaaacaggaggaggagcagtaggtggcagttaaaagtattagcgaaagtgcgaggaaacaaagcaacaactaaaaaatacttgaatccaaataagagattgaaagagagagaataaatctttgacaaaatcctttatccttgaaatatcctgtaccatcaaatactgttaagaccagtcaaaggtccttggcaacagcagaggtgggctttcagagaacgcgtttgatgagcaaccgtttcgaaagcaacggatttgcaatttatcaaacctctgcccacaatccgtatccaattagtccatatccgggaacaacttgaagatttagtgccattttgccaaaattcaaaccgagcgaaaattacttaaacacattaaggtttctaaactgagtgtcaagtcaggaacaagaaacgaggagcgaggaacagaaagtagtaagagttttagatgcgggtctgtgtagcaaacggttaggagactccctagaatgacgtctgatttttaatatgatcaagagatgagagaaataattaatgcataaactatgttaagacttttttattatcttttttccaatcgaaggcaagtaacagcttgacctattcgacattgaaaccgattccgaaaacaataaattattttaaccaaaccgatcgtaatctttacaatgcatacttaatagacatacacacttgcatacgtactttaaacaataacatgc

SEQ ID NO: 28923 - protein, 1051 aa, DROSOPHILA; identical to SEQ ID NO: 12285

SEQ ID NO: 28924 - DNA, 3269 bp, DROSOPHILA
gaccccaatacacatgcgtttcatatagatcctattgctttcattaatgtatacacagcgattgtggggtctgtgaaaggggtacaattgcacatatgtacgtcttcatatatatgtacatatacgattccccacatttgaacgatatgagatcgtctcttcagttcttggtttctctcgctctaaacaaaagattgggggacgtgaagtctaaggattggcagacatatgcatttctagacaatgttgttgcatttgagtgcattcgctaattgtaaaagttgccaattcatcagcgtctgagatctgaaaaattatgctatatataattagttactagagggctggtttcgggctttcacctctatatacatgggatagtatagtatggtatgtatatagtaatcaatatttagtccaagggttgtgaaaggaaactttctataaagaacaggatacttgatcgaaagatgagccagtggcacttatttaagtatcaatcgacccgattaacttctgcagagacagtcatgcacctgttcattcaatcatatacaattagttcccagcaggcccaaacaaactgaataaatatacaaatgaactcgtctgtgtgttctttaatttgtcgcaagtgtgcaaatcagaaaaatgtgacgaaccgagcgttgtttatcaacaacaaagagaaaaaacagacagaacatgggcaatctaaatcgagaacggcacaacatacaaaggcaaacaaattggcgaagaaggcacaaaccggttgccactaagggaagtcagagccaaaagaaagcgatggaaccaaaaccggttcattgaacctgcacaccaccggcatcatggtatagacacacagaacgattccagctctttatcacacaaaaaatcattctttatttatgccatttctgtttttagttgagcacaattacttgcttacggaacgaaatgtaaataaacatggcgagctatggtaaatgcaaatgtctggaaaaatcgattatgcgtttatgcttagttcaaatcggttatgttgctgatggatgacatgctccccaaacactttagtcggtggcatcggccttggccacggagaaggcctccgaaacgggcagggtgccgctgttggcgatgaccacatccttgacgggacggtcgcgggcatcagtggccgagttctcgatctggcgcaccacattcatgcccgacaggatcttgccgaagacgacgtggcgtccatccagccagctggtctgcttggtggtgatgaagaactgcgatccgttggtgtccttgccagcgttggccatgctcagccagccggcgccatagtgcttcagcttgaagttctcatcctcgaagcgctcgccgtagatggagcgaccgccggtgccgtcgcccttggtgaagtcaccgccctggatcatgaagtccttgatgatgcggtggaacttgctgcccttgtagctgcggggtataagagcgttgcatgatggtcagttttgtcagcatgggaatttaaatttaaaaaaaaactgggtttagaactcgaaacctaaccaaaaaagaacatgcatacttataaattcagagaagaaaaaagaaatacccaagaactgcacttttatagtatggtagacttaataacagttggcgttctttgttaacccattagtgccgctttgtcaactgatgtatgcgattggccgctcaaacgccacgtaattgcttcaatctgagagccccgctataacctacaaagtgccgctgattagcggcatcttttgctggcctagcggtacctggcaccctactatgttggggtattttcggtactcaagtaccctactcacccctcgccctgcggcttcagcgccagctccttgaagttctccaccgtcttgggcaccgtcttgccgaacagaccgatctcgatgcgaccagcgggctcgccgccaatggtgatgtcaaagaaaacctacgcaatcggaagcggtttattattaacaagtcatctcacttgatttatggcgcagcaaatgtgtgtgtgtgtttgtgtgtgtatgtacgtggtgtatgcagaatgtaaggacgaaagtccaaggagcacgcaccttctcggtcactttgggacccttgctatcgtcggcaacaacgacgccggccaccagggctaccacgaaaacggataagaacagcttcatcgttctaaatattcacagcgcttcagtttattcctcaagcgacgtcgccaatggatatttcacgactgaattttcggtttctgttagtgatgtaagaaaactttgttgcatcgccaatcgatgttttccatcgttttttatgtttttgtcgaaatatcgatgcttaagtgtgaccattcgatgacgatgtctgatgatcacacattcgggcggaaaattcaaattcaaatagttaatacgccgaaagcataagttaaggttttcgtacgaaggaacaaagtaagttcgaagagttgactttattggtatagtttttaatattttagggattagaagtccagtttgcattagcacgtagcattctctcttgttttattgacggttctgtacacaaaaagtaagtaaaaaaatatgcttttatttattggtgtactgctatttgcgtctgagatttgtccatatccttggctgccttctctgctctcttcttctccctgctggccagaactttctccctggatttctgggccctttcagcgcaatccttgggtcgtgtcttcagggtcatatcatccacggccgcctgtttacgggctgatctcgaaatgcatcgttccatgcagctgatgggcacaaatcttccaatgaagcaaccgcagtgtgaacaatagtgattgatgtcctggcggccagaccattttttactgaaataaagtgaacattacgaaagatttataaagcttcatgcagatggccaaccaaagttttgtgaatcccagaaatctctgcaggcaagtgaccaactccagttgcaccaaactggttccagacttctcacacgaaggacaacggatccaggtgggctcctccttcaggtatcccacttgtggcttgtggctgacaatgatggccacaatctgcggttcgtccacggtcatgatgcgagttccagcgagaacgatcggtgactgaaagatggatcaaatttggagagatcatgggagggaaaatcaaaatcagaatcactctcccgatttctcttaaccgagg

SEQ ID NO: 28925 - DNA, 622 bp, DROSOPHILA
tggcgacgtcgcttgaggaataaactgaagcgctgtgaatatttagaacgatgaagctgttcttatccgttttcgtggtagccctggtggccggcgtcgttgttgccgacgatagcaagggtcccaaagtgaccgagaagctacaagggcagcaagttccaccgcatcatcaaggacttcatgatccagggcggtgacttcaccaagggcgacggcaccggcggtcgctccatctacggcgagcgcttcgaggatgagaacttcaagctgaagcactatggcgccggctggctgagcatggccaacgctggcaaggacaccaacggatcgcagttcttcatcaccaccaagcagaccagctggctggatggacgccacgtcgtcttcggcaagatcctgtcgggcatgaatgtggtgcgccagatcgagaactcggccactgatgcccgcgaccgtcccgtcaaggatgtggtcatcgccaacagcggcaccctgcccgtttcggaggccttctccgtggccaaggccgatgccaccgactaaagtgtttggggagcatgtcatccatcagcaacataaccgatttgaactaagcataaacgcataatcgatttttccagac

SEQ ID NO: 28926 - protein, 120 aa, DROSOPHILA
MIQGGDFTKGDGTGGRSIYGERFEDENFKLKHYGAGWLSMANAGKDTNGSQFFITTKQTSWLDGRHVVFGKILSGMNVVRQIENSATDARDRPVKDVVIANSGTLPVSEAFSVAKADATD

SEQ ID NO: 28927 - DNA, 5032 bp, DROSOPHILA
ctgctccaaggcgcaggattcagaaaggaactcgaacccggtggttcggagtggttcatgctgtgcatatttcggtaacagcaagccagaagcgagagcaagaagtttccaaaaagagaagaagaaacagagggtaccaagacccaaaaactgtaagcccgatttatacggcatggagtttttatgacgccgattgccactggcagccaacataaaatatgccaaaagggaggagcagcggaggtgccgagaaaaatgactttctttttactacatttgtttgaccgtaaacaagaattaatgagagtcataaaaccgtcaaacttaaatttcgaacaggcgcacagcaaagtcagcaggccgtgtacagtgggcgctctataaggcgaacaaatgttgaaactcaaactttttacctaatgcattaattgctactaacgaaaactatttgaaatattcgttcgataattcgcttatatgtttcttaagaacttaactataaggttgcctttatttggctttgtatcgagtaactactgtacatgagaaaagtgagatagacacccacacacacacacgcacaaccatgtgcgagcaatgtgctcggcaattaccgttgcccatggaacacggtaccaaaaaaagggagagaaaagcgttaaaaagggaagaaggaaagggagaagcggaagagaagtaactgacctgcgatcgggaaggtgaccttccccaggggcgccgactatacatatgtttgtatgtatgtacataggtgcagggtatacagaggtatatcactgtacatatattgtgtattcaggattgataagaatgcaggacaaaaggacctccgtccttggaaaagggtctgcgttcatctcaggctgtctggtttttttaggggtgtggaaaatttctcacacttatcagctgtcggaaagatttcaaaactaatgaagtcacatggcggcacattgcatgcaaggtaaacacgaatattgtttataaaattatacaaaactttattttctatgtattgttcagagacatttttgggaaacatcagttagttaaaacgtgttttaatcgttgcttagtggtaaacaatataactagcataagttgtttttgtatgaatgtgcgaaatacatgatataaattacaaatagtctacgtctcttttttatgcgatttatgggaataattttgcacaattttttggatttattcattcccatcgaaactaaaaactaacgacaaatacaattagtgataggtaggtaggggatgaaatgatttcacgggtacaattataaaatataattcttggagagacaacgccgatgtgttcggccagcaaatgaactcgttgcccactctctctctcggtgtccaccgctccgccgctcgctcccactgagatggtgacccagcgaaaggagctgacgggctccagtttagttcggttcctagtcttaccggaggaactcactcccagcggccggctcgcgagcaacttgtgctccgtgggcaaagatgccggagccagctcttggcagtagccgaaaactgctcaagggactccagcagattacgatatcttagggatgggtgatgcaggtaaagatagttggcaatgcgactacggtaactatacgcattttttaacgaacacgaaacgaacagaaaatgaaatacgctacaaatttaaaaatgaaaacaaattaaactaaactaggtaagtcagggtcttccagtccgccttggaccgcactatttcctctggctctggcccacaatcgagtccatcagcgcaccggtcagctccgttcgcagcgcgatcttctggaacttgctgccctggtacttgttgtagatggccttcagcttggcctgaggagcgtcccgggccagtttcgcgatcagccgggtaatcggacgcaagtgcgcggccgagtatcgcgagtagaaggtcagagtgggcgtccagtgacggtcgttgaatcctgtaccggcccggtggtttccattgagcaagtgcagcgacaggaacagtgaggcagctgcaatctaaaggcgccgcaaaaaatattacatatacctatgctaaataaaaggggatagtgtattgaaacccacctccgatggcctgtaagtggccatttcgtagtccacggaagctaactcgatgaagtacttggacatcgtatggtgctcgtcctcggcgccagcagccttcgagtagcgtcgaaggaagtgaatcggcagcggacgcgacagattacagtcgatggccttgaagatttgcagctccatctgtcggatctgccgggcagtgtaggtgtcgtccgtgatgaagacgaaatctccgattgccggcgggaacagctcctcgtacttggtggctatgaagagtgctgtcactcccaccaattgcaagtacgtgcgtttggtgtccttgaccacctgcaggtagcgatcaatgatagccaccgccagctggaaggtctctgcagccagatggaactgcaggtggacttcgttgatccaatcgatcagcacggctcgcatcttgtgggacacctccttctgtccggccaggtgatccttgtgaatgggctgctccagctccacctgatacaagtagtcgtagatgtcgtttacatattcggagaccagtaccaggttctccttgtcattggcatcaatgtcctcgattccagccaagcgcttgctggaaagggacatggtggtgggcatcgtagatgtggtcgtagtgactgcactgttgcccctaataaggggcatcctggtcgcatcctttttcacttccagtgagtccttcttggtttctggcagttccttcttggtctctgcctctttgcgggaaacagctactggttcccgtcgaattcctgaaactcccatcacgggtttggccaaagcggcacgcagtttggtcagcgacttcttcgacagattgctgtcctcgcgctttaaggtgggctcgttcacgttctcggaagaactggacttgactgtaactttggggattcaagatgaattggggtcagtatgatgcaagccattcaaaaattggaaatggtagatgatgatgattggtagatgattgctcttttgcttacctttagtgggttctacagtggtcttggtcggaacgcgattgcgcaccgaattcgaacgcaaaaacgccgacacgcccccctcgttgaccttgggcggaacggcgccattgccattgccattggtgctgcccagtggctgtttcttccagtggctgtccacccgagctttggcattgcgcagggcgtctgtgagcttgagatccttggagctgctcggtggagtaaccacatgtgattgcgaatggaatacttgatactggttcaaacacttactctttctgtgccgcatccttcgctgcgatgggacgacttatgccgcgattctgcaaatcgcccaaggccgcgcgttttgttgttgcctccatggaaggaaccgtcaatttcttcaattgcacttgcttgaagttctccgaagcgttctatcgaatattgtttaattagttttagaaaacaaatggagaagtgcaacaagtatagttgaatgcatatctgcactttgaaccctattctttaacatctttaattattgagcactgattttaattattttaaattgttaaagcaagatcagtttgttgcataataatgacttgatcatgaaatgcaccttttcaagggcggccattttgggaaaagcaccgcaagactgatcctcgatttatctcctctgtgatttggtgcgaaaaataggtgtggagagtactaattaacggtgcaagcaccgccggtagaaaattgcgccaaaatgtgagcaaggcaactgcaacaacgacaacaatgagcgcccgggacaaacggcactctttcttttccccctcccttcacacactcatcgcactatcgcagcgtcctctttgcccctctctacatgaccacgctgcaatggcgtctcgctgatgacgagcccactagtttgtgactttaccatgaccttttcgcggatgccacggtaatcttaatgttctagggatcaactcacctcatcgccacgcattttcagtgttgtgcccaccattttgattgcttcttttctatctgtacaaacacaattaacacgaagataggcagacgcttggctatcacttggtttggttgacttttgatcgcgtttctgtgaccgaacgcttgtttagctgttgaatttgttgtccgaatatatgattactaatagtttataatttacaagtcgagtgcgggattgtcaattctccgaaaacctgatcgagtttttgcacacgaagcgaggccaagctgccgtttgaatttgaaaatgggaatggggatggaagtaaactcgatgataaatgccgatgagtttgacgatatcgatttctggacttagttcccttttaagccgcagtggcgctcgagaataatcgatttattagagcagagcatgcaaaatagagatgcgatacgtgcgataattttcgatagttttagtgtgaccagtactggtgcacagcttatcgatgacagggctgaaacagtgctacccataaatttcaaatttaaatttaaaattagccgaaaaagaaaacgttacagtttgaaatttctgttagatattcaagctcaatccattttatacatattttaaaaatgaaaacttcatggattaaatttgatagttggttaaggttccccattttaataaagccatcgctttgactgccagtcgtcactcggttgcaccatccattgattgcatcaattaaaagttgatcacttcaattggctgtgttcggtttgtttttgtgcccccctgatttgcattcgctgatttaagatttcctgctgccacaggccgcagaacatcgaaactccgcggcggaaatgcagcataattcttgccactccgcagccttttttgctgatgatcagtg

SEQ ID NO: 28928 - DNA, 2609 bp, DROSOPHILA
ccattgcagcgtggtcatgtagagaggggcaaagaggacgctgcgatagtgcgatgagtgtgtgaagggagggggaaaagaaagagtgccgtttgtcccgggcgctcattgttgtcgttgttgcagttgccttgctcacattttggcgcaattttctaccggcggtgcttgcaccgttaattagtactctccacacctatttttcgcaccaaatcacagaggagataaatcgaggatcagtcttgcggtgcttttcccaaaatggccgcccttgaaaagaacgcttcggagaacttcaagcaagtgcaattgaagaaattgacggttccttccatggaggcaacaacaaaacgcgcggccttgggcgatttgcagaatcgcggcataagtcgtcccatcgcagcgaaggatgcggcacagaaagactccaaggatctcaagctcacagacgccctgcgcaatgccaaagctcgggtggacagccactggaagaaacagccactgggcagcaccaatggcaatggcaatggcgccgttccgcccaaggtcaacgaggggggcgtgtcggcgtttttgcgttcgaattcggtgcgcaatcgcgttccgaccaagaccactgtagaacccactaaagttacagtcaagtccagttcttccgagaacgtgaacgagcccaccttaaagcgcgaggacagcaatctgtcgaagaagtcgctgaccaaactgcgtgccgctttggccaaacccgtgatgggagtttcaggaattcgacgggaaccagtagctgtttcccgcaaagaggcagagaccaagaaggaactgccagaaaccaagaaggactcactggaagtgaaaaaggatgcgaccaggatgccccttattaggggcaacagtgcagtcactacgaccacatctacgatgcccaccaccatgtccctttccagcaagcgcttggctggaatcgaggacattgatgccaatgacaaggagaacctggtactggtctccgaatatgtaaacgacatctacgactacttgtatcaggtggagctggagcagcccattcacaaggatcacctggccggacagaaggaggtgtcccacaagatgcgagccgtgctgatcgattggatcaacgaagtccacctgcagttccatctggctgcagagaccttccagctggcggtggctatcattgatcgctacctgcaggtggtcaaggacaccaaacgcacgtacttgcaattggtgggagtgacagcactcttcatagccaccaagtacgaggagctgttcccgccggcaatcggagatttcgtcttcatcacggacgacacctacactgcccggcagatccgacagatggagctgcaaatcttcaaggccatcgactgtaatctgtcgcgtccgctgccgattcacttccttcgacgctactcgaaggctgctggcgccgaggacgagcaccatacgatgtccaagtacttcatcgagttagcttccgtggactacgaaatggccacttacaggccatcggagattgcagctgcctcactgttcctgtcgctgcacttgctcaatggaaaccaccgggccggtacaggattcaacgaccgtcactggacgcccactctgaccttctactcgcgatactcggccgcgcacttgcgtccgattacccggctgatcgcgaaactggcccgggacgctcctcaggccaagctgaaggccatctacaacaagtaccagggcagcaagttccagaagatcgcgctgcgaacggagctgaccggtgcgctgatggactcgattgtgggccagagccagaggaaatagtgcggtccaaggcggactggaagaccctgacttacctagtttagtttaatttgttttcatttttaaatttgtagcgtatttcattttctgttcgtttcgtgttcgttaaaaaatgcgtatagttaccgtagtcgcattgccaactatctttacctgcatcacccatccctaagatatcgtaatctgctggagtcccttgagcagttttcggctactgccaagagctggctccggcatctttgcccacggagcacaagttgctcgcgagccggccgctgggagtgagttcctccggtaagactaggaaccgaactaaactggagcccgtcagctcctttcgctgggtcaccatctcagtgggagcgagcggcggagcggtggacaccgagagagagagtgggcaacgagttcatttgctggccgaacacatcggcgttgtctctccaagaattatattttataattgtacccgtgaaatcatttcatcccctacctacctatcactaattgtatttgtcgttagtttttagtttcgatgggaatgaataaatccaaaaaattgtgcaaaattattcccataaatcgcataaaaaagagacgtagactatttgtaatttatatcatgtatttcgcacattcatacaaaaacaacttatgctagttatattgtttaccactaagcaacgattaaaacacgttttaactaactgatgtttcccaaaaatgtctctgaacaatacatagaaaataaagttttgtataattttataaac

SEQ ID NO: 28929 - protein, 524 aa, DROSOPHILA
MAALEKNASENFKQVQLKKLTVPSMEATTKRAALGDLQNRGISRPIAAKDAAQKDSKDLKLTDALRNAKARVDSHWKKQPLGSTNGNGNGAVPPKVNEGGVSAFLRSNSVRNRVPTKTTVEPTKVTVKSSSSENVNEPTLKREDSNLSKKSLTKLRAALAKPVMGVSGIRREPVAVSRKEAETKKELPETKKDSLEVKKDATRMPLIRGNSAVTTTTSTMPTTMSLSSKRLAGIEDIDANDKENLVLVSEYVNDIYDYLYQVELEQPIHKDHLAGQKEVSHKMRAVLIDWINEVHLQFHLAAETFQLAVAIIDRYLQVVKDTKRTYLQLVGVTALFIATKYEELFPPAIGDFVFITDDTYTARQIRQMELQIFKAIDCNLSRPLPIHFLRRYSKAAGAEDEHHTMSKYFIELASVDYEMATYRPSEIAAASLFLSLHLLNGNHRAGTGFNDRHWTPTLTFYSRYSAAHLRPITRLIAKLARDAPQAKLKAIYNKYQGSKFQKIALRTELTGALMDSIVGQSQRK

SEQ ID NO: 28930 - DNA, 1815 bp, DROSOPHILA
tatataggcatatgcttaagtcttagggtcttatggatatgtcactatatatatatataattgcataaatagagatataataatagagggagataatatattgaaagcttttaattgcttcatacaaattgatgacatctcaatatcaaatacaatgttggattacacacaaaccgtttatgtcaataagaaaataactaaatgggaagatctttctatataagaatatatagagtatatacaagctaaagatatttttgaaatccataataaaacaagtaatacatttcaaataattacaattaatattataatattattagttgtcataataatattttattataattataaatataagaatatagcctaagaaaattaaaatgaagttatgaagttaaaaaaaagcgtgtgtgttcctaccgaaccaccaaatattgtaaacaataatgtaatattttgtatcccaaattattcgcctatataccatatagcatatagcatatgtaccacacacaaacaacacacacacatacatacattactacatagcataagaatcccaattttggtgacaataaaaaattcagcttgtcctaatgtcctaagcattaacatccgctgaaaagccaagggtttgctaagcgtttgctttgcaccttacaatcagatttaattctttcgctctacaaataagacgtgaattgtgaccgcttccacacttgcaattttatttgaataaagattatatatgtatgtttcttaatcaattaccgtggattcgttattacatatataaaaatatattcgtatatactttacttacttttgaacaaacctacgagtaactgatataaaaattgcaaggcacgtgcaaaaaaacgggaacataaaaataaagtctacatggcatggaatattgaactccacaaattaacgaaaataaatcatataaatatagtttttcgtaaataaaaaaccagttttgagtagtgttcgggtgcacaaagaggtaagaaaagtaaatgatatttttcctttagctgaaatatttctcattggtctagcctagtctagctaagtaaatttgtttgacaatatgaagctcggatttctgggcctttttggcatggtgctcagtttgcgggcccatatatgtgcaaatactgttgatacgaagagtctattacaaaaaatgacggacgcaaggcttcaatttgccctcaacctgctgcaaatggaatccacgcatttaaacctggaaaactttgcgatgacgccattttccacgtggtcacttatgatcatgttctacgagggagcagaggggactaccttgaagcagatacgtgatgtcctggcgatctatgtcgattatccaacactgcgcaggtggtacgaggatgtccgagcttatcactagtaagtaccacattactcagaaactacatctattagaattttcaatgtctttttctttaaattctagtttaaattcggaaaacacaaaactgttttcgctgcgttacgcttactacgacgatgtaggagatttagaactcgtgaaagggtacaacagtgtagtcctagaaggagtaggagaaggaaatgtggttcttcgagagggtcggccaaggggtgtggacttcgaccagggggcgagtataattatcaacgacgatatcgacaaagcctctcatgcgaaaatcttcagttcttatagccgtcgttcgttcaatagtacagtaactgtgctggggattactgttagctactttaaggccaaatggaaggtaagatccagagccagattca

SEQ ID NO: 28931 - DNA, 499 bp, DROSOPHILA
gtgcacaaagagctaagtaaatttgtttgacaatatgaagctcggatttctgggcctttttggcatggtgctcatgatcatgttctacgagggagcagaggggactaccttgaagcagatacgtgatgtcctggcgatctatgtcgattatccaacactgcgcaggtggtacgaggatgtccgagcttatcactatttaaattcggaaaacacaaaactgttttcgctgcgttacgcttactacgacgatgtaggagatttagaactcgtgaaagggtacaacagtgtagtcctagaaggagtaggagaaggaaatgtggttcttcgagagggtcggccaaggggtgtggacttcgaccagggggcgagtataattatcaacgacgatatcgacaaagcctctcatgcgaaaatcttcagttcttatagccgtcgttcgttcaatagtacagtaactgtgctggggattactgttagctactttaaggccaaatggaag

SEQ ID NO: 28932 - protein, 155 aa, DROSOPHILA
MKLGFLGLFGMVLMIMFYEGAEGTTLKQIRDVLAIYVDYPTLRRWYEDVRAYHYLNSENTKLFSLRYAYYDDVGDLELVKGYNSVVLEGVGEGNVVLREGRPRGVDFDQGASIIINDDIDKASHAKIFSSYSRRSFNSTVTVLGITVSYFKAKWK

SEQ ID NO: 28933 - DNA, 3321 bp, DROSOPHILA
ccgcccagaagtgggtggcataggtggtggcgcggtcggccaggacaatagcattgatcttcggatgcgagtccgtggtgctcagatagtcggcgcagccatgctcgaagggatagatgccgatgcaggtgtgccggttggcctccttgcgattccactgtggctccggcagatcgtcgatgatggaatttcggctctgcggctggcacttgcacatcttgtccagcgactccactaaacgggctagaaagccactcttctgcttctgcttctgcgcctgcgatgatttgtgggactttgtggcacgacccttcactttcggcgcagttctcgttgggacgagcacacggggacggcgcttggagtaacgctggaactcgatcctttggggcttgctcttgctcaggctaagctgactcttccccggctcagcgtgcatctcgtacagagtgtgtggtgagctccccgaatccgtggacgcggtcatttccccgtgcgccacatccttgaacatgttgtactgcgtctgactgtgctgatatgcgtcggaatcgctggaggagttcagccgtgggaagatcttcttcaggggagactgcagcttggccgtcacccccacgtggttcaccttgatcaggttggacttggaggtggcgcaatggggatcggttgattccgacatagtgactttatgttctaaacttatgacgtgccgcttcaaagccaactgacgtctttttcgtacatatgatctgaattcaagttaggcgtgccaaaaagttaacttataagctttttaccacagaagagaacatatactctttggcctagagacaagaatatataatttaatataaaaatgtatttttattattattggcttatgtctgtgctataaaacttttcatttccggtttgagccaccactacgtttgcaggtatgtttcggtatatttccggtagatggtgtacccgtcagtggtttcccttaccggcccccaaacggtcacactcgcccgagcatagcagatttggagaaaaaaacaactgtaattaggagccataattaattcatttcgaatcgcacacgcttttcagtttatctagccgaaagtacagaatgttggcctccgcctggcgcagcgtggccacctccgtggagacccagttgacggccacctacttccgaggttcgtccagcaatccgacactgctcctgcgttcctggcggacgattcctcgagcggatgcccctggtttcggagcgattcggcggcgttttctggctgtgcccgtcatctgtccaagtctcgtcaagcgtaatctatccgtacatacgtgtttaatctaatctctcccggtgctgcaatttcatttcccagtatctacgctttttgttcgtccgtagctagtcagtctgtttatctgttggccatctatgtagctaaatgtgaaaccatcgcttcgtttcagtgcaaaaactacgaaaagtcggcttcagaggcatgcacagcacattggaggacgtgcagctggagggcatggagatcaagatcctgccggccctgcaggataactatatgtatctgattgtagacacgaagacgcgcgaggcggccgtggtggatcccgtggagccggagctggtcattaagacggtgcaggagcagcagctgaccctcagcaaggtgctgaccacgcaccatcactgggaccacgccggtggcaatgaaaagctgctcaagctgtgggagaaggagctggacgtgtatggcggcgatgaccgcatcggggcattgaacaaaaaggttcagcaggacgacaccttcaccattggtggtctgcatgtcaagtgcttgtccacgccgtgccacactaccggccacatctgctaccacatcaccgcgcagcagggcagcggcgagggagccgtcttcaccggcgacaccctcttccagggcggatgcggccgcttcttcgagggcactcccgaggaaatgtacgaggcgctgtgcacaaagctctccgccttgccggacgccacaaaggtgttctgtggccacgagtacacgctgcagaacatgagcttcgcccgtcacgtcgagcccgacaacgaggtcatccagcagaggatcgagtgggccaagcaccggcgcgcctcccaggatcccactgtgccctccaccattggcgaggagaagtcctggaacccctttatgcgcgttcacgaagccaccgtgcagaagcacgctggcggagccaccgatcccgtcgtcaccatgggcaagctgcgcaaggaaaaggacaccttcaaagcctgatctatttcctcgaaagtttcgaaacttgtgatttaatattggattttaatggttaataaaattaacgatgtgtgtgaagtgcggacaatggatttttaattattcgcaatttatcggattaaaactttttttgttttattcaaattatgacataaatttatttcttcagctttatttaaaagaatttatttttggtattttggtctagcaacaccctagagaagagggtactggttgattccaactttattcatagagcaatgaacttaacaaattttttaaatccaaagattttagcaaatttcgtaaaatttgaatcacaacggttttggttaggcgttagtgccttttgggcatatcaaaaatacttttggtatttctagcgatctatcgccaacgatctggcaacaccgtctgccattaacacaaaaatcgcggcgtctctccaatgggattttgaaataaaaacaagttaacagcacggcgcgatgaacgcaaacaaacgcagaagttcggtgggttcttcgaaaattaattgattgagaagcgctcatggtagacctactcttcttgcagctgcgtaaggtgccgaccaaggaagatgaggcgaccacaacaacgtccgcgatcaaacaacaaatcaagcgacgcatcagtttcagtggcaagaagtccgtgaggtacgtacagtagatatatgcgatgtacaacgctcacccgccctccacatagggaattcgtaaacaccaaggagaccaacaactgggacgactcgtacgaggtgtcggaacaccatgctgaggacagctcgggatcgaagtgctgcagcacaggatcagcatcagtagcgagggtttccgaacatgccgacaaggagaacattcccctgcccagccactgcgagcgggaacatgtcgatctgtccgtgaatctgcaggccagcgtggatttcaccctgctgccctgcgaaatgatggacaaatcgaggaagacatcctca

SEQ ID NO: 28934 - DNA, 897 bp, DROSOPHILA
aaacggtcacactcgcccgagcatagcagatttggagaaaaaaacaacttgcaaaaactacgaaaagtcggcttcagaggcatgcacagcacattggaggacgtgcagctggagggcatggagatcaagatcctgccggccctgcaggataactatatgtatctgattgtagacacgaagacgcgcgaggcggccgtggtggatcccgtggagccggagctggtcattaagacggtgcaggagcagcagctgaccctcagcaaggtgctgaccacgcaccatcactgggaccacgccggtggcaatgaaaagctgctcaagctgtgggagaaggagctggacgtgtatggcggcgatgaccgcatcggggcattgaacaaaaaggttcagcaggacgacaccttcaccattggtggtctgcatgtcaagtgcttgtccacgccgtgccacactaccggccacatctgctaccacatcaccgcgcagcagggcagcggcgagggagccgtcttcaccggcgacaccctcttccagggcggatgcggccgcttcttcgagggcactcccgaggaaatgtacgaggcgctgtgcacaaagctctccgccttgccggacgccacaaaggtgttctgtggccacgagtacacgctgcagaacatgagcttcgcccgtcacgtcgagcccgacaacgaggtcatccagcagaggatcgagtgggccaagcaccggcgcgcctcccaggatcccactgtgccctccaccattggcgaggagaagtcctggaacccctttatgcgcgttcacgaagccaccgtgcagaagcacgctggcggagccaccgatcccgtcgtcaccatgggcaagctgcgcaaggaaaaggacaccttcaaagcctga

SEQ ID NO: 28935 - protein, 271 aa, DROSOPHILA
MHSTLEDVQLEGMEIKILPALQDNYMYLIVDTKTREAAVVDPVEPELVIKTVQEQQLTLSKVLTTHHHWDHAGGNEKLLKLWEKELDVYGGDDRIGALNKKVQQDDTFTIGGLHVKCLSTPCHTTGHICYHITAQQGSGEGAVFTGDTLFQGGCGRFFEGTPEEMYEALCTKLSALPDATKVFCGHEYTLQNMSFARHVEPDNEVIQQRIEWAKHRRASQDPTVPSTIGEEKSWNPFMRVHEATVQKHAGGATDPVVTMGKLRKEKDTFKA

SEQ ID NO: 28936 - DNA, 19385 bp, DROSOPHILA
gcctttgtgtaattattgaaccagttgtgggtctttatccggtctccgacggctggacaggatccagtgccatcaggattaccgcagggcaccagccatacaaaggatacgacggcgaggaagcacaggagcaggctgcctatgaaacagcatttccttgccggtgacatgggggttcttttggacaaatcctcgccggtctgattatggtcccccaagatggctacattgtctgcattcgcatcgaaatcactgttgaagtgggacaactccgatcccactccaccattatcgctcaacatgacggaacggaaagtattctgcatattggtagcgtagctactgccctccagttggaatttctgggtactcccggaaggttttcgagtcacaatcctggtggccgtgggagatgctctcgtatgtggtgatttcagggctagagtgttcggcgggatgcgtatcctttgggcttggagctgctccggcggactgggctgatgagcttgcttaagtttctgttgcaatttttgtcgatgattggcggcgttgtggatctcaatttcctcgtcggattcagaatcgctcattgcctgacttagtggagcatagatgccctggtggccagcggggggcaataattcggagtgcagcattttagctgtcaaaaacagagaacaagtccggaaaaatcaataccaaccggacaaaaccaatggtaaatagtccgaaaaagagggaaatcccaagtaaacccacctccgttgattggctcaaacacgctttgacatctaacatccacattgctactgcttttatctttattggattaggcgaaacattaattccaacgaacgaaaacaccctagaaaaagctcttcttaccgcaatttaaattcggtcgattgttatgcacaaaagatgttatcgataagcagtgttgcgcaaagtgaaacctatcgatatgaacgtgaccatatcagacgctcaccactgcatgcagcccaaaaaaaacaacaacgtttgacgtgcgtgaaaattggttaagttttatgaaaataacttagttaactgactttccgacagccatcgatcaatccatatgctgcgggggagtgcggggctaagggcattaatcattaggacattgcaaagaggtccggaaacgtaaattttgtcaagtgaaaacggggttgtgctgtgtgtgtggaaaacggaacaaaacggtgccaaaaacgcaaggaaaagctgcgaaagcggtgcacagcaaacgggttgataaagcagcaggcttagatttaaattatcagtgcttttaaccgatttgccagcgaaacaataaccgacattcaataaccacccacacaaacgtattgtgtacataatatatacatccatacctacatacgtatattttgcgtagtgcggcgcttgaaagctgtttccccatcaccatatcatcactgccattcattgcaaacccactctggaatccatcccacctccaccgtaccacatgtcctacatgatggccaaaacgctggaggagcagagcctgcgggagtgcgaacactacatccagacgcatgggatccagcgagtcctcaaggactgcatcgtccagctgtgcgtctgcagacccgagaatcccgtgcagttcctgcgacagtactttcagaaactcgagagggtgagtccaaaaccaaaattataaataataccatatatattggtagataaaatatgggtagaaatttgatcagacataaaacctttatttctaaacagtacaaccgcttatcgttgccttgaggatcaatgcttgggccttcctgtgttatgtccttggtttatcagatccgtatgatcgatttcttaatttcctggttcactggaggttcctcaagttcatagattctagcaacgcaagttgtttacatcatttgggaaattttgactggttcctgatcaataaaaatggccgaaaagtggtgtaggaaagggtgtggaagatgaaacctccgattacatcgagcacttgggcttggagctcttgggcttaagacaccttggctttgccttcgccttgccgcattccatcttcttcctggggcggggacatgccttccggggtcgggcgcccttgggcttcggtttgccgcaactgcgacgttgcttcgaggttttcgcccgtggtttggggcaactcttccgcaccctgggcttggaacacttgttctcctttcttggagtgcagctattggagccaccggcaccgaagaaagtgtctgcgcagccacttatttcagagtgcattctgtgctcgccctcactagaacgctgaagactgctcacactgttgggctctacatgaaaagtgtccaatggttcctgcggaagtgcattacgattgcatacatgtgcatttcgtttgtattcgacacctaacttaccgcagaatactggcatcgatgacggaatgacatttcgttccatcgggtttcagcagcccgtcttatctcgttattcgagtaatattctccgtagcgcttcttaaagtccctcagaaaattaacaaagccagacgatgaggcgtattcgtcctctgccctattgatatcttcttcaatgtcggaggcgtcggaattaacatattcaattgattttttataggttttcactgattttgttactgccacctccggcttgctatccttttgtttcagattactcattttgcaaccaattcttgctcgacagaaattttcacaaacaaatttgttactcagaattatacaaaaaaaaattatatatgtataaaaaactgtactcaattttatcgaaatattttagttgttcctcgttcaaaggtagtgtactaactgtttgtatgctggcttcagcgtggagacctggaaattggatttgaatgaaggctcaattctactatgatcaagaaaaagttccttttttcaaaccaagttggctgttttcaaagtacatttcgcagatcggcgccatatttccatggttatttttgtatactatattcgttcaagatattgtaggagaaaatgtttaatgtttcttgatcagtatcagtcgagctggccatattcgtccgtccgtgtgtcttgaaaaaggttttaatattctgtttgcaatccgactagctgagtaacgcgtatctgatattcacgaaatagaatagcgtacttccttgttttcaatgaaatgaaatgaacaaatattttacaaaagcaatactaaatgttatattataatctgaacaaaatatgtaagaaataccagaaatgtcgttggtgagggaaggtgtttaaattatcctgtgcgactacgttcctttccggggtttcaaccacttggtaagcaacaagcggcattttgctggttaatgctgccgcttaaacgaaaatcaatacaacttgcggtctattttcgagcggattgttaaaaaaaaaacccatccataggtggatttcccagcacggatgctttattttcggcttcctgcttcggagaactgtattccctctgttcattgtgaagctttaaagtttattttgtgagacaggctgcagcaaaagcttgcaatgctgcaatgtaaatagagcagcgcacctgtggaggtcctttccacatcgtcctgttccccctctcacttgccaagcgactttccttacccctttttctcccaactttgattttgagtacgcctgtgtgtgtgcgccggactctctggggcaagttgcctgttgaatgccggacccgctgtcagttggattagcatcctgacgccgtgcagaagcatcctgcttccacctagttcactccgttcgtttgctttttatttgtttgcctccgcgcgccatgggcaaccagttgagtgtgaacagcatccaggatgcggtcatcgatcgcttccgctcggtggctttgaccaccgatgccaacggcgccatgcgcatccgttcgttttcggagggcgtggtggccaccacccaccatcatcatcagcatcagcagaatcagcagcagagtccccattgcagtggacgcggcggacgcatcctgcgcgaaagtagcatcgatggcggggtggccatgttcgatgctctgctccgcgatgatcacgaacatcggctgagcttggatgcagtgcatcgcatgcggcatgttcgcacctcctgcaccacaattcccgaggaggatgccgtcagcgatcgcagcctgcagattcatctctccactctggcccgcgaacgtgaacaggaacttgagcttgagcgccagcgggaacgcgaagtaagttggaaagtcggaaaagtttccaatttccggaaaacagtaggaaatcactaggaatttgtgctgaaaagcttttggcggaaaaaagatttaaagtgtgggagtgtgcgcatactagaaagctttgaatcgtttgaaattggtgtcttgttgattcgatttgtgactacaaatcacgatgtcgttagttctaacacaaataaaaacatgcaaaaaaatgtttaccttattccgcgagcacctaataccctacttagaatataaaaatttaataaaatatgaaaaagtttgctatgttttacgttaaggccttttaattctttcaaaatatctttcgtatctgaagaaaaagaacgaacaggaagaaaatgttcacattttatttaaacattataaatttattttttgcaaaaaggtaaatggaaaggggttaatttttgggatacagtagaatatagtaacctaaactatatactaatttaaagaaagtgcatttcataatgccccacgagctgctttttgcgacaaaatgtcgagtttgcacttgaaactcgaagggaattctaacgaaatcaaagcgctcccttcgctttccctttagcacttctggcccttttctcccgtaaaagcttttccctttgccaggacttgcgtcacaagtgcgagtgtatgtgtgtgaggtggtgggcgggtgtgcgaaaaactttactttttggccagtcgtatttgtatgtatatatttgtgtatatatagaaaggttgccttcgctgggcgtgttggtgaaggtcatcctgtcgtcgtcgagattgtgtttgtgtctggctgctagagtttgctttcgtcctttcgtttgtctcagtcactttttggccaccgtcagttgcccatcgttgttcccaattttagttttttcgccaacttaactgctcaatttactagttaccattcaccttttgcggtcgttacttttcgactttcttgcctgattgatggccacgcgaattccgctgctccgatcatcgaattgtccggtttaacggtcgtgttaatgccgcttttacggctgtcatcgctccgtccggcgctgtttacgccggcttctgattaacagcggaatcgtgccaaaaactacgccggacactttgtccccagtgtccgccataaagtacagacaaacaacaatcaattgtgttggccaaacgaggttggaaaagtgccaaagcggaagtgacaggaactcgaccagcgaaatggtgggtaaaattcgaagtgttaaatacggttaacttggtaaatatttcggaaagaattggtttcaatagcgtttttatagtgaggaagagaaagggtcccattgcattaacgcttaagaatccttaatctttaacattcaagtattcattcttcttccgttccttcatatttctatattatcccattgaaaggtatacaattctcatttttagatatttattagaactcaaagttgttaatagtaatattactttccgattatcgaattgccatcaaggtataactggatacatttttcttccaagctatataaatagtctccttgaggaaaaacaaattgacaacatttttttttaatgaaaatcaacaattttaaatgaaatcaacactcgtattctatccaatctgtttgtttccttccagaacgcaaagcatttaacatacaattccaatgaaaaatttccccgaaatatggcctcgaattatgctctgtttacttgattaaattgttattttactaccttttatttcctttttatgcactcgcatcgcattaaaacgatttctgtgatatttttaagtgggtccgatgaaagcaatttatgagctcaaagaagctggggtcggaaaaatcgaatttttgaaatttgaaagctggaatcgtttgcccattttttgcccatgtttgcccaccaattagttttttttgcccacgtccagtttttgagatatgaattttcgaaaaagttcgaaaattttcgaaaatcaaaaatttcgcttttttcaaaatttttttttttaaatcgcaataacatcgtttgcccacgtttgcccaccctttagaattttgaaaaaatttatactttagaaaatataaggcttttaagtttacctcggtctaatcagagagtaaatcgtttgcccatctcttaaaaccaaatattatcaacaaaaaaggtttgcccaaccattattattagtttttatcggttgcccaccctttaaaaaacctttaacaaaaattttttttcgattgcccacatttaaaatacacccaatttcgttagcccacctctttaaaataaaaatttccaaaaaaaacgtttgcccaccatttaaaactaaataatttcgtttgcccatccttcaaaattcatttttaacgtttgcccaccctttaaaaataaattatttcggtttgcccaccctttaaaatttgtttttttcgtttgcccactcttaaaactaaataatttcgattgcccaccttttaaaactaaataatttcgtttgcccatcctttaaaaataaattatttcgtttgcccaccctttaaaatttgtttttttcgtttgcccactcttaaaactaaataatttcgattgcccaccttttaaaagtaaataatttcgtttgcccatcctttaaaattcatttttaacgtttgcccaccctttaaaaataatattatttcgtttgcccaccctttaaaatttgtttttttcgtttgcccactcttaaaactaaataatttcgattgcccaccttttaaaactaaataatttcgtttgcccatcctttaaaattcatttttaacgtttgcccaccctttaaaaataaattatttcgtttgcccaccctttatgatagggtctaggctatttaaagttaaattggcactagtatccagctgttgaattccacatcgttctttaaccacagttatcatgttattcctattgattctggcatagaaattaagcgtcttcgcgctgatcgctcctttcaattggttgcttatatccatccaaactttatcgcttcttggcttaagagctccagtctccgtaaaaatattcgcgcagcaaaatgcatccactaaggtgtgaccatcgacttgcggtttggccggcatcctgacagtaacacttattttttatggagtaaataaaaaaaaactattttgcactgatttacacgttttacactgttgtttacactgtaaatgtataaaggtatgcctaaaggaaaaacgcgttgtataaaaataaaagcaagaaccgaataatatggaaattttgcaagtctttaaaaagactgtcaacaaaattcacaaggattcaaataaatttaacacaatcactcagatttcttaagttcgtgcttagcaactttcactttctttgaaaaacaaaacaactttaacttttccagcactgggtaagcgtagttaaaatcgcgcacaactttttcacataaaaaatattttaattatgagttccggatttatcttttacacctaatatgagtatcaaggaggagagcgattttcaaataccgacaagtgttttagattttatagaggattctgacctgccatgaaaaacccattcataaaaaatttaacactttgtcacaggtaaaaaattggaccctatcataaagtgaggtttgaaaattatgtaattacctggtaaactgtaaattacaagattggcaatcggaaccaatttttggtctatataaacccagaaacacctgtgcgtctgcacgtgttatgtaggcagatcctaaaactaggaaagtggcacgtgtttatatggtgggcaatagaatttatttattcttaagattttaggatgggcaaacgaaattatttagttttaaaaggtgggcaatcgaaattatttagttttaagagtgggcaaacgaaaaaaacaaattttaaagggtgggcaaacgaaataatttatttttaaaggatgggcaaacgaaattatttagttttaaaaggtgggcaatcgaaattatttagttttaagagtgggcaaacgaaaaaaacaaattttaaagggtgggctaacgaaataatttatttttaaagggtgggcaaacgttaaaaatgaattttgaaggatgggcaaacgaaattatttagttttaaatggtgggcaaacgttttttttggaaatttttattttaaagaggtgggctaacgaaattgggtgtattttaaatgtgggcaatcgaaaaaaaatttttgttaaaggttttttaaagggtgggcaaacgataaaaactaataataatggttgggcaaaccttttttgttgataatatttggttttaagagatgggcaaacgatttactctctgattagaccgaggtaaacttaaaagccttatattttctaaagtataaattttttcaaaattctaaagggtgggcaaacgtgggcaaacgatgttattgcgatttaaaaaaaaaaattttgaaaaaagcgaaatttttgattttcgaaaattttcgaactttttcgaaaattcatatctcaaaaactggacgtgggcaaaaaaaactaattggtgggcaaacatgggcaaaaaatgggcaaacgattccagctttcaaatttcaaaaattcgatttttccgaccccagcttctttgagctcaatttatgattagtattatgtttggtgctctggatatcgaaatttggcacaaaagctttgcttattttggcactgccatcgaactttgttaataattgagtagcggaaaggtaatataaccaccgctccaggaaccttgctccccctcctcacccctctgctgctctggtttcgcataaataaattatcgttaatttaacgcttgagttgggggcggcatttatcgggtatccaaaagttgtatgtaaataatacgaacaaagaaaggtatactacacgtataaagaataccttttggattggggaaaagtggttggccaaacgcgcatccgtatctgccggatgtgtcgacctttttgtttctgtatgtgtgtgtgtgccgatccattaggcggcttatgagcgcagctccatccgagtgtccatgaataatttggccaataaagaagaaaaacgctttcccaggcgcaacagtttgcaaattataaatttttcggtcaccttttctcatttgccctgggcaaaaaacaaacctgaaaacctgacgtcactgcgtaatattgaaggggattcagctgtcaatttgctggatggctgctcgtttcggtttcccttggcagctgtgacgacgattgttttgtgtccttttccgcaggacattggctggccatcaagtgggcagatggataaccgagaatcgatggcggtataaatacgccttttgtgtgtccccaaaaataatgtttatgcaggccaacgccgacgaaggttttcccagaacaactggtggattcggaaagagtaaaggaccagaggtaacattttccagggggcgtgccaaaacaaaaagttcactgaattggaaatttcgctgaagcaactttcgtggcgccggaggttgggcgaaaaagcaggttgcagctatgtgggaaaattcgaaacgcgaaaagcacatgcgagtgcgagcgagtaggattactcctgagtcaagtagggcgcaaaattttaattaattcgattataaaacgcagtcacatatacaaaaacgaaaaccggcggccaggaagagagcagacaaaaagcttttccgcattttagtgcacccagtgccacccgcatcatgccgctcacatgcagaatggtggaggcaccctcaagtccatggaaactgtgcacgttgacaaagtgaatccaagtgtgaagcgatagaaagttatggccaatgttttgtttggcccgcatttaatgagttcttgggtgcttgtggctcttcaaggaatttaaagtgacaacgagccacaacggcaaaaggaaagggaaaaagagagaattttaaatgtccccattatacataattaatttcttcagagcgaatatttacggtaaagtacagtgactcttatttataaacatgcacattctaaaattaaaagggctgagaaaatagataaaatacctaaaaagtaagagcgatattgtagtgataattacaacaatcttgaaaaggacctcttttgcgctagaagtaggttatatccttatgtgataattaactgaatatttctaatattttacactcaatgtaaaatctgtaaattggcttatgacaaacgtgaatttccccacagagcaaagcaacactcagtgggaaatcaagtgtcacgtagcggtcttcctgatagacattttaatttgtaagacagctaagtagaagaatatacatatattctgactcacccgagagatgcaatttgaaatgacacgaacaacacgagaggaggaatcggctttcccacaatgccaattgtcgtcggcattagactctcttgagaggcttttcgcctccaggcgatgcacaaattggcatacttaacctgtcccgtgccaactgcattgcctcaaggttccgcccagaaccacccactcgaaatgcaactgtcacagtgagaatcccagctaggcgacttcgagggttctcgcggccaccttggacaccttgagttgtcacttacgagagcattgcatccatggcttcaagtgactaaatctgtgccctcgcctttgggcgttgcgtatacgccatgtgtgactacagaaatgaacaggctctcatccatatcataattgttagtgtaattattattgacaatttatcaaagtgagtgcaaaggaatttgcatgtttatgggctcgcgaaactataaatcgctggcgtaacaaatcaaatttgtttgcggctgctaccttgagcacatacaataacattaatatataaaaccgcctacaatcttttggatttctctttgttttccacttctcggttttttgcttgtcttcttggcactggcgttcaaattgatttgttttgtacactgagagaagggtgagaaatacgttcagttctcccattttgctcaatattttggcaaatatctctcttggacacgttgcttgtagccatcattagctgctcttttgttgtttgtttttgccgagtatgatttcaatttggcgggttgttcttttcattatttctgtgggtttgtggcgacttttactttcctctacgccgcttgtgattggtagctttgtagctgcactgggagaaatgtcgtacgttttaaagatatattgaagaaaaagtataatgaattaatacaattattgttcttaaaataacatgactcgtgtgctaataggaattttcaggggacatttttgaatctccataaacaagcacgcataaatctcagtgcacattttaattcgaaatttttaagttaatttttttctgttcaatgttttattggcattgaaattgtgcaatgtcattttcggtcttaattaatcctcttattgttgctgattacacctatctctttccatttttgcttggcttagcattgttttttgggctttcctcctcttatatgtacatgtagaaagaaatgtggtttcatgaaatttgtaaaaatttgaacaatatattaaggaaatgttcggagaggcttactcgcaggagtagtaaaaatatttttgaatattttaaagttattggaatagaactctatgaagtcttaggattgtttgcttggaaaactaaaactttcaaatggagtcgaaaactttataattgagtcgaaattatataattttcatttcattcaagtgattttcatcacttattgttctctgtgtacttggtcaccaaatccactggccattgcatcgtggatctttcgactgctttgaaatctaccacaaaccgcaaaatggtcggcaattcaactgccctacacggcataacggtatcgcccacccacccagcgcacatagatacaaatacgcaccgtctcacacacacatctgaaggcaactagcgtggaaagatgaagccgctgcctcggctgacgtcgacgcaacgtcgactgcgcagcgaacgtcgattgtcgcaagttgaacgcgaatttcgaatttagttttcagtttgtgtcgcgcctccgttttgtaaatacgcgaaaaaaagacattcgccaagtcgaacagcaataatagcaagaagagctcacagcaactaaataattaaaacggaaacagcgggtagacaaacaaaaacgagaaccatatgaactagaattgaattaattaagcaattacaaatggcaagaaaaacagcaaaagcagcaaaaaaaaaaaaaaaaaacgcagtcagcacagcaagaaggaacaaagtggaaacattaatttggatactagctactagcgggaaaattaaatcaaatatttatgtgtggaacgcgggggcctagtgacgcacgatctcataaatatatttttaggatttcttttttatataattttatattttattgccatgcccgcacatttatgccaattaaattcgcggcgatttcttttaatagccccaatcgcgttgatattaatcatacgcagtggagaccaatcttaacaataattgattctttgatattcaagggctgggtttgtttcaatttttctgtgatatgaaacaacaattttttatgtttttataaattccagtagtaatcatacgcactggggaccccgattctttactcggccactttgtatcacgcatttttaagatgttacttaatatatagcgctatttgatgcttttcgtgaggatttgtaaaaaatgattattgagctgttttagtgatttacaatatttttagttcaaaacggcacacgcaatgaggaccgattatgtgctcttagctcttacattcctttaatttgtttacttatgcgaaagtcagctttttggctacccaaaagtatttttaattttaagaaaattgtttcagagctgttcggggcatttttgaatatttatttttataaaactttgacattggatttgtcattgctgctggcggctgtttttgctcgcctgtccacgccgcgtatacgtaatatctgtataattctgcccgcacttcgcgcttttgtctttcttgtcagcaaaacatcgttattacaaatccgagagtgaaaatctccaagatcttccacagaaatcccacgtcgcgacgtgcgttttccgaatactacatctactactactatttgttgtttgtttttctgtgtccatattagaagcgaagcgttttcacaatttgttgcacataagtagcacaagcaccaacacagggataactaaagaaccaaaactcacacacacgcacactctcacaccgacaccgacaccaacaccgatacacaggagtatacaagcacagaaaaatgcctaaggtttgccataaataaatgagtctgttagtggctgtcatagtttgtagaccataagtctagtttgtacttgtattcaataagcgctcattcatatacgcaagcggaaagtaacaaaaacaaaaagattaaaaaaaacacaccctcatagaggtaaaaatttagaattcggttacacaattgtatgcatattacacttttgcttttcccattttcccgtttttttctgtggactgtccccttccgaagtcggcgcctccgtcgtttattaatttatgcacacacatggatgcaataataccactatgtccacaattgcaagcggcgaccattgtactttatgcatacgtagatgatgcacgatggctatatgttctgggtcctacctcacagcatgtggacccatttgacgcctcatcagtgtttcattgtcgccgttgtaatccgacttctttttccccactcgaaggtatcttcttcggctaagagccgtttgttaaagcagaaagctttttgtgtactttattgagtatgggattaaattagaaaataaagtactgcttatcaaccccttaagcgacacaattcaactattttgcttagaaatatataaacgcgttgtaatttacaaaatctggaattatgtagaatgagctatttacataagttacagtaaacgggtagattaggtttcttaaaaagtattctacaggtaaaattgatcgttttgcatgtggctttgtatgtctgtctgtgatctcgggaacccttttctgttgatatttttaaaaaattttaagtaacgggtatgtgatagtcgaggaaatcgactaaagcatttctctcttgtttcttgtagctctgttggcagccgtacaagattgttaaacataattgatttggtaataggtgaaaatgtgtggtaattactaattagtcatcgttacccaaccttcaccgcatcttggcccacccttcacacatggccccaccctttcgccaacgattgtcgtcatctaatcaaaagcagcatttgtcatgattcctataaatgttgtttgctgttttattagcgagctggttgataaggctgactggtgacaagactccactttaaagtcagagcctatgtacgtgaaaatcagtgaacaccatccaatcaggcggggccagaccgcaaagtcaacccatccgggcggggattggattcaatttgcaatttgcgaaatcgatttccgtttaatatgtcacagggaacgacgccaaaagctgaaagctgaagcagcgcagctccgccccgggaaaatcgcgagcaatatcggagggtccaagggtggaacagtgggttgacttgtgggctgtttgttgggtgctcttcatggccacgtccccatggccatggccagggccagggctacaagtcggctgggcgccgactccgcgtctgcacaaaggtcacggtcaaatcgctggcacacgcgtcttccagttgccgggttctggtctctgggttctctgttctcggcgctgtcccttgcaaaatggccataaacaacgttgcactatggcgaatgctaaggaaggggaatgttttgatactgccacccagtaagctgactgcataataaactaaagtgagccatttgcatactgaactttggtacgttgcgaataatttattcaactattcagtcaatggactatgttatagtataatttttggttaagacaccaagtcctacatataatgagtttagaaaagagaaagctattaatagaaatagtaataattatgagtatctttattaaactattacggtataaaaacaatgctcatagaacttccgtgtagtttaaagcattcggtttagtttaagctttgctccatctaattaaaaggcatttgtatgcctaacgttgatgattctgggcggcagcactcgattatcttctgttttgacacctgacttcaggttccttcagctgactggcagccaaccaagaaatttgccattttatggaggcgacattcgattcggaggtgaattcattgagtagttcgttatcgtcacctacaatccatgatcggctgcaaattgcttagctcaccaattaattgcggttccctgcttttattttccatatttgtttacacttctcatgcgtacttcatgcgatttttggcttggtttgtttagacaataaaaattaatgagcagcgtcgttcatttgaagtttttcgcgggtcccgacgatgtttatggacggcgtaaaaccatttcgttcatgagtttgcggtcggatggagaaatcaaatcaagtgcaattacttggatgttagatgcaaatactttgatatggctaggaaaacatgttgattgttaggattgccggaacagagatttatttatcagatctggaataaaataaataagaaatgtattgcttgtaaaaatgagttgtatagcgaatcatgttataaactaagctcaaaataccatctgttcattcaatatattgtaacggaccagcctatttataggacaccgatcctaacgcatttcaaatgcagccataactgccaggggcggccacttgcagtcacaagtgagtgacaatttaatgcaacttaatcagcatctctggccagctggccattttgcttgactggtttgacgtcactatgggaaatggacagcaattggacagccaggccgtgcagctttggtgcgcactttggaaatttgtttagggacagggactcgagacaccggaatgcgcagcaagcaagagtcaggatgcaaagctcttcagctactccggttggctcttttgactgccgacgcagtgatggagcttatgagttacggatgtgggcgggtggagcttttccgggcgcgtctccggacaatatgcacaatgctgcagagaacaaccactggttgcagtttccaaacatccatcgagagtgacgcacattaatctggcaattggtcgctaacgcacttgggcagttgactcctgcagcagataattaaatttgcaccacctaagttccataaagtgagagagtttgagggaatctatagaaccttttttattctgcaattattagacctgctaagtccgttcttatactaatattaaacttaaatctagccagatactctgcaatatcgtgcaacatttccagcatggcctttatctttattcagataatgttcaacaaatatgataatgaatcgagacttatgtgcgataaagcaaacccaaaatactaacgatattgttattcatatctttggcaggaacaagtcaaactggatgccagtagacaggtaatcagccccgacgactgcgaagatctcagcccgatgccacaaacagctgctccaccggttcgcaggcgaggcggaatctccgccgaacccgtaaccgaagaggatgccaccaactatgttaagaaggtggtgcccaaggactacaagacgatgaatgccctgtccaaggcgattgccaagaacgtcctgttcgctcacttggacgagagcgagagatccgacatatttgatgccatgttccctgtgaatcacatcgccggcgagaatatcatccagcagggcgatgaaggcgacaacttctacgtgattgatgtgggagaggtcgatgtaagtatatttatttttcttgctatgacctttgaattgggtttgcatcattatgaatatgttcacatcttcgccaggttttcgtcaactccgaactagtgaccaccatcagcgagggcggcagctttggtgaactggccctcatctatggcactcctcgcgccgccaccgtgcgcgccaaaaccgatgtgaagctgtggggaatcgaccgcgactcctaccgccgcattctgatgggctcgaccatccgcaagcgcaagatgtacgaggagttcttatcgcgcgtgtccattctggagagcttggacaaatgggagcgcctcacagtggccgattccctggagacgtgctccttcgatgacggtgagacgattgtcaagcagggagcagctggcgatgacttctacatcatcctcgagggctgtgcggtggtgctgcagcagcgttctgaggtgagtgaccgcgatcagacaccatgggacacctaaaaagagacactctaatcaactcgtttatctaatcagcagggcgaggatcccgccgaggtgggccgtctgggtagcagcgattactttggcgagattgctctgcttttggaccgaccacgtgcagcgactgttgtagctcgtgggccgctcaaatgcgtcaaactggaccgggcgaggtaagtgcagtggcttgagtgctaagacaaataggcaggtgtatgttaatgaccttaagcaattataaaatcaattgtctccagtaacttctccagtagctaacctgtaaattttttttggctttgttgcagatttgaacgcgtgttgggaccctgcgccgacatactcaaacgcaacatcacgcaatacaacagtttcgtatcgttgtccgtttaagaccgcaacaacgacaacaaccactacagcagataaacaacaaagagcagcagcagcaaagaaagcaactacaaccgacaaaacaaacagaaacaacaacgcagcgaacgtgagaaaccaacaggaagacgatgggaactagttggatagatatatagataagaaaaacaaacgctcagcagcataaacatgaagtcgtaacttatataagtgtgtaaaattaattgtcacagccatttgattctcgattctgtcggagattcagattcagattcagagagcacgcgggctgagggctaaacaaatattaattatccgattctgtatgttgtgctgaagttatataattgtgtatgtgtgtgtctctgtgcaaaggttgcgtcggcatgttccacaccccgcgacccccgatatcggagatagctttccccggatacatctatatacttctctcaacttcttttaaattctccgggtctttcgaaaaagagagcccatttgtataatctatgggacatgctgcctcctcaaaaacgtttcattaaatatccaacagacatctgaatgtttttaaaaaaagaaataaacaagatgaatatatgtgtaataacttaaatcataaaaggctacacacacaggcacaaaacacagacacaccaactcacacactctcatacgaggcatgaagtcatggaaatgataggacttgaatgaaacaatggtattttgcttgtatgattcgttgttttttgtctagaacaaaagcacaacggcagcaattaattaaccattttaattttaattttagtaaattattcttacaagtaaacgcgtaccacgtgaagtcagcgagcgtaaacttttcaattaaacattaaaatcagtgaaaacttcatgattttttaacatgtttcttgtttcttcatcgaaaggtgttttgtaatcttaacatagttttatgattttttattaactaatttaagcttgagcacagcgaatg

SEQ ID NO: 28937 - DNA, 1650 bp, DROSOPHILA
cagcccaaaaaaaacaacaacgtttgacgtgcgtgaaaattggttaagttttatgaaaataacttagttaactgactttccgacagccatcgatcaatccatatgctgcgggggagtgcggggctaagggcattaatcattaggacattgcaaagaggtccggaaacgtaaattttgtcaagtgaaaacggggttgtgctgtgtgtgtggaaaacggaacaaaacggtgccaaaaacgcaaggaaaagctgcgaaagcggtgcacagcaaacgggttgataaagcagcaggcttagatttaaattatcagtgcttttaaccgatttgccagcgaaacaataaccgacattcaataaccacccacacaaacgtattgtgtacataatatatacatccatacctacatacgtatattttgcgtagtgcggcgcttgaaagctgtttccccatcaccatatcatcactgccattcattgcaaacccactctggaatccatcccacctccaccgtaccacatgtcctacatgatggccaaaacgctggaggagcagagcctgcgggagtgcgaacactacatccagacgcatgggatccagcgagtcctcaaggactgcatcgtccagctgtgcgtctgcagacccgagaatcccgtgcagttcctgcgacagtactttcagaaactcgagagggaacaagtcaaactggatgccagtagacaggtaatcagccccgacgactgcgaagatctcagcccgatgccacaaacagctgctccaccggttcgcaggcgaggcggaatctccgccgaacccgtaaccgaagaggatgccaccaactatgttaagaaggtggtgcccaaggactacaagacgatgaatgccctgtccaaggcgattgccaagaacgtcctgttcgctcacttggacgagagcgagagatccgacatatttgatgccatgttccctgtgaatcacatcgccggcgagaatatcatccagcagggcgatgaaggcgacaacttctacgtgattgatgtgggagaggtcgatgttttcgtcaactccgaactagtgaccaccatcagcgagggcggcagctttggtgaactggccctcatctatggcactcctcgcgccgccaccgtgcgcgccaaaaccgatgtgaagctgtggggaatcgaccgcgactcctaccgccgcattctgatgggctcgaccatccgcaagcgcaagatgtacgaggagttcttatcgcgcgtgtccattctggagagcttggacaaatgggagcgcctcacagtggccgattccctggagacgtgctccttcgatgacggtgagacgattgtcaagcagggagcagctggcgatgacttctacatcatcctcgagggctgtgcggtggtgctgcagcagcgttctgagcagggcgaggatcccgccgaggtgggccgtctgggtagcagcgattactttggcgagattgctctgcttttggaccgaccacgtgcagcgactgttgtagctcgtgggccgctcaaatgcgtcaaactggaccgggcgagatttgaacgcgtgttgggaccctgcgccgacatactcaaacgcaacatcacgcaatacaacagtttcgtatcgttgtccgtttaa

SEQ ID NO: 28938 - protein, 377 aa, DROSOPHILA
MSYMMAKTLEEQSLRECEHYIQTHGIQRVLKDCIVQLCVCRPENPVQFLRQYFQKLEREQVKLDASRQVISPDDCEDLSPMPQTAAPPVRRRGGISAEPVTEEDATNYVKKVVPKDYKTMNALSKAIAKNVLFAHLDESERSDIFDAMFPVNHIAGENIIQQGDEGDNFYVIDVGEVDVFVNSELVTTISEGGSFGELALIYGTPRAATVRAKTDVKLWGIDRDSYRRILMGSTIRKRKMYEEFLSRVSILESLDKWERLTVADSLETCSFDDGETIVKQGAAGDDFYIILEGCAVVLQQRSEQGEDPAEVGRLGSSDYFGEIALLLDRPRAATVVARGPLKCVKLDRARFERVLGPCADILKRNITQYNSFVSLSV

SEQ ID NO: 28939 - DNA, 4287 bp, DROSOPHILA
caacgcagagacggctgcgcaggcgctgctgcttttgctggatctgccggagcatgctctgctggagccggtggtcgagaatctgctggagtgcaccaacaagtcgcaggctatggactacatttcgctgttaagtccccccaagcgcaatgttttcatgcacctttgtatgttcctgcgcgcgggcatcgagagtcagttctatgatctgcatcaagtcggtaggtagagaagctccagcagcattgtaccaccatcgtaacgccattcctcccacacagcatccacctttggccgcattctgttgcgaagcaccgagcgtgccgcctggatggactaccacagccgatgcatacagttcatgcggctcttcatcgacaccgacgtcgaggcaatgggcaacggcaatgagggcgccggaactggaacaggctcgggatctgggacccgggcgggtctgcaggcatagtcgccgcagctgtgccgccgaatcggaagcgagcgatagatgtactactctgttgatagttacgcatagtgttaagctatttattttatttgttggtactttgttggcacttagcatttatatcttctctgttttaactgttaattgtttgtgcccgccctccgttcattccaactcggttgtccccgcctgcatcacaaatccatggagacacgcaaccagcaacgcaaagataaatgaattgtgtaaataagtaattcgtttagcacgattgtttgttagtttaaattaatgaagtgaccctcttacatccccgtttcagttgcaactgaaaataaataacaccgttacatacagtatcaatattctgaaaaatctctacattggctgttcacatatttggccacgcccgccaaaattttcaaaattaaaagacgcgctacggatttgtgagtacggatggtatcgattaaattcccaaagttatcgacagtgtaaccagatctaaagtggcgacttcagttgacggcagagacgacagcagaatgcaaaggcaacggattactcccaggatttaaatagcatagattatcgttgaaaccgctgacgacgcgcccagatgagctccatggactgcgccacgttcccaatgcatcctaaaatggacgagcaactggcccgaaccttcgtcatcaacgaggaggaggaggagaagcacattcagaaggtgcagaacgccttcctttactatgggtaattgttattgtttttgcgctgtgttctggagcacatgctccaaacggacgcttgccaaccgatcgtcgttgagggggggcggtgcggtgacagcgacatgtgcagacaagctgccgacaaactaccgtttcgtttggcgccagtgctggcggtgcaggagtaatcacgccaaatctggctagtgttttcaaatggctcaccgttccttagaagacgcatcttctaaagtatccaatagagccaaactacaactgagtgttcattaccaccattactgacatttgggtgaaaaatatctgcataccaaagatatcagattgcccatacagcgtttgtaaacactgtagtgtgtcatcactggtgataagcgtgcttgctgataatggaaatcaattaatttctcccatgcaggccatatgcgtgtcagcggctaaagcgctccatggattacctgaacagcctgtctggcgaggaccaaatcatgctagccaagtaccgagggcatctggagtgcgtgcgcacgtgcatcgatcgcaaccaggcggttatccgggaaatattgcgcgggcgtgtcctctatccgacggatgaggcgactggtgatccctcggagtttgacgagccgccgccaaatgtgcggcacggtgacatggaccaggtaattgactacatctgcggttcaatgcggaagctagacggcgctccttcatcatcccacaaatcccaatctaatagaatttatgttcctctttttactttatcttctatttttcctaccgctttgtaaatggtcagttgaatttgtccctctttatattttcaaatattagaattacttttggtaaaacaagggaagagtaatatgtatctttaaactggtcattcttgtgcttaaaaattgtttctacatgtcaatagactactcaccttacgtatagtttaatgtgcttggttatcctccaatatcttcagtttctcttttaattattgattggaactattcggtattgtttcttttccatatctgtgcacgacacccaaaccatgcatctcgcacccgctctaattcaactcgcagattgatattccattcgatgaagctgacgttgaacctctaaaaattttaaaggcccagtcgacgttgaagttgattgcgcgcgactggagcactgaaggagccttagaacgggagcaatcgtataaaccgatcatcgacagcatcgttgcgtacttcaagcacagcgatttgtgagtgactactacactaagcgtactttagtggtcttactaattaattattcatctgctttatcttaaacagcgagctgaaggatataaagatcctagtgccgggagcggggttgggacggctcacctacgagcttgcctgcttggggtactcgtgcgagggcaacgagttttcctacttcatgctgatcgcctccaattttgtcctcaacctgtgagtccagctcagtacgttgctttctaatgctgggtattgaacgtgctctgttgtctctttcggcagctgcgacaacgagaacaagtacgtgttatatccgtgggtgcaccagtatgtgaataacttaaggcgtgaggatcaggtggcccccgttcgtttcccagacgtctgcccgcttaaaaatccacccaagggccattttgaaatagcagctggcgactttctggaggtctacaagacgccgaacgcctacaactgcgtggctacgtgcttcttcatcgattgtgccaataatgttattgacttcatacgcacaatttacaagtgagttgcacacatttgaacgggtataccggcgatgttgattttaacattatcgttgcagaatcctcgtgcctggtggcatttgggtgaatctcgggccgctgctgtaccattttagcgacgtcagcgggcaaaacagcatcgagccggctttcgaggacctttgcattatcatggaaagcgtaggattcgttatcgagaaatcacgcaccggcatccgtaccaagtacgcacagaacccgtcttcaatgaaacagagcgagtaccagagtcttttctgggtctgccgcaagccggatctatttgaggagcagcggggcaaacgcaaggcctccagggagccacacgatcttattgtgcgcgaggacagcgaggaggagggggagcaacagccggaacgaaatgaaacggaagaaaaacagcaactgaaaccgctggccacagccaactgcgagactgagataaaggagcagccatcgtgatagccattgaaccaaactcaacaacacatccaaacaccacaatcaagtccaagtgcaaacccacctacagatggcatcacgaacatcttaattaccacgtcacaggcaagacagggaatcgacactgcagtgcttcgatgttatagattacactttatacctattatttactcctacacactgttatatatgccagttttaatttttcaaaggatgcaaattttaggacaatttctcgctcattatgctcatcatgctaacttaaatgggaaaagcgtcccaactaggtcaaccaaatatatcaaaagaaaatttttaaaaattaagataaaaagtttttatttgttcaattactagtggctttaaaccgatacctaccaattcgatagccttattaaagttaacgcaagttccacttgcatcagggttctcggcactcgctgccgcatacctcaccttgatatgacaaccaacatgctgtggttctccaaataatagtcaagatagttaagagggttcgagtttacgattagctttattttaagattcagttcgcgatctgctagcggttccgttatgtgtccgttcgagactgggcctcttctcccgccccgctgcttttatatccgcttcccccgttgacccctcaccctgagtgcgaccaacggcacttgttccgaatgcacacatacacaaacatgttcctagacaggccccgagtcgcctgctgacggggcccgaaaacacgagagccgagcgctggtgagtcctgacgaagatcgcaagaagag

SEQ ID NO: 28940 - DNA, 1696 bp, DROSOPHILA
gagacgacagcagaatgcaaaggcaacggattactcccaggatttaaatagcatagattatcgttgaaaccgctgacgacgcgcccagatgagctccatggactgcgccacgttcccaatgcatcctaaaatggacgagcaactggcccgaaccttcgtcatcaacgaggaggaggaggagaagcacattcagaaggtgcagaacgccttcctttactatgggccatatgcgtgtcagcggctaaagcgctccatggattacctgaacagcctgtctggcgaggaccaaatcatgctagccaagtaccgagggcatctggagtgcgtgcgcacgtgcatcgatcgcaaccaggcggttatccgggaaatattgcgcgggcgtgtcctctatccgacggatgaggcgactggtgatccctcggagtttgacgagccgccgccaaatgtgcggcacggtgacatggaccaggcccagtcgacgttgaagttgattgcgcgcgactggagcactgaaggagccttagaacgggagcaatcgtataaaccgatcatcgacagcatcgttgcgtacttcaagcacagcgatttcgagctgaaggatataaagatcctagtgccgggagcggggttgggacggctcacctacgagcttgcctgcttggggtactcgtgcgagggcaacgagttttcctacttcatgctgatcgcctccaattttgtcctcaacctctgcgacaacgagaacaagtacgtgttatatccgtgggtgcaccagtatgtgaataacttaaggcgtgaggatcaggtggcccccgttcgtttcccagacgtctgcccgcttaaaaatccacccaagggccattttgaaatagcagctggcgactttctggaggtctacaagacgccgaacgcctacaactgcgtggctacgtgcttcttcatcgattgtgccaataatgttattgacttcatacgcacaatttacaaaatcctcgtgcctggtggcatttgggtgaatctcgggccgctgctgtaccattttagcgacgtcagcgggcaaaacagcatcgagccggctttcgaggacctttgcattatcatggaaagcgtaggattcgttatcgagaaatcacgcaccggcatccgtaccaagtacgcacagaacccgtcttcaatgaaacagagcgagtaccagagtcttttctgggtctgccgcaagccggatctatttgaggagcagcggggcaaacgcaaggcctccagggagccacacgatcttattgtgcgcgaggacagcgaggaggagggggagcaacagccggaacgaaatgaaacggaagaaaaacagcaactgaaaccgctggccacagccaactgcgagactgagataaaggagcagccatcgtgatagccattgaaccaaactcaacaacacatccaaacaccacaatcaagtccaagtgcaaacccacctacagatggcatcacgaacatcttaattaccacgtcacaggcaagacagggaatcgacactgcagtgcttcgatgttatagattacactttatacctattatttactcctacacactgttatatatgccagttttaatttttcaaaggatgcaaattttaggacaatttctcgctcattatgctcatcatgctaacttaaatgggaaaagcgtcccaactagg

SEQ ID NO: 28941 - protein, 439 aa, DROSOPHILA
MSSMDCATFPMHPKMDEQLARTFVINEEEEEKHIQKVQNAFLYYGPYACQRLKRSMDYLNSLSGEDQIMLAKYRGHLECVRTCIDRNQAVIREILRGRVLYPTDEATGDPSEFDEPPPNVRHGDMDQAQSTLKLIARDWSTEGALEREQSYKPIIDSIVAYFKHSDFELKDIKILVPGAGLGRLTYELACLGYSCEGNEFSYFMLIASNFVLNLCDNENKYVLYPWVHQYVNNLRREDQVAPVRFPDVCPLKNPPKGHFEIAAGDFLEVYKTPNAYNCVATCFFIDCANNVIDFIRTIYKILVPGGIWVNLGPLLYHFSDVSGQNSIEPAFEDLCIIMESVGFVIEKSRTGIRTKYAQNPSSMKQSEYQSLFWVCRKPDLFEEQRGKRKASREPHDLIVREDSEEEGEQQPERNETEEKQQLKPLATANCETEIKEQPS

SEQ ID NO: 28942 - DNA, 21399 bp, DROSOPHILA
cgagtggggggaagtacacgtataagatacacacataaagttgcatcaagtccaaatgaaccacattatatcatgtctcacatctcacacgacaaaactagacggggaagaacaaggattccagcccatttgatcatcgttaatggatcgttcagatagagtagtatcctctatctatctatgaatcacatctaatgcaaatcttaggtacctttgttattaaacgatatgcaagatatacctaaaatcgagaacctataaaaaaagacaaaatacacactcaagcgaaaccgcataaatgtttacgacttcatatacaacaaatataaatgtatatcaaatatggtcgcgctttataaaccaaacgtatttaaaatgtattactaaatcgcaaatctttcaatggaatgtgacttttttgggtctctgccgagtaaaacaaatattaaaaaccaagcgaaggctatataaatcatataatatgatacaaaattaagaagggatccccttcccccaattgtacgcgtatttgtaaattatttgaaatgcaaaataaatgacagcctaggatggaaattatatttatttgataaattagtaaaaggagaacacaaaaaacatagttctatgtacaatggacaaaccgaaaacttttaaattgcttgaataaaaagaagaaaactatttgctgacactttgcacttggattggaattgattaacgaggtgattttcccatcattttccatcattctgagcattctgtgctgcgaaaaatgatagtgaactactaactttgccccgacgaatcgaattttaacggaattctggacagtgtggcacaacgtttcgaaaatagcgggcaaagtgaaaaatcaatcttccattggccgcatgtccgtggtggaagtccgtgctgagtgctcgcccaagatctgcacccatttcgtctggcactttgtagtttttttcttaaatcgactggccacaccgcacagcccagtaaaaaaatagttttttttttgtatccaaccaaccaactgtaaaaataagtttaaacaaagcatctactcataagtttcatttttttccgttaagtgtcaacattatttattttttaagtgtgcattcaataagaaaatgtcatcgcgaaggtaaatccaataagaaatacgacaatgttccgcacacacacgcacgcagtctcgcacacactcacacacacacacggacacacactcgcaatcacacacgcacgcacgctccgctcccaactgggctatttacatatgtataagtagatacaaaagcaaggcagagcgaaaaagaaacagaaacaaaaaacaaaactgctgagataaaaagtgcaccaaagtgttggtcgcgggggggcgccagggtggatgcagcggatccgttgcctctgcactgcttcatcctcagcctcagcctgttgcccaccgcggaagcagtgcggtaaccagtgacaattgaccgaaaacgatgcacacaccccactgtgccccactgttcgccactgtgctccactgtgcgccactgcacctgccactgatgaccacttggtatgcagggcaggaggcaccggaggctgaccacaaacgacattcgcacaatggccagtggcagctgacaacacccatatgtttgcccaccgggtaaccagctcggcgagcagcgacagtggtataaactctgacataaaccgtattccgtccactccgcagatggttccacccaacgatatctggcatcgaagctgagaaactgctgcaggagcagggattcgacggctccttcctcgcccgcctctcctcctcgaatccgggcgccttcacgctctccgtgcgccgcggcaacgaggtgacccacatcaaaatccaaaacaatggcgacttctttgatctctacggtggtaagtggctgccgttccctgccccccactcggtcacccaattcaccacagtgaatcgtcctccctttgcaggtgaaaagttcgccacactgccggaactggtacaatactacatggagaatggcgagctaaaggagaagaacggccaggccatcgaactcaagcagccgctgatctgcgccgagcccaccacggaaaggtgagtcccgatcctggtggccagtcggaatatgggatatgggaactggccttcttgagcgcttgatagatgttgtggttcttatgtaccttgatgtgtcgcgggattcggtcttatatccaagtcgattataacagaaggagaagatcctctagtcttacggctggttgcaaccttctcaggccatacaattggaatgccctccaaatgggcggactatttttttttttcacacattccaaaatggactgacgtcaacggatgcaagagattcacctaaaattgggtcaccagccaaacggccaacctgttctcatcgaattcaatgacctacattagctccattccgcattgcccaaggacgaatcgtatttgtttgctttcgggtcggattattattcatgcaccatgtttacaaacgatgttgtttgagcactcaagagtccaaacatcagtttcgagcactttgcttatcaggctttctcaaacgctatcgggtactgggtccggtactgaaactgggaactgaaatcgaaagtggtccagggccatactccgcatcccttactctccatttgcgctgctatcccaagacttttgttgctatttctacggccaacagctgtttagctgtttattaatttttgtgctaaaagtgcagttctttaacccaaaaatttatcatatgcatatatcacattggtgagatatcaattacgatctagctcagctatctcttctcgaacaactaaagtcttacttccaaactagtactccgaactaaatatgatcggtaataaatgattatttaaggaagagaataaacgtaagattgatataattagaattgtactgagaatgaaccatgtactaaatgagaatcaagcacctagctcaaccgtccagtaataaacatgatgttgttaataaccagtcgaaactgcgttagatcgatgtgtcgctgataatctggcggcggttcttgaagctttgctcttcgcagctggtctttcttcttggatacgcaactcggtttcgagcagagatgagatttgtgggtgaataatttctaattccacttaaatcgggcacccacacacacctgttgctcacgcagcacccacacgcacatccacaggcgcaggcacacgcacacgcacacgcaagcagtgaccaccatacaagcagtgcattgtctttgtcgccgttgttttactggcgttcgttttcaacccacacgcgcgaaatactgtcgatatttattgtatttcttgcttattaatatttttaagcccgaccgtctacccaagccgtcaaatattttacggctccctttttctttcttacattctttcttgtttgtcgccttgtctcctttctcaatgccgagcttgcttctgctttttgtttcgttgttttgcctcgtgcgctgcattttccgcatcccaacaggtcagtcaccttgactggccacgccccctctaaaatttgaaggcgccacgggagagcaatagaacccatcttgaatcgaaacagtagaagttcgcaattgtatctcaggaaattcgagcaatcaaatttgtttttaaaactatatgtataaaaagcaaggaagaacctaaaattatgctacgcattgaactttaaagatttcaagatcgcctttgttcgtcagatacgtttgccctaagccttctttgcccccagacctggtttcccagcccctccaccactccatacactccatccactcactcatccttggctggagctcgtgacgattttaatttgtgtattttcgattgtggtttatttttaaagcccctcgatccgagcggtggttatttttaccctaagaaggtgttgtatggcttataatcgatttgcgattcgcaaagcacaaatcgtttgattggcgatgacgtcaaacgagggatgcgatcgaaggcaatcataattacatatatgtatatttaggggttgatcatgaggatatttacatacattaagctcgagaacgtcaatcgtccaaaaagtgggtttattatggggtgtggaaagttacgcggtcagctttttataaatcaattcgtctgccttctgttgcgagcccaataagccaagctaatatgcatagaatggggaatattagttccatctatgcttggctactttacaaaatcgggaatttctattgagctggcgatgtgcgccacatgaagaaagaccctggcgaagggagagatgtgaaagatgccattggaaatgcatttgccttctgaatggcccagacattctccaacatttaccaaccaattcgaccgcttccagcaatattcccgcgacatttcaccatccgattgcatttccatttccattcccatttccaatcccaattacatttctcgacgttgatcttgacctttgatcgagtcagaactgcgattggagtgcaaccgaattgcaaatcactcgatgttatgcggttaggttgtttttgtacactgtttgtctacctgcccacttaatcgttgcaattaattgcaagataattgtaaattgctttagtttcgcgcactttcttccatacctcagtcgatctgtcaaggagtaaaacaaatctgacaatcgtcaattaagccatcgaattgtttgtgctgggcaatacttaatggatactgggtactagtgggtaatggcgtcccacctaccccacctatcccactacccagatcccacttgagccccagatccaaccccttcgggttcgcccttgcccatccgttgctctcgagtgcctcaaatgctaaatgctttcaattttcgccattaagacaagcctacaaatggtttataaattatgccgtgcacgtagctgtagctgtagctgtatctgtatgtgtatctctaccctcaacctccaatgtatccggatctgtcgctgtatctgtatctgtatctaaggcatcagcaataacaccagcggcaataaatgtctataaagagtacacttaaagaaaagtaccgtaacataaactgtttcatttgctctaagttatataggagaaaaccctatgaagtttttactcaaacgttagaaaatcagagattagaactaggcgattgaagagcctttaaaatggaagagtggctattaacggtgtactctccatctctctctctctgtgtgcacatatgtacgctttaaattggattgtgcaaaacacgcacatgtactcatccatatgcacgtatttggctgcaggtacttggccgcctgttcgcccccacttgccgccactctaacaccaatgctcggtgccctcgatcgtgccatccgtcacatactccacaagctgtagatgcgtcgaccgcgtggaattgcacccactgcatcgccatggcctgcatgtggaacggatagtccatagtccccggtcacgcagcatcatcgctagatactctgatcatgattaggtaaattaatggatctagcgcacaactgtaccacatcagaagttccaagtcaactagacctagacctagcttgtataatatctgtctaattctcgttgctgattgtactctaattgtcgacatcaaaatcaaatattaatcgatcaactgcatcgaaacagacggctgaactgtgcttccgattcgatgatcactattatcaatcaaacactgcagtcagtgcaatgcaatttatgggtaaacttcattatcgattttggaaaataaatcgaaatagattgcatagactggattgtgagcactggtcatttgcatggccagcgcatcacacctgacccaatgatgttatgcaaatcgcaactacattttatcattatcactagcaacggctagtttttgatgtgctttccctttgtaaatcccacgaagtgaattaaatttaaaacgcacgtatgtatggtatgtatgtatatgtacgccaatcgagatgatcgctcattatatttggtatcctaaactgcccagcacacgacaatttaaagctaccggcacgaaccgcaaatgcgtccgtctcgcaattaaatattcaggtaaatccctcgccaaaacatcgccaaaacaatgagccacaaagaaaacgaggaaagattcgagtcaataaatggggatgagggattgattcgacggaccgaaaatcaaagttgtggggggccaggccaacgaaccaacgaaatattccaacccaatccaaaaggaatacttttacgccgccactaagcagccgtgagtcccctgctatttgcggagctggaggtttgatttgcttacaaaaaagtgttacatggaagcactcacgtagcattccatctaatagtatgaattacgacactgatcgtaaatctcggtatatatttttggctggtggagcatggcaaaaatcgagcagtatcataaatctcggccgctatggggaagcccacctggctacaactaaaactgggctcgtctctctaggcttggagattgggaaacgcaacatgtttgtgcaggatgcaataatcctataaaactttttacacattatttcggtgcttgagttggtgccacgaatcctgcattgtcagcaaacagtatgatttcttgttaacaagctgagttttagctaaaaaaaaaaaaaaaaaaatgcagcccacgcccaccggcggtgaatttatgatttgtaaattatttacaaataatataagtagttctcctaattgcctcttcccgtctatttttgatttacccctttctgggtggggtcgcaaagtactcattttaaaatttaccatataaccaagctcacaaatgcccggtataatggcccataaactatactctctggcatttgccgcaaaacagttctgttggtttttggctgatttagtgcgaacacgtctgtacagtggtccccgcagcgacccacaatcgatttgcgattgccaattggctattggctatcggctattggcttttggcgactgaataacccatttcgaggagctgtcgccgcgcattcggtccggcacgcttcacttacggattgggctttggcttcggctccgctggctgccatccctgggtcccgagaccaaatctcaatctcaatcccaattcggagtggcgaacaatcagtggtcggcacatatgtagctgtgtgcctagcatactaaccatcccccgcctccgactgaacaataaattatgtttatttctggcccactccccatcgcacctacgaatggttttggctgtgcccaaatgcggtctgggtctccagcaacgaaatcgggatagccaaggtcgcggagctcaggaatggagcactggggatactgggactgggctgtcgctctggcaactggtaccgatcaagtttatttctgggtagggcggcactcacggcactcactacttcgccggaacttttagtaattccatacgtaatgtaaacacgttgggtaggctattggtcaatgccacttctaaattgcgttacccgatcatttctaagaacttaaacttgcgaatggccaatgttggcctcgctcttaattctgtatcgatagcaatcaggtagctcaaatcatctctactcacttttaatgcacttctcgtcttgcatttgccattgcaatgactaatattcttaaccgacacctaactgcgcccagaagccccatgtggtttccacggatctggtccacctggcctggaacatcctgtttgcattgatgcatgcatgcatagctacatggggtttccccgactggtttgagctgagcattttcaattttgatcgaacacttcggagacaatttccattgagtggattttgaatgtggtttgggtaacaagttctagttggtttccagcgaaaaaacaatgacgaaatgttggaaaaaaaaaaaatagttcgtcatcgttgggaggcatgaatacgaggctggaagtaaagtgttgctagatcgcagttcgcaggctgtcgcacgtcgaacgattttgttttgctggccaaaaaaaaaaaaaagatattctgcgcacgttcgcacctctgacgtctgcgcctgcgctgtaagagagctttggcactgctcgcttctagctcccacttacccaactaccaacctgcccacctgcccaccaacccacctgccccccagcaaacccagttccttgcctagatggccgccacagtagttgctgtgcggcttcagtttcatttccggtggcaggcaacggacggcgctaaaagcgctttttgtatttgctttcttacaagccaacaacacactcatatcacgaaatgaccattttcggattggaattaatcttatgtgcctgcttttcgaaatgtgtatgattcggattctgattgcgatgaactccatgactcatccaggagtacagtcattacgaaataaacatagagtggagcccgctatacatatttataggtattagcctggctctagcacttaattgaaagtaaatgaaaagtaaaagtgtaattttttacaatgttgattgcaattcaaagtgctttcgctttctgaataaaccgtaagtggcgtccacaggatggctacaattaagtggcgcccgctgaggggcccaagcagtttgatgatactgaaacaggagcccaggggaaagctgtgcacacacccactgccaatcaatttcaaagttacgtctttcgctccgttttatttactgtgtttttttttgtatttgtttgtgacttctggctcgctgacagtaaataaagcccataaataaaaacacccacccacgagatcgacaggaagggctaaccagagcgccggctggatttaaaaacaaaaagcgccgtccgcagccagtcaagattcagattcattcataccccagcgcttagaacaccaccaggccacagctcccgtccgagagatatagccactaagagagagcggaagaatcgaatcgcaaagagaggagccgcgctgagacaacgtcaagaatccgatttcgattccgattgcgatttcgaatccgaggcaaaaagcttcagactcggcagcaggcgcttcattctcgagttgtgatccaacgggttagcagctcagctcgcaagcagtcgccgttcgtcgtcgagcggcaagcagttcgtttcatttctactgggcgccagtacaagttccatcgagtgtttttgttattcgaaggcaaagcgcgaaaattatgccttcagccacatttgtcctggagcatttgatggcggcacaatcgcgactcgacgagcaggccgcatccccagcagaggtcaaacccaccagcaccatcaacagcagcagcaccaccgtggccaaggccatcaatgtcaagtcgtacgaaaagaagctgttgctggctctcaagaagattgtgcaataataaacgaatgcggggtaaacagcactctatttgacaaactgtagacatttcccctaatcgagctgactaagatcaataaaaagcaaacagagaagcacaacaaacagcggcaaaaaacaaaaaccaagaattctagtttttgtgctttcagtgtgtgttcgtgtgtgtgggcaagttgttacataaaacaaaaacaataacaaaataaaaaaaaaataataaaaaaacaccccagccgagacgcatttttccgcagtggaatactactatctaagcttctttttgttttggtgtgtgcgagaaaacgagtgtgaagaaaatgctgttcaacaaatgtctggaaaagttgtccagctcgctgggcaatgtggtcaatcacaagctgcaagagaaacaagtctacaacaacaacaatatcaacaataacaataacaatacgctaaacaacaacaatgcctacaacaatcagcgaaactttgagtacgaaagagccatacaggcgcactacggaagcaagggaagacgctcggaggagcgcgaaaggagcggcaagttcaaggccagcaagggtcggaaagcaaaggtcaccccaccaacggagacacccgaggcccaggagccggcctgcaagaactgtatgacccacgacgagctggcccagatcataaagggcgtggccaagggcgctgacgcgcaacgtaatcgagacaaccgactgcagcgcagacgtcgtcctctctccgcccaaccctccgccgctgcctccgcctccacatcgacggaatctctgcaccgtcttacacccagcccgcaggcttcctacccggccacgcccacctcctggacagccacaccgccccagttcccagccgccttcggcggcgccagctgctccaacagcacactgtccctcttggccaccatgcgcgtccagctccatggttacacgtaagttcaggtcgcccaaaaaaaacgacagcagtccagtccagagtgttagaaaaagagcagcgttctgctaatttggggcgcgtgcgaaattaggcactaattgttattggagtgcgagtaatgaagttgtcaggctgccaactaaacgataccccgtagcaggtgaaatggtattttgagctaccatcgcatcgtagtatgtcgccccgcctgtcagtcacatgtcgcggagtagcagatgattcgcgggaaatctggagacaatctgctgcccatcaacattaaccctaataaggcaggcaatcacaggcagttgacgccgcaacaaagcaaaaaaaaaaaaaaatcagcgcagcacatactgtcatgtgttcagaattgccacgcaaaatgagtaaatatttacgcaaagcattcgactcgaaaacaagcaatcgtaaattgacgttctaatatgaatgaatttccgactgtcaaatgccgaagtgaagtgaagggagtggaatggcaaatggcagggggcccagctcagatcgccactcaaatatggtcacatatcaacatatcaaccccccccacacaattggcccgttgtcaagttgtgtttcgatattggttctttcatttagagctgaagattgagttattggttaggcactggctaaattacgcacttgtagaaccgggagagttcggcgaattgcccactgcagacatcgtatcttggcccactgccagatcggaattatctcttcactcgcgcccggaatgtttacccatgtcccgctgttgcgctgtccgtcgtccacattccccaaagattccatcccactccgtgtctgatcttggtgtttatctgcccggctgtgccatgtgccgtccgattgtttgtgtgggctggccccatcttggcgatctcgattcgcacagtacacccagaaaacaatcgcatatgtatctgctggactattattatgtcccataaattatctttgacttttagttgagctcggattggtagtgcagtcggtttcggttgttgcttatttatttattttgatttttatcgcaacggattcataatcgctgaacgtgttgattggctcgttaacttgatctttgtttttctaatttatgctcagcttttataggtatcctgctttagggcgatcttttcgtcgttatcctaaaacgcacatcatgccaaatgatctgaagatgatgtgccaatagctttgacagcttaagctgcgtgatttccggatttcacttgtcacactcactaggtcaacaatggggcaccgccgtcctctgccctccgccttgtagaactattaaccttccgatggtttttcttctcgccataaggctgattaacgatttatgaaattacatttcccgtaatggatttcgagcgctgccttctgttttgcatatttccgtttatttgtccgttgcacaaccgtgagctgtggctactgatcaaataaaagcgtttaatttgtgcaaattcataacgtcggccgactacaagatgctctcagtggaaaggcccaattatgggggggagggctttgttctggggttgtaactccatggaaattttacaattctatcccagactctccccaactagtacttttccccgtccagttctccaacttgacatatcgtttatatgcttattttaacagtttgaactgttcaaaaaatattatgttttgaatagactgtactactacttcacacactgcttgcgagtgggcggttagggtaggggcaagcagctcattcgataattcaataagtatcttgccgacttttgagttaattaattgaaggcctcgttcccctgcttccgcgctccacctcgtaaccccaataccagtcgtttcgctgccgcctttccaggtgcgttgccacacgaaaagcaaaataaacctgtgacaaacgaaacgactaaaacactgagggggggatttgtatatgtattcggatattgtgtacgaatacgctgcacatattcgtgtgtgcatgtaaatctgtttgttgaccttagcggcgctttcatgaatggcgcgcagcttcctccgtatggtaaatacaaatacgccacattcgcattcgctgctgtaagtgtaactgtaaatgatgcaaaaaggtgcaaaattttcactgacgtactcgggtgatggtaattccatctgcttgtatttttaacccccagtctgcccgatttaaatcgctgagtgagagcgcaacagaagtaatttgtgttgctttgtattatcgtcacagtgctaaatttaaagataaacaccgaaatatgggtggagacggagacacagtttggcagcaccgcagttcggcagaatgacacaaaggatatcagcgatatgatcgatgtgggctgcgataattgctaagttcaactcgattgcacggggtcagacggcagagggcgatgcgtccacgaatccgaatcattttaactacggcgatcgcaaacaagcgatcggccaacaatacgcaaatgtgctaatagatgtggtccgaaaactgtgaattgtcttatgcaaataactcgggaacctttccatacgcaaatcgtgtgtgtgtgtgtgtgttgaatcatccgaaagaatgcgcagttcgtatttacgaatatcggaaatcggaatcatttttccagaaattctaacttttgcctaaatgaagatagagtaaaaactgaggttgggatgctatcgatttggtgcaagcagtgcacagtttccgtctacgtgaaagcaagcagtgcatatagacctgcttgtaatagatttataacttccgttttgctaaaaataaacccatcaaactcattcttatcactcgcaaccgatcggcttcgcatttggccaccttgaatctgtaacaagctagcaaagcagagcgaacgagcgagtgagcgagagggccaatgtggagagtgagagatggtgagcgagacgggcgggacagcatgaaatgcccgacagtttgtggctctaatgtaatgttaattgtttccacatggacttctattaatagccaggccagcacacggaagatgaattgatttggctgactaaaaagcaaatcaatatgcacagaaagcatttttattcaatatcgccggtacgaaaactctacgatatgtgccgtcaacatggctaaatagtgtttacttcgcttcgtcgaactaaaagacgtgatttcttccagcggagaatttaccaattatcatttgaaaattacatatgcattgttttctgtgtagcggctcctagcacttgccgcatacattatacatgagttttgagtattagttttagttcccacaccccgatacaccgaaaatccccccaaaattctcgccacatcgatgacatattttatgatatctatgaccccaggcactaaattgaaaccggcttaaggacaactcaatgttgtcaattgtttctagatttttgctcgaattccgtatttttgcgtttggttcgctcaatggcgacgaactcgaaagcgggctaagagatggacagcacaacagcagcacgcggtctataatgacattcagagcaagttgttttgggctagtgttatttatgcaaatcagtaggagggaggcaaagcagatccaatgaacccattgtgtgtaggccaacggcggacatcggtgtggacatcgaagtgatagaaagagatgatttagtttcgttcgacagaaacagaaacagaaacagaaacaccaaactcaactagtgctccgcttagtcgagctctatttgagtctaagccgactttagccgcctttttctgtgtcacatgggcaaaaatgcgcttccaactgcaattgccatggcgatgacaatctcaagtctgtcaagccaactaagctgagcaggccagacgggtagacttataagtcccggcccccagtagctggcttcgactcaacttgcgcttttccacacggcgtatgcgtgttttcgccactattgccgttgttattgcatttgtcgccttgcatttgactgttttcttcgaacttttgctggtgtgtgctttagcacatattgtacatatacgtacagtaaaccctcctcgcagtgggccctaaaaagctctaagctatgtttacacgtttagttctagtcgtcaagacctgggaatgattgcctttggtttttgccagatgttgggtttacttactaatcctattcaaatgaaaagactgcggccgttcatagagttccacccactgagtaaagaccgtacccatattcgattcgtattgcgctgtttgttgctgcttttgctgttggtattgcggttgctgctgttgttgctggctctagtattttgcgcttttgtgcgcttctcgtatagtttgtaattgcattttgagcgctcacgtagtcgccagtcgagcactcagtcagtcagtcagtcaatcgctcagttcgttcagtggatgcgccatcgatcggtacatatgaatacatatctacgaataacagtcgaactaatttagtcatatatcctaataaccatccacctctttctctccgcagatggtttcatggcaatctttccggaaaggaagcggaaaaattgatcctggagcggggcaagaatggttcgtttctcgtccgtgaatctcagagcaagcctggcgacttcgtcctttccgtgcgcacggacgacaaagtaacgcatgtcatgattcgatggcaggtatgttgaatacgtaaccccaactaaccagattttgtagccgccccttgccccgcgcccctcgcagggtgcaaaatgcaaatgcaaatcgatggcagtgcagcaacaaagtcgcactggccataaagttcctcatagcgcgaccttggctctacagtcgagtcgtatgtacatatgtatgtgcacataaactctacagttgagcctaactaacaacgatgcttgctcgagcggagtggcaagaatattataaaatcaattgacaataatatatttaaactctttcatcttgaacgcatttggctatccgtaattatccgttaacattatcgaaggcctactgtataaactccgaaacatgcctgctttgccttggcgcgggcaaactgcttgcgccaggagcttcaaccaggtcaagcagtgcagcagttccagtttcagcgtaattcccctaaaacaatttttccactattactataactttagccgtgagcgcggtttctgcggtttgcggctgcaattatgccatttacatgtctagctggcctttttcccatttgacattgaagtcacgttttcgattttattagctaatctctcgacgctccatcgaactcggagatagagactctccaccacgtgtccccccattagaatgccacgataacaatagagtgatttcctgattgcaggacaagaagtacgacgtcggcggcggggaatcctttggcaccttgtcggaactgatcgatcactacaagcgtaatcccatggtggagacgtgcggaaccgtggtgcatctgcgacagccattcaacgccacacgaatcacggcggccggcatcaatgcccgggtggaacagctggtcaaggtgagttccctctctctgatagcagtgattctggagcgcactaatcccgaggtggctttcgattccagggaggtttctgggaggaattcgaatcgctgcaacaggacagtcgggacacattctcgcgcaacgagggctacaaacaggagaaccgcctcaagaatcgctaccgcaacatattgccatgtgagtatagaaatccactaagatccgttaggactcccaaaatcctgacggtttaaaacagttatttctaactaactaactaacattaactaacaaatttctaacctatttccctgtccgctttccagacgaccacacgcgcgtcaagctgctggacgtggagcatagcgtggccggagccgagtacatcaatgccaactacatacggctgcccaccgacggcgacctgtacaacatgagcagctcgtcggagagcctgaacagctcggtgccctcgtgccccgcctgcacggctgcccagacacagcggaactgctccaactgccagctgcaaaacaagacgtgcgtgcagtgcgccgtgaagagcgccattctgccgtatagcaactgtgccacctgcagccgcaagtcagactccctgagcaagcacaagcggagcgaatcctcggcctcttcatcgccctcctccggctctgggtccggaccaggatcgtcgggcaccagcggagtgagcagcgtcaatggacccggcacacccaccaatctcacgagcggcacagccggatgtctggtcggcctgctgaagagacactcgaacgactcgtccggagctgtttctatatcgatggccgaacgggaacgcgagagggagcgcgagatgtttaagacctacatcgccacccagggctgtctgctcacccagcaagtgaacacggtgacggacttctggaacatggtctggcaggagaacacgcgggtgatcgtcatgaccaccaaggagtacgagcgcggcaaagaaaagtgcgcccgctactggccggacgagggtagatcggagcagttcggccacgcgcggatacagtgcgtctcggagaactcgaccagtgactatacgctgcgcgagttcctcgtctcgtggcgggatcagccggcgcgccggatctttcactaccatttccaggtgtggccggatcacggagtgcccgccgatccgggctgtgtgctcaacttcctgcaagatgtcaacacgcgtcagagtcacctggctcaagcgggcgagaagccggtaagtttgacttcgatcatatttgggacatcattggctctaaccaaatacttctatatatttattgattgttcgcagggtccgatctgcgtgcactgctctgcgggcatcggtcgcactggcacctttattgtgatcgatatgattctcgatcagattgtgcgcaatggtaagtttgaacggttaaatgtggtcaagaattgataactgagaaagaagacaattcaagccacatagatcttgaaccttattaaagctcttttccctatgtgtttcctcacaggattggatactgaaatcgacatccagcgcaccattcagatggtccgatcgcagcgttccggtcttgtgcaaaccgaggcgcaatacaagttcgtctactatgcggtgcagcactatatacagaccctgatcgcccggaaacgagctgaggagcagagcctgcaggttggccgcgagtacaccaatataaagtgagtggattacgagagactccgtaagagtgtccgtctaatggcaaccttatcccaccatccaggtacacgggcgaaattggaaacgattcacaaagatctccattaccaccagcaatttctagcataagtttagttccgagtaagacgccactgacgccgacatcggcggatttgggcactgggatgggcctaagcatgggcgtgggcatgggcgtcggcaacaagcacgcatcgaagcagcagccgccgttgccggtggtcaactgcaacaataataacaacggcattggcaatagcggctgcagcaacggcggcgggagcagcaccaccagcagcagcaacggcagcagcaacggtaacatcaacgccctactgggcggcatcggcttggggctgggcggcaatatgcgcaagtcgaacttttacagcgactcgctgaagcagcaacagcagcgcgaggagcaggctccggcgggagcaggtaagatgcagcagccggcgccgccgctgcgaccgcgtcctggaatactcaagttgctcaccagtcccgtcatctttcagcaaaattcaaaaacattcccaaagacatgatcggcttgcgaccgccaagccatgcgcctgcgttgccgccgccaccgacaccgccgcgcaaaacatgacaaatgaatttctaagtcgcgacgcccccttgacacgcccccttgacacgcccccctgacacccacctccctccacacgcacacagaccacatatggttttcattttaaatgtcacccagccgccgccccaaacccaaaacccaatccctcgactatgttttactgttgtaccacgttctacgttttttttttttttttataattgtaatctatatacttttttgtaattgtgtgtaatgtaatgtttagttttatgttattgtctcgctttatgttgtaagtgttccctgcacacgaaaagcagtaaccccaccaccaccccaaaacccaaaacccagcatatttatgtagtagtattgtaagaatccccgaaccggtagttgaggatacaatctgggcggaactgcagcagatccgccaaaaaacaaaaacacatttttaagcagaatcgcagcaacaaaatataacacccgttccctgttccaaaccgcttgaatttggtggaatcggccttgatagtatttcactttcttgaaaatattcgctttagataagaaaattgacttgtgacaaatatttacatgtattgcgctggttacaaaccacaaaagttgcttaactttaaattttacgaatcgacatttatgatatttcgcatgcttgaaaatagttgtagtttcctatttgggaatcattgaaaaatccatttataaagcgaaatccagttctggcacgttcaatttgaatcggttaatttctaatctagttggcgaaaaagtgaagaaaagtgaagtccacctcctccaaattcaacttgaaacggaaacgggttaccggttggagtgcaaataaagtttttagtgtagtaagtgttgacaaaatcgatagagaagaaattagaggagtaactgaggcagtaagcacgtaacgataatgatacaaaaagcgttgattgtgattcgagtgacagcgagaacagaaactgaaacagtaacagtaacagtaacagatgagaacagatgcgaatgggatcagtacagaacagaacagaacagcggagacgccaaccgaacagaacagaaatgaacagaagagaagagaacagattagaggtaaaagaaaaagctaagaagcgcttaagcgtgtcgtccctagaataagaaaactaatattacagctccacagatccagattcagatccagatctatatctctagcagccaatttctgatttccccttccctcttagttttcccattaatttagtgattgtgtgtatatttttaattgtatattgaagattatttatagcgattgtccattgtgttacatttcaaatgttcgaaagaattgtatttagaaagtttgtactttagaaattatgcattaattgtgtgtctgtgtctctctacccagtctccctatctctgtctctctctctctctctccctcactgtctatgcacgagtgttttcttaactaagtttattatttcaacgctgaagcgtaatcaaactatatatgcaatatttaagcacagtaccttgggcgctgcaaagaaattaaaaaattttaaaataaaaacaaactgctaaatcataaatacaaaatatatacaggaaggaataatagcagcgaaatgtaaatcaattagattattgtgcaaatttgagtaatatatttaaaacatacccttattttatcttatttaactttatgcttttgtaagtgctttaaattgttattcatcttgatcttgcaaaaaaatgaaaaaaccacaaaactgaaaaacgaatacaaaactaaaaaacaacacaaattatatttgtatttatacagaaaaataaaacattttatatgcgatacacgatagcacattattttttattttccctgcatgtttgttgaacgcttttccctttttggttctcaacttcagttatgttaccacacatcaccaacgaactgaaagaaacccgaacactttggaacatagccttatataaaacgcctcgacgaccaagacggaaagttgaatcacaccacggagaagagggagacatctcccctctcccagttagaacaataagtaatcatgtgttcacccccaccacccacacgaatctaaactgacccctgaccttccaccaaagacactagaataatattattctaatgtctttgcttccacccaccatctgagcactagcgggtgatcccgatcggacgacaaacgtgtgtgtaagtgcgtgatctagtactttatatagttagcctataatacgattattcaaacggaatatgtcgaagcctggcttcgactgggcggcgacctagtggcccccaaaaaacgaaggtgaatccgaatatgaatcccactggggatacgatatgttttgatcttggagcgcggggcgaacaaagtcgcgcgcttcttgtgttgaatttttatagcatatagaaagaggtggatatcggatatggatattgaagaacgcagtccaatggagcagccggcggagggagagatgaatgccaaagcacaaaagccaacagcaacaaaacaccaataggcctcatcgcagtcatttgaccacaaatctgacaaacaacgatgttataatcaataagagcgaaccaaaatcaaaataacgacgtgaatattgagggagggatcgatggagacccaaacaccaaaacaaaaaaaaaaaaaaacaaaaaaaacaagagcaaggaaacgctttaaacttaaataattctaaaattgtatctaggcaatatcgaaatgtaaaccacacaccaactatccatagtagacaaacaaacaaacaccaagaaaaaattgcttgagtgacttacttt

SEQ ID NO: 28943 - DNA, 4528 bp, DROSOPHILA
agtaaaaaaatagttttttttttgtatccaaccaaccaactgtaaaaataagtttaaacaaagcatctactcataagtttcatttttttccgttaagtgtcaacattatttattttttaagtgtgcattcaataagaaaatgtcatcgcgaagatggttccacccaacgatatctggcatcgaagctgagaaactgctgcaggagcagggattcgacggctccttcctcgcccgcctctcctcctcgaatccgggcgccttcacgctctccgtgcgccgcggcaacgaggtgacccacatcaaaatccaaaacaatggcgacttctttgatctctacggtggtgaaaagttcgccacactgccggaactggtacaatactacatggagaatggcgagctaaaggagaagaacggccaggccatcgaactcaagcagccgctgatctgcgccgagcccaccacggaaagatggtttcatggcaatctttccggaaaggaagcggaaaaattgatcctggagcggggcaagaatggttcgtttctcgtccgtgaatctcagagcaagcctggcgacttcgtcctttccgtgcgcacggacgacaaagtaacgcatgtcatgattcgatggcaggacaagaagtacgacgtcggcggcggggaatcctttggcaccttgtcggaactgatcgatcactacaagcgtaatcccatggtggagacgtgcggaaccgtggtgcatctgcgacagccattcaacgccacacgaatcacggcggccggcatcaatgcccgggtggaacagctggtcaagggaggtttctgggaggaattcgaatcgctgcaacaggacagtcgggacacattctcgcgcaacgagggctacaaacaggagaaccgcctcaagaatcgctaccgcaacatattgccatacgaccacacgcgcgtcaagctgctggacgtggagcatagcgtggccggagccgagtacatcaatgccaactacatacggctgcccaccgacggcgacctgtacaacatgagcagctcgtcggagagcctgaacagctcggtgccctcgtgccccgcctgcacggctgcccagacacagcggaactgctccaactgccagctgcaaaacaagacgtgcgtgcagtgcgccgtgaagagcgccattctgccgtatagcaactgtgccacctgcagccgcaagtcagactccctgagcaagcacaagcggagcgaatcctcggcctcttcatcgccctcctccggctctgggtccggaccaggatcgtcgggcaccagcggagtgagcagcgtcaatggacccggcacacccaccaatctcacgagcggcacagccggatgtctggtcggcctgctgaagagacactcgaacgactcgtccggagctgtttctatatcgatggccgaacgggaacgcgagagggagcgcgagatgtttaagacctacatcgccacccagggctgtctgctcacccagcaagtgaacacggtgacggacttctggaacatggtctggcaggagaacacgcgggtgatcgtcatgaccaccaaggagtacgagcgcggcaaagaaaagtgcgcccgctactggccggacgagggtagatcggagcagttcggccacgcgcggatacagtgcgtctcggagaactcgaccagtgactatacgctgcgcgagttcctcgtctcgtggcgggatcagccggcgcgccggatctttcactaccatttccaggtgtggccggatcacggagtgcccgccgatccgggctgtgtgctcaacttcctgcaagatgtcaacacgcgtcagagtcacctggctcaagcgggcgagaagccgggtccgatctgcgtgcactgctctgcgggcatcggtcgcactggcacctttattgtgatcgatatgattctcgatcagattgtgcgcaatggattggatactgaaatcgacatccagcgcaccattcagatggtccgatcgcagcgttccggtcttgtgcaaaccgaggcgcaatacaagttcgtctactatgcggtgcagcactatatacagaccctgatcgcccggaaacgagctgaggagcagagcctgcaggttggccgcgagtacaccaatataaagtacacgggcgaaattggaaacgattcacaaagatctccattaccaccagcaatttctagcataagtttagttccgagtaagacgccactgacgccgacatcggcggatttgggcactgggatgggcctaagcatgggcgtgggcatgggcgtcggcaacaagcacgcatcgaagcagcagccgccgttgccggtggtcaactgcaacaataataacaacggcattggcaatagcggctgcagcaacggcggcgggagcagcaccaccagcagcagcaacggcagcagcaacggtaacatcaacgccctactgggcggcatcggcttggggctgggcggcaatatgcgcaagtcgaacttttacagcgactcgctgaagcagcaacagcagcgcgaggagcaggctccggcgggagcagcaaaattcaaaaacattcccaaagacatgatcggcttgcgaccgccaagccatgcgcctgcgttgccgccgccaccgacaccgccgcgcaaaacatgacaaatgaatttctaagtcgcgacgcccccttgacacgcccccttgacacgcccccctgacacccacctccctccacacgcacacagaccacatatggttttcattttaaatgtcacccagccgccgccccaaacccaaaacccaatccctcgactatgttttactgttgtaccacgttctacgttttttttttttttttataattgtaatctatatacttttttgtaattgtgtgtaatgtaatgtttagttttatgttattgtctcgctttatgttgtaagtgttccctgcacacgaaaagcagtaaccccaccaccaccccaaaacccaaaacccagcatatttatgtagtagtattgtaagaatccccgaaccggtagttgaggatacaatctgggcggaactgcagcagatccgccaaaaaacaaaaacacatttttaagcagaatcgcagcaacaaaatataacacccgttccctgttccaaaccgcttgaatttggtggaatcggccttgatagtatttcactttcttgaaaatattcgctttagataagaaaattgacttgtgacaaatatttacatgtattgcgctggttacaaaccacaaaagttgcttaactttaaattttacgaatcgacatttatgatatttcgcatgcttgaaaatagttgtagtttcctatttgggaatcattgaaaaatccatttataaagcgaaatccagttctggcacgttcaatttgaatcggttaatttctaatctagttggcgaaaaagtgaagaaaagtgaagtccacctcctccaaattcaacttgaaacggaaacgggttaccggttggagtgcaaataaagtttttagtgtagtaagtgttgacaaaatcgatagagaagaaattagaggagtaactgaggcagtaagcacgtaacgataatgatacaaaaagcgttgattgtgattcgagtgacagcgagaacagaaactgaaacagtaacagtaacagtaacagatgagaacagatgcgaatgggatcagtacagaacagaacagaacagcggagacgccaaccgaacagaacagaaatgaacagaagagaagagaacagattagaggtaaaagaaaaagctaagaagcgcttaagcgtgtcgtccctagaataagaaaactaatattacagctccacagatccagattcagatccagatctatatctctagcagccaatttctgatttccccttccctcttagttttcccattaatttagtgattgtgtgtatatttttaattgtatattgaagattatttatagcgattgtccattgtgttacatttcaaatgttcgaaagaattgtatttagaaagtttgtactttagaaattatgcattaattgtgtgtctgtgtctctctacccagtctccctatctctgtctctctctctctctctccctcactgtctatgcacgagtgttttcttaactaagtttattatttcaacgctgaagcgtaatcaaactatatatgcaatatttaagcacagtaccttgggcgctgcaaagaaattaaaaaattttaaaataaaaacaaactgctaaatcataaatacaaaatatatacaggaaggaataatagcagcgaaatgtaaatcaattagattattgtgcaaatttgagtaatatatttaaaacatacccttattttatcttatttaactttatgcttttgtaagtgctttaaattgttattcatcttgatcttgcaaaaaaatgaaaaaaccacaaaactgaaaaacgaatacaaaactaaaaaacaacacaaattatatttgtatttatacagaaaaataaaacattttatatgcg

SEQ ID NO: 28944 - protein, 841 aa, DROSOPHILA
MSSRRWFHPTISGIEAEKLLQEQGFDGSFLARLSSSNPGAFTLSVRRGNEVTHIKIQNNGDFFDLYGGEKFATLPELVQYYMENGELKEKNGQAIELKQPLICAEPTTERWFHGNLSGKEAEKLILERGKNGSFLVRESQSKPGDFVLSVRTDDKVTHVMIRWQDKKYDVGGGESFGTLSELIDHYKRNPMVETCGTVVHLRQPFNATRITAAGINARVEQLVKGGFWEEFESLQQDSRDTFSRNEGYKQENRLKNRYRNILPYDHTRVKLLDVEHSVAGAEYINANYIRLPTDGDLYNMSSSSESLNSSVPSCPACTAAQTQRNCSNCQLQNKTCVQCAVKSAILPYSNCATCSRKSDSLSKHKRSESSASSSPSSGSGSGPGSSGTSGVSSVNGPGTPTNLTSGTAGCLVGLLKRHSNDSSGAVSISMAEREREREREMFKTYIATQGCLLTQQVNTVTDFWNMVWQENTRVIVMTTKEYERGKEKCARYWPDEGRSEQFGHARIQCVSENSTSDYTLREFLVSWRDQPARRIFHYHFQVWPDHGVPADPGCVLNFLQDVNTRQSHLAQAGEKPGPICVHCSAGIGRTGTFIVIDMILDQIVRNGLDTEIDIQRTIQMVRSQRSGLVQTEAQYKFVYYAVQHYIQTLIARKRAEEQSLQVGREYTNIKYTGEIGNDSQRSPLPPAISSISLVPSKTPLTPTSADLGTGMGLSMGVGMGVGNKHASKQQPPLPVVNCNNNNNGIGNSGCSNGGGSSTTSSSNGSSNGNINALLGGIGLGLGGNMRKSNFYSDSLKQQQQREEQAPAGAAKFKNIPKDMIGLRPPSHAPALPPPPTPPRKT

SEQ ID NO: 28945 - DNA, 7632 bp, DROSOPHILA
acccaaccccgtccctgacccaattccgctgttctctttaccgacttgtagattaatcacgctcttgatcttcatgaccggatccacctgacaagtaacgccaaagcagccccacttagcggaatagtagagcctaggggacccaacgtaaaaactctagtatagcaccaatctcccaaccagttaacattatacctaaacccatggtcaagagtaaacatttctgcctttgaagttgagaacacaattaagcatcccctggttaaacctgacattcatacttgttaatagcgccataaacatagcaccaatttcgaagaaatcagttaaaagcaattagcaattagcaattagcaataactctgctgacttcaaaacgagaagagttacaagtatttgtaaggcacagtttatagaccaccgacggctcgttagggctcgtcatgtaactaagcgcggtgaaacccaattgaacatatagtggaattattattatcaatggggaatatttaaccctcaggtagcaaagtaatttaattgcaaatagagagtcctaagactaaataatatatttaaaaatctggccctttgaccttgcttgtcaggtgcatttgggttcaatcgtaagttgcttctatataaacactttccccatccccgcaataatgaagaataccgcagaataaagagagatttgcaacaaaaaataaaggcattgcgaaaactttttatgggggatcattacactcgggcctacggttacaattcccagccacttaagcgacaagtttggccaacaatccatctaatagctaatagcgcaatcactggtaatcgcaagagtatataggcaatagaacccatggatttgcccaaaggtaaccgagacaatggagaagcaagaggatttcaaactgaacacccacagtgctgtgtactaccactggcgcgtttgggagctcactggcctgatgcgtcctccgggcgtttcaagcctgctttacgtggtatactccattacggtcaacttggtggtcaccgtgctgtttcccttgagcttgctggccaggctgctgttcaccaccaacatggccggattgtgcgagaacctgaccataactattaccgatattgtggccaatttgaagtttgcgaatgtgtacatggtgaggaagcagctccatgagattcgctctctcctaaggctcatggacgctagagcccggctggtgggcgatcccgaggagatttctgccttgaggaaggaagtgaatatcgcacagggcactttccgcacctttgccagtattttcgtatttggcactactttgagttgcgtccgcgtggtcgttcgcccggatcgagagctcctgtatccggcctggttcggcgttgactggatgcactccaccagaaactatgtgctcatcaatatctaccagctcttcggcttgatagtgcaggctatacagaactgcgctagtgactcctatccgcctgcgtttctctgcctgctcacgggtcatatgcgtgctttggagctgagggtgcggcggattggctgcaggacggaaaagtccaataaagggcagacatatgaagcctggcgggaggaggtgtaccaggaactcatcgagtgcatccgcgatctggcgcgggtccatcggctgagggagatcattcagcgggtcctttcagtgccctgcatggcccagttcgtctgctccgccgccgtccagtgtaccgtcgccatgcacttcctgtacgtagcggatgaccacgaccacaccgccatgatcatctcgattgtatttttctcggccgtcaccttggaggtgtttgtaatctgctattttggggacaggatgcggacacagagcgaggcgctgtgcgatgccttctacgattgcaactggatagaacagctgcccaagttcaagcgcgaactgctcttcaccctggccaggacgcagcggccttctcttatctacgcaggcaactacatcgcactctcgctggagaccttcgagcaggcaaggcacaattatatattcaaatgtcctttgatttgattcaaatatgatatgattcacttgattccaggtcatgaggttcacatactctgttttcacactcttgctgagggccaagtaagaactttataatctctttttggggagaaaaattttaaagcacaatagcagaaaaatatatcagataatataacaaaaaaaaagatcattatagttttttatttaagtggtttattactaaggtatccaaaaataaagcgaaaaatctgcaatttcagatatttagctttgttcaaaagcaacgatttttaggcggaagtgaatcagtcaccgctatccgtcgtatccgctggggcagcatcagctgcaggttctggctcagatgcaatagctgtagcgggcgggtcgtccaccgtgttgtctttttgtgtcttccacatcttagctgcagccagcaacttgagattgggtcgagccatttcgtcctcgggaaagatgtagtcgaatacctcctcccaaccttcctcgacgccattgtccgagacgatcttttgccgcttcttgatgcgccgcggcatcttgtccattaccttttgcatctcctgcgaatcggaggcgtcgcgttcaaagtcgcgccatgcctctagcaacagaacacgcgactccttgtctcccagctgacgcaacatctcgttggctcgctcatagattctccttgccagctgcacgttcagctccgcatctggcccgctgtcgccgtggctgaggcccatctcgaacttggcaaacgacatccacactttcacatgctgcgtccgctcaaggagtcgctcgtaaagctgtctggctagctctgtttcgcctagggctacctcgaagtcgatgtacgccttccacagcagctctggcatgtccaggcgcggctgctgcaccgccagctcgaaaatggctctcgcccggtccgtgtcgcccaacagattctccagctcggcaaacttcatccaagtgacacaattctccggtccaaactccaggaacttctcgtacagcatgcggcagcgctcgaactcacgcaactgaatctccagatcaatatagcctctgaagagcttatctctgggacacatgccgatggccaagcccagagctttgcgtgctcgctgcagctccttgcagcggatctcgaattgggcgtacagcagccaaagcttgctgaaggtgaactgcttgtgaggtattagctccagacaggtcttgtagatctgccgcgtgcgttccgcgtcctccgcttcaagctcctcgtacaaagcataattgatccaaaggtaaatgtagcgtcgccagaagttcttttcattggcaggcggcacgttggaaatggcccgttcgtacgtctcacggatctgatcccgatcgccctcagcctcaatcaagcgcaaatagtcgaaccaggcatcgtagttggtgggattggcggccacctcctgctcgtactggtacttgcgcttggaaacaatcacatcctcaatacccgctctgtcgccgtactttttctcgtgtttcgtataggccttgaacagctcctgtgtgcgatctttaggtaggtgatctaaagcgtacttgtagatgatgcgcgccctgtcgtgctccttttgaccctcctcgaaacgtgcaaaggcgatgaacaggcgctcctcgatgtagtcgtcaccaaagaactccacagcgcgctcaaatacccgccgagagccgtggataaacccatgagactcctcaaagcgggcgaactttatccagttcttcacgtccgggtgcacatagacaaatcgctcgtagatctcccgtgcccggtcgatctccttgtagcgcagctcgaagttgacgtaggtctgccaggcctgctcctccggttgccactccatccagcgctcgaacacctgtcgcgcccctgccacattctccagcatctcctccatgtaggtgtacttgtaccagaactggttgactcgcggcatgatggtcactgcccgatcccacagattgcgagcatgattcacctgcttgttcttcatctccatctcggcgtatttcagccagagggtcacgttccggtgctcattgtccaacgcccgctcccagatagagcgcgcccgctggatctcctgctgctgctcctcccactgagcatatttgatccaatggctgactaccatgcggttcttgcggagattgtcctcgaaggtctttcgcttccgctgctgatagtctgccaactcggcgggatcggagatcttctgctttggcggcggcggcagaatctccagatctcgctccttggcctcacggagcaactgctccgccgtaatttgcacctccgccggcgctttgtttttgacctggtgaaattttggattggataagttggtttggtggattgccgacgatggcacataccttggccaccttgggcatcttctgtggccgctccatgctgtgcgattcggggtccctcacttagcaatgttatgttggaaaaacgctaaatcgcaacaaaataaataatgccactaacaacgtcgtgcgataacgataggcatatttcgatagttcgctatcgataatcgctttttgtctccactggccttttgcgcattctacttttgaatgtgtgtttcaattaaatccctttttttgttgtatttccataaatatatactagtataataattgtacattgttgggttaaaaataaaacggataacgcattttttacttatttatttttgagcaatttcaacacaaatttaaaaaaaaaatggatatttaagagatgaaaagccacaggaactgtttatcccaatacacttgaaacacttttaaccgtcttcagttgaaggagactccttgctaccgtggaagatgttctaggtaatcatttgaaaaatctccacgaactctcgttccgcttctccggcttcaccaccacccagtgatcggggtccatcagatagtcgctacaaaaggcaacgaggcgttactgaataactataacatgcagatcgaaacccaccgatgctcaaccaaggccttttgggtatgggtccgcagtgcttctaaggacccggctcctccgccgtactcctccggcagcatctcccgcggcacgaactcgtacagcgtatttatgctttgcgtgtggaaacggatctaaagtgtagaaagtaatggtgagatgaagctattagagacataatggcttctcaagaaacccaccagcttgaagacctcgtcgctgatgaacggcttcaccacgctgacgatccgatccaggtaagttggacagttaatcatgtgaatggcgcgcaggcgcaccggaaatgccagctggaggaacttgatgtaggcgcgcagcgtgctgatcgtcagccgcgaaatgtgccgcattgtggtgcccttcatgtcgaatatctgcacctctccttcggacaggacatccggtttggcgagatcgtccggcgtcacgaaccggcagtcgctgaccataaagaaggcgcgcgtgtcctccgtgtggtgcatctggggatagcaatcggcggtatggagcgcaagttcctacagcaaagagaagctattactcaccttggaggcctcgaactcccgaaagcagtacagcgacaccttgcatttgtccggcgttaggccaggcagcggtagaatgtctctgaaattcgagtgttggggtatacgggtatgtatgtttttggaacatggccctgcctcaaaggaaagggaatcttttctcccaataaggacacacttacgcgtagtcaaaggtgcgcttgctgtccgcgtctagaggatccctcttgataaacaggtgagggtgccggttgcgcagggcgtagttcacctcgatgagcttccgagtctcctccacgtctccaaacatgcactggtagaagcgccggagcagcagcggatctgttaatacacatatggtacgatacaatgaagtttttgctaaggagttaagcccatggaactttgcacattacgggaatattaattaattcaaacatcgtgttggacatattgaattgggaagtgcggttcgatttagggagacttgcctgtacattcactgtttgtatacaattgactacagtgacgtaaggcggcgagcggagcggcctactaacgacctaattaatggacggtgggtggtgggaggtggaatgggactgatgggcagtgaacggatgttggattcccgcacggttttcgggctcatcgcttaccaatctccttgggcagcttgtcattttgccggaaccactcgaggagctccttgagatcccgttcctgcttccgcaccgcctgttccgatgtgtcgctatcctgttcccgctgcagctgctcggacgtaccgctcgccccagtctctctcacacctatgcggctcattggtgctgtggcctgggtatcgattgctccgtcgctgttccctccgccaggttggtctgctatcggctatcggacgcagcaatcgctttcgaatcactttcaaaaacgctttcgaatcacttttaaacctttgggcttgacgcctggcagccgactgactgacagttgcgcatcgatttcgctcatcgatttagtttttgaatattcaatgctactgcgttggcaattaaagccacgtaattttttaatggcttttcggccatcgtttggacgacgcttaatagtgcctaaatatgttccgttccagcttctggatctgcctaatcacctggtcgtgtgccgcatcccaatgccatcgcaagtagtgacacaattttcactttaattgataattcgcgggatgggcaatttttctaagaagcgtttgttttttgtaatcatagaagaacattgaaagccacctggcttttgggtgtaataaaacctcataaaatgtaattaatataatttattgttttgtcaagtatattgttcccattgctgtcaatcaatcgacaatagccccttatttgataatagagaaattggtaagaaaataataaaatatgaaaataagaattcttaatggagggccagcttcactgagctctagaacctgtaagtgtttctgggactttcccaactaatcgatatcttcgcttggcaagacgcgatgcttgatcacatttatgtttatatcacgttcgatgatcaggatatcagaaccaggaccaccgactcttgctctgagcggccaccttccagtaccgctcgtcgctgagataagccctatgaagtacagaatgggtggctaagatggacatccccatctaaaggtaatactcacgcgttgtccctgatggactgaatgcctttcgccttgagttccgctacagtgcccgccttgccgccgtactcgttcggcaacatgtccctgggcacttctttgtaaaggctatccataccctctgtgtggtaccggatctgcaagacgatttggttagctagtgcttagaatgaagtacttttcaggttctaccatgttgcggacttcctcccttaggaagggcgacatcatggatatgagcttgtccag

SEQ ID NO: 28946 - DNA, 4053 bp, DROSOPHILA
cccaaaggtttaaaagtgattcgaaagcgtttttgaaagtgattcgaaagcgattgctgcgtccgatagccgatagcagaccaacctggcggagggaacagcgacggagcaatcgatacccaggccacagcaccaatgagccgcataggtgtgagagagactggggcgagcggtacgtccgagcagctgcagcgggaacaggatagcgacacatcggaacaggcggtgcggaagcaggaacgggatctcaaggagctcctcgagtggttccggcaaaatgacaagctgcccaaggagattgatccgctgctgctccggcgcttctaccagtgcatgtttggagacgtggaggagactcggaagctcatcgaggtgaactacgccctgcgcaaccggcaccctcacctgtttatcaagagggatcctctagacgcggacagcaagcgcacctttgactacgcagacattctaccgctgcctggcctaacgccggacaaatgcaaggtgtcgctgtactgctttcgggagttcgaggcctccaagatgcaccacacggaggacacgcgcgccttctttatggtcagcgactgccggttcgtgacgccggacgatctcgccaaaccggatgtcctgtccgaaggagaggtgcagatattcgacatgaagggcaccacaatgcggcacatttcgcggctgacgatcagcacgctgcgcgcctacatcaagttcctccagctggcatttccggtgcgcctgcgcgccattcacatgattaactgtccaacttacctggatcggatcgtcagcgtggtgaagccgttcatcagcgacgaggtcttcaagctgatccgtttccacacgcaaagcataaatacgctgtacgagttcgtgccgcgggagatgctgccggaggagtacggcggaggagccgggtccttagaagcactgcggacccatacccaaaaggccttggttgagcatcgcgactatctgatggaccccgatcactgggtggtggtgaagccggagaagcggaacgagatgagggaccccgaatcgcacagcatggagcggccacagaagatgcccaaggtggccaaggtcaaaaacaaagcgccggcggaggtgcaaattacggcggagcagttgctccgtgaggccaaggagcgagatctggagattctgccgccgccgccaaagcagaagatctccgatcccgccgagttggcagactatcagcagcggaagcgaaagaccttcgaggacaatctccgcaagaaccgcatggtagtcagccattggatcaaatatgctcagtgggaggagcagcagcaggagatccagcgggcgcgctctatctgggagcgggcgttggacaatgagcaccggaacgtgaccctctggctgaaatacgccgagatggagatgaagaacaagcaggtgaatcatgctcgcaatctgtgggatcgggcagtgaccatcatgccgcgagtcaaccagttctggtacaagtacacctacatggaggagatgctggagaatgtggcaggggcgcgacaggtgttcgagcgctggatggagtggcaaccggaggagcaggcctggcagacctacgtcaacttcgagctgcgctacaaggagatcgaccgggcacgggagatctacgagcgatttgtctatgtgcacccggacgtgaagaactggataaagttcgcccgctttgaggagtctcatgggtttatccacggctctcggcgggtatttgagcgcgctgtggagttctttggtgacgactacatcgaggagcgcctgttcatcgcctttgcacgtttcgaggagggtcaaaaggagcacgacagggcgcgcatcatctacaagtacgctttagatcacctacctaaagatcgcacacaggagctgttcaaggcctatacgaaacacgagaaaaagtacggcgacagagcgggtattgaggatgtgattgtttccaagcgcaagtaccagtacgagcaggaggtggccgccaatcccaccaactacgatgcctggttcgactatttgcgcttgattgaggctgagggcgatcgggatcagatccgtgagacgtacgaacgggccatttccaacgtgccgcctgccaatgaaaagaacttctggcgacgctacatttacctttggatcaattatgctttgtacgaggagcttgaagcggaggacgcggaacgcacgcggcagatctacaagacctgtctggagctaatacctcacaagcagttcaccttcagcaagctttggctgctgtacgcccaattcgagatccgctgcaaggagctgcagcgagcacgcaaagctctgggcttggccatcggcatgtgtcccagagataagctcttcagaggctatattgatctggagattcagttgcgtgagttcgagcgctgccgcatgctgtacgagaagttcctggagtttggaccggagaattgtgtcacttggatgaagtttgccgagctggagaatctgttgggcgacacggaccgggcgagagccattttcgagctggcggtgcagcagccgcgcctggacatgccagagctgctgtggaaggcgtacatcgacttcgaggtagccctaggcgaaacagagctagccagacagctttacgagcgactccttgagcggacgcagcatgtgaaagtgtggatgtcgtttgccaagttcgagatgggcctcagccacggcgacagcgggccagatgcggagctgaacgtgcagctggcaaggagaatctatgagcgagccaacgagatgttgcgtcagctgggagacaaggagtcgcgtgttctgttgctagaggcatggcgcgactttgaacgcgacgcctccgattcgcaggagatgcaaaaggtaatggacaagatgccgcggcgcatcaagaagcggcaaaagatcgtctcggacaatggcgtcgaggaaggttgggaggaggtattcgactacatctttcccgaggacgaaatggctcgacccaatctcaagttgctggctgcagctaagatgtggaagacacaaaaagacaacacggtggacgacccgcccgctacagctattgcatctgagccagaacctgcagctgatgctgccccagcggatacgacggatagcggtctccagcgagagtgcgatgtagttgcctgcgtagataagagaaggccgctgcgtcctggccagggtgaagagcagttcgcgcttgaacttgggcagctgttctatccagttgcaatcgtagaaggcatcgcacagcgcctcgctctgtgtccgcatcctgtccccaaaatagcagattacaaacacctccaaggtgacggccgagaaaaatacaatcgagatgatcatggcggtgtggtcgtggtcatccgctacgtacaggaaccgatggacccgcgccagatcgcggatgcactcgatgagttcctggtacacctcctcccgccaggcttcatatgtctgccctttattggacttttccgtcctgcagccaatccgccgcaccctcagctccaaagcacgcatatgacccgtgagcaggcagagaaacgcaggcggataggagtcactagcgcagttctgtatagcctgcactatcaagccgaagagctggtagatattgatgagcacatagtttctggtggagtgcatccagtcaacgccgaaccaggccggatacaggagctctcgatccgggcgaacgaccacgcggacgcaactcaaagtagtgccaaatacgaaaatactggcaaagaaatctcctcgggatcgcccaccagccgggctctagcgtccatgagccttaggagagagcgaatctcatggagctgcttcctcaccatgtacacattcgcaaacttcaaattggccacaatatcggtaatagttatggtcaggttctcgcacaatccggccatgttggtggtgaacagcagcctggccagcaagctcaagggaaacagcacggtgaccaccaagttgaccgtaatggagtataccacgtaa

SEQ ID NO: 28947 - protein, 1305 aa, DROSOPHILA
MSRIGVRETGASGTSEQLQREQDSDTSEQAVRKQERDLKELLEWFRQNDKLPKEIDPLLLRRFYQCMFGDVEETRKLIEVNYALRNRHPHLFIKRDPLDADSKRTFDYADILPLPGLTPDKCKVSLYCFREFEASKMHHTEDTRAFFMVSDCRFVTPDDLAKPDVLSEGEVQIFDMKGTTMRHISRLTISTLRAYIKFLQLAFPVRLRAIHMINCPTYLDRIVSVVKPFISDEVFKLIRFHTQSINTLYEFVPREMLPEEYGGGAGSLEALRTHTQKALVEHRDYLMDPDHWVVVKPEKRNEMRDPESHSMERPQKMPKVAKVKNKAPAEVQITAEQLLREAKERDLEILPPPPKQKISDPAELADYQQRKRKTFEDNLRKNRMVVSHWIKYAQWEEQQQEIQRARSIWERALDNEHRNVTLWLKYAEMEMKNKQVNHARNLWDRAVTIMPRVNQFWYKYTYMEEMLENVAGARQVFERWMEWQPEEQAWQTYVNFELRYKEIDRAREIYERFVYVHPDVKNWIKFARFEESHGFIHGSRRVFERAVEFFGDDYIEERLFIAFARFEEGQKEHDRARIIYKYALDHLPKDRTQELFKAYTKHEKKYGDRAGIEDVIVSKRKYQYEQEVAANPTNYDAWFDYLRLIEAEGDRDQIRETYERAISNVPPANEKNFWRRYIYLWINYALYEELEAEDAERTRQIYKTCLELIPHKQFTFSKLWLLYAQFEIRCKELQRARKALGLAIGMCPRDKLFRGYIDLEIQLREFERCRMLYEKFLEFGPENCVTWMKFAELENLLGDTDRARAIFELAVQQPRLDMPELLWKAYIDFEVALGETELARQLYERLLERTQHVKVWMSFAKFEMGLSHGDSGPDAELNVQLARRIYERANEMLRQLGDKESRVLLLEAWRDFERDASDSQEMQKVMDKMPRRIKKRQKIVSDNGVEEGWEEVFDYIFPEDEMARPNLKLLAAAKMWKTQKDNTVDDPPATAIASEPEPAADAAPADTTDSGLQRECDVVACVDKRRPLRPGQGEEQFALELGQLFYPVAIVEGIAQRLALCPHPVPKIADYKHLQGDGREKYNRDDHGGVVVVIRYVQEPMDPRQIADALDEFLVHLLPPGFICLPFIGLFRPAANPPHPQLQSTHMTREQAEKRRRIGVTSAVLYSLHYQAEELVDIDEHIVSGGVHPVNAEPGRIQELSIRANDHADATQSSAKYENTGKEISSGSPTSRALASMSLRRERISWSCFLTMYTFANFKLATISVIVMVRFSHNPAMLVVNSSLASKLKGNSTVTTKLTVMEYTT

SEQ ID NO: 28948 - DNA, 4461 bp, DROSOPHILA
tttataatctctttttggggagaaaaattttaaagcacaatagcagaaaaatatatcagataatataacaaaaaaaaagatcattatagttttttatttaagtggtttattactaaggtatccaaaaataaagcgaaaaatctgcaatttcagatatttagctttgttcaaaagcaacgatttttaggcggaagtgaatcagtcaccgctatccgtcgtatccgctggggcagcatcagctgcaggttctggctcagatgcaatagctgtagcgggcgggtcgtccaccgtgttgtctttttgtgtcttccacatcttagctgcagccagcaacttgagattgggtcgagccatttcgtcctcgggaaagatgtagtcgaatacctcctcccaaccttcctcgacgccattgtccgagacgatcttttgccgcttcttgatgcgccgcggcatcttgtccattaccttttgcatctcctgcgaatcggaggcgtcgcgttcaaagtcgcgccatgcctctagcaacagaacacgcgactccttgtctcccagctgacgcaacatctcgttggctcgctcatagattctccttgccagctgcacgttcagctccgcatctggcccgctgtcgccgtggctgaggcccatctcgaacttggcaaacgacatccacactttcacatgctgcgtccgctcaaggagtcgctcgtaaagctgtctggctagctctgtttcgcctagggctacctcgaagtcgatgtacgccttccacagcagctctggcatgtccaggcgcggctgctgcaccgccagctcgaaaatggctctcgcccggtccgtgtcgcccaacagattctccagctcggcaaacttcatccaagtgacacaattctccggtccaaactccaggaacttctcgtacagcatgcggcagcgctcgaactcacgcaactgaatctccagatcaatatagcctctgaagagcttatctctgggacacatgccgatggccaagcccagagctttgcgtgctcgctgcagctccttgcagcggatctcgaattgggcgtacagcagccaaagcttgctgaaggtgaactgcttgtgaggtattagctccagacaggtcttgtagatctgccgcgtgcgttccgcgtcctccgcttcaagctcctcgtacaaagcataattgatccaaaggtaaatgtagcgtcgccagaagttcttttcattggcaggcggcacgttggaaatggcccgttcgtacgtctcacggatctgatcccgatcgccctcagcctcaatcaagcgcaaatagtcgaaccaggcatcgtagttggtgggattggcggccacctcctgctcgtactggtacttgcgcttggaaacaatcacatcctcaatacccgctctgtcgccgtactttttctcgtgtttcgtataggccttgaacagctcctgtgtgcgatctttaggtaggtgatctaaagcgtacttgtagatgatgcgcgccctgtcgtgctccttttgaccctcctcgaaacgtgcaaaggcgatgaacaggcgctcctcgatgtagtcgtcaccaaagaactccacagcgcgctcaaatacccgccgagagccgtggataaacccatgagactcctcaaagcgggcgaactttatccagttcttcacgtccgggtgcacatagacaaatcgctcgtagatctcccgtgcccggtcgatctccttgtagcgcagctcgaagttgacgtaggtctgccaggcctgctcctccggttgccactccatccagcgctcgaacacctgtcgcgcccctgccacattctccagcatctcctccatgtaggtgtacttgtaccagaactggttgactcgcggcatgatggtcactgcccgatcccacagattgcgagcatgattcacctgcttgttcttcatctccatctcggcgtatttcagccagagggtcacgttccggtgctcattgtccaacgcccgctcccagatagagcgcgcccgctggatctcctgctgctgctcctcccactgagcatatttgatccaatggctgactaccatgcggttcttgcggagattgtcctcgaaggtctttcgcttccgctgctgatagtctgccaactcggcgggatcggagatcttctgctttggcggcggcggcagaatctccagatctcgctccttggcctcacggagcaactgctccgccgtaatttgcacctccgccggcgctttgtttttgacctggtgaaattttggattggataagttggtttggtggattgccgacgatggcacataccttggccaccttgggcatcttctgtggccgctccatgctgtgcgattcggggtccctcacttagcaatgttatgttggaaaaacgctaaatcgcaacaaaataaataatgccactaacaacgtcgtgcgataacgataggcatatttcgatagttcgctatcgataatcgctttttgtctccactggccttttgcgcattctacttttgaatgtgtgtttcaattaaatccctttttttgttgtatttccataaatatatactagtataataattgtacattgttgggttaaaaataaaacggataacgcattttttacttatttatttttgagcaatttcaacacaaatttaaaaaaaaaatggatatttaagagatgaaaagccacaggaactgtttatcccaatacacttgaaacacttttaaccgtcttcagttgaaggagactccttgctaccgtggaagatgttctaggtaatcatttgaaaaatctccacgaactctcgttccgcttctccggcttcaccaccacccagtgatcggggtccatcagatagtcgctacaaaaggcaacgaggcgttactgaataactataacatgcagatcgaaacccaccgatgctcaaccaaggccttttgggtatgggtccgcagtgcttctaaggacccggctcctccgccgtactcctccggcagcatctcccgcggcacgaactcgtacagcgtatttatgctttgcgtgtggaaacggatctaaagtgtagaaagtaatggtgagatgaagctattagagacataatggcttctcaagaaacccaccagcttgaagacctcgtcgctgatgaacggcttcaccacgctgacgatccgatccaggtaagttggacagttaatcatgtgaatggcgcgcaggcgcaccggaaatgccagctggaggaacttgatgtaggcgcgcagcgtgctgatcgtcagccgcgaaatgtgccgcattgtggtgcccttcatgtcgaatatctgcacctctccttcggacaggacatccggtttggcgagatcgtccggcgtcacgaaccggcagtcgctgaccataaagaaggcgcgcgtgtcctccgtgtggtgcatctggggatagcaatcggcggtatggagcgcaagttcctacagcaaagagaagctattactcaccttggaggcctcgaactcccgaaagcagtacagcgacaccttgcatttgtccggcgttaggccaggcagcggtagaatgtctctgaaattcgagtgttggggtatacgggtatgtatgtttttggaacatggccctgcctcaaaggaaagggaatcttttctcccaataaggacacacttacgcgtagtcaaaggtgcgcttgctgtccgcgtctagaggatccctcttgataaacaggtgagggtgccggttgcgcagggcgtagttcacctcgatgagcttccgagtctcctccacgtctccaaacatgcactggtagaagcgccggagcagcagcggatctgttaatacacatatggtacgatacaatgaagtttttgctaaggagttaagcccatggaactttgcacattacgggaatattaattaattcaaacatcgtgttggacatattgaattgggaagtgcggttcgatttagggagacttgcctgtacattcactgtttgtatacaattgactacagtgacgtaaggcggcgagcggagcggcctactaacgacctaattaatggacggtgggtggtgggaggtggaatgggactgatgggcagtgaacggatgttggattcccgcacggttttcgggctcatcgcttaccaatctccttgggcagcttgtcattttgccggaaccactcgaggagctccttgagatcccgttcctgcttccgcaccgcctgttccgatgtgtcgctatcctgttcccgctgcagctgctcggacgtaccgctcgccccagtctctctcacacctatgcggctcattggtgctgtggcctgggtatcgattgctccgtcgctgttccctccgccaggttggtctgctatcggctatcggacgcagcaatcgctttcgaatcactttcaaaaacgctttcgaatcactt

SEQ ID NO: 28949 - DNA, 1218 bp, DROSOPHILA
atgccgatggccaagcccagagctttgcgtgctcgctgcagctccttgcagcggatctcgaattgggcgtacagcagccaaagcttgctgaaggtgaactgcttgcggcacgttggaaatggcccgttcgtacgtctcacggatctgatcccgatcgccctcagcctcaatcaagcgcaaatagtcgaaccaggcatcgtagttgatgatgcgcgccctgtcgtgctccttttgaccctcctcgaaacgtgcaaaggcgatgaacaggcgctcctcgatgtagtcgtcaccaaagaactccacagcgcgctcaaatacccgccgagagccgtggataaacccatgagactcctcaaagcgggcgaactttatccagttcttcacgtccgggtgcacatagacaaatcgctcgtagatctcccgtgcccggtcgatctccttgtagcgcagctcgaagttgacgtaggtctgccaggcctgctcctccggttgccactccatccagcgctcgaacacctgtcgcgcccctgccacattctccagcatctcctccatgtaggtgtacttgtaccagaactggttgactcgcggcatgatggtcactgcccgatcccacagattgcgagcatgattcacctgcttgttcttcatctccatctcggcgtatttcagccagagggtcacgttccggtgctcattgtccaacgcccgctcccagatagagcgcgcccgctggatctcctgctgctgctcctcccactgagcatatttgatccaatggctgactaccatgcggttcttgcggagattgtcctcgaaggtctttcgcttccgctgctgatagtctgccaactcggcgggatcggagatcttctgctttggcggcggcggcagaatctccagatctcgctccttggcctcacggagcaactgctccgccgtaatttgcacctccgccggcgctttgtttttgacctgaaacccaccagcttgaagacctcgtcgctgatgaacggcttcaccacgctgacgatccgatccagcgtgctgatcgtcagccgcgaaatgtgccgcattgtggtgcccttcatgtcgaatatctgcacctctccttcggacaggacatccggtttggcgagatcgtccggcgtcacgaaccggcagtcgctgaccataaagaaggcgcgcgtgtcctccgtgtggtgcatctggggatag

SEQ ID NO: 28950 - protein, 405 aa, DROSOPHILA
MPMAKPRALRARCSSLQRISNWAYSSQSLLKVNCLRHVGNGPFVRLTDLIPIALSLNQAQIVEPGIVVDDARPVVLLLTLLETCKGDEQALLDVVVTKELHSALKYPPRAVDKPMRLLKAGELYPVLHVRVHIDKSLVDLPCPVDLLVAQLEVDVGLPGLLLRLPLHPALEHLSRPCHILQHLLHVGVLVPELVDSRHDGHCPIPQIASMIHLLVLHLHLGVFQPEGHVPVLIVQRPLPDRARPLDLLLLLLPLSIFDPMADYHAVLAEIVLEGLSLPLLIVCQLGGIGDLLLWRRRQNLQISLLGLTEQLLRRNLHLRRRFVFDLKPTSLKTSSLMNGFTTLTIRSSVLIVSREMCRIVVPFMSNICTSPSDRTSGLARSSGVTNRQSLTIKKARVSSVWCIWG

SEQ ID NO: 28951 - DNA, 2198 bp, DROSOPHILA
gatagaacagctgcccaagttcaagcgcgaactgctcttcaccctggccaggacgcagcggccttctcttatctacgcaggcaactacatcgcactctcgctggagaccttcgagcaggcaaggcacaattatatattcaaatgtcctttgatttgattcaaatatgatatgattcacttgattccaggtcatgaggttcacatactctgttttcacactcttgctgagggccaagtaagaactttataatctctttttggggagaaaaattttaaagcacaatagcagaaaaatatatcagataatataacaaaaaaaaagatcattatagttttttatttaagtggtttattactaaggtatccaaaaataaagcgaaaaatctgcaatttcagatatttagctttgttcaaaagcaacgatttttaggcggaagtgaatcagtcaccgctatccgtcgtatccgctggggcagcatcagctgcaggttctggctcagatgcaatagctgtagcgggcgggtcgtccaccgtgttgtctttttgtgtcttccacatcttagctgcagccagcaacttgagattgggtcgagccatttcgtcctcgggaaagatgtagtcgaatacctcctcccaaccttcctcgacgccattgtccgagacgatcttttgccgcttcttgatgcgccgcggcatcttgtccattaccttttgcatctcctgcgaatcggaggcgtcgcgttcaaagtcgcgccatgcctctagcaacagaacacgcgactccttgtctcccagctgacgcaacatctcgttggctcgctcatagattctccttgccagctgcacgttcagctccgcatctggcccgctgtcgccgtggctgaggcccatctcgaacttggcaaacgacatccacactttcacatgctgcgtccgctcaaggagtcgctcgtaaagctgtctggctagctctgtttcgcctagggctacctcgaagtcgatgtacgccttccacagcagctctggcatgtccaggcgcggctgctgcaccgccagctcgaaaatggctctcgcccggtccgtgtcgcccaacagattctccagctcggcaaacttcatccaagtgacacaattctccggtccaaactccaggaacttctcgtacagcatgcggcagcgctcgaactcacgcaactgaatctccagatcaatatagcctctgaagagcttatctctgggacacatgccgatggccaagcccagagctttgcgtgctcgctgcagctccttgcagcggatctcgaattgggcgtacagcagccaaagcttgctgaaggtgaactgcttgtgaggtattagctccagacaggtcttgtagatctgccgcgtgcgttccgcgtcctccgcttcaagctcctcgtacaaagcataattgatccaaaggtaaatgtagcgtcgccagaagttcttttcattggcaggcggcacgttggaaatggcccgttcgtacgtctcacggatctgatcccgatcgccctcagcctcaatcaagcgcaaatagtcgaaccaggcatcgtagttggtgggattggcggccacctcctgctcgtactggtacttgcgcttggaaacaatcacatcctcaatacccgctctgtcgccgtactttttctcgtgtttcgtataggccttgaacagctcctgtgtgcgatctttaggtaggtgatctaaagcgtacttgtagatgatgcgcgccctgtcgtgctccttttgaccctcctcgaaacgtgcaaaggcgatgaacaggcgctcctcgatgtagtcgtcaccaaagaactccacagcgcgctcaaatacccgccgagagccgtggataaacccatgagactcctcaaagcgggcgaactttatccagttcttcacgtccgggtgcacatagacaaatcgctcgtagatctcccgtgcccggtcgatctccttgtagcgcagctcgaagttgacgtaggtctgccaggcctgctcctccggttgccactccatccagcgctcgaacacctgtcgcgcccctgccacattctccagcatctcctccatgtaggtgtacttgtaccagaactggttgactcgcggcatgatggtcactgcccgatcccacagattgcgagcatgattcacctgcttgttcttcatctccatct

SEQ ID NO: 28952 - DNA, 198 bp, DROSOPHILA
atgtacgccttccacagcagctctggcatgtccaggcgcggctgctgcaccgccagctcgaaaatggctctcgcccggtccgtgtcgcccaacagattctccagctcggcaaacttcatccaagtgacacaattctccggtccaaactccaggaacttctcgtacagcatgcggcagcgctcgaactcacgcaactga

SEQ ID NO: 28953 - protein, 65 aa, DROSOPHILA
MYAFHSSSGMSRRGCCTASSKMALARSVSPNRFSSSANFIQVTQFSGPNSRNFSYSMRQRSNSRN

SEQ ID NO: 28954 - DNA, 3889 bp, DROSOPHILA
ctttgattttcgggcagtaggcatcacgcgttccagtttttgctacgtgtacctcaaatggatcaattactgtgtggatatgcgccgagatgccaactctatgggaggcgcaccacctgcccaagcaccagcagctgctggaggagcttcgtccgctccggcaacagcgggtgttgctccaccagcgccggttacgcccgcccacaatgactccaagagcactcccaatctctcggcgcacggtggacaggctggtccgtcttcaggtcaatccaagtcacagtcacagcagcagctgcgccgtccacaaaagagtgttgcccaggaaaccagcgtaggcggaggaggtgtagttgtcggagggactactgtccctggcacaggaggagtgaccggtggtggtggagatccgcagctgagcagctcccatagctttgccaatatctcccggcaaacatcggagagtgctcccggactgggtggctacgtagcgtatatggatcaaaatgttttcgtgaagctggctaagagtagcaccaccacaggagcaggagccggagcaccaactagccggaaagaaagtcaggaaaaaccagcacttcgtctgaaactagccagcgtgggaaaagatgcaccgctcgtgtccctgtgcctggccctgggccttttggccaggcgatcactggccacggcctcgcacagcgcgttgaccggtgtggagttctttctgcatggtttacatgctttgttcaagggagattttcggatcacatcgccgcgcgacgaatgggtctttgcggacatggagctacttcattccgttgtggcaccggcggttaagatggcacttaagctgcagcaggaccacattaccaatcccgatgagttcctggatcctcatgccctgtacgatgccattgacaactgctctaacgagttggtaatttcgcatgaggctgatcccgtttggcgaagtgccgtactacgaggagcacccaatctacttgccctgaggcacgtaatggaggatggctcggatgagtaccgcattattcggctgacaaagaggtgtctgagcttccgggtaatcaaacttaacagagagtgcgttcgtggcctgtgggcaggacagcagcaggaactgatctacctgaggaatagaaacccggagcgcggaagtatccagaatgccaagcaggcgctgcgcaacatcatcaactccagctgcgatcaacctattgggtatcccatctacgtgtctccactcacaacgtcatatgcggatacaaatgcccaactgtgcgaagtgattggcggcgccatcacattagacaccatccggcatacagtgctggggtggtggcaccgtatacgagagcgctgtcgccagggatgcagttcgggatctgctctagaaccgcatccgggatcgggacccgtccaactgggtgcctgcaattttggcagcggtggcagcgtcgttggtgccgcatccactgctaccggagttggtgcctcgacaggatctggcttgggagtagctgctcccggcaccgctggcagcacgggaggcgagtccggggatctagctcctgtttttatttctgctcctctctacaacactcttacggttaacagttactacagcgtgcgtccgggaaatgttcccggaggacccattcccggaaatctgggcggtaactatgtgagcgacagtttggcggtggtgcgtggaggtctggcagtgatgcctgtgaaacccacatccactacacttattgcgggtctgctgaacagagaacgcgatgaaacatctggatctggaattatgggagcaggagccagtggacccaccagagcaacgagtagtggcggagtgcgcagtcgaagacctgaagtcggcagcagtcgaggtagagatcatgaacgcagagccactttgcccatagcgagcggtggagccggcggtgagccaggaaaggatcttaccgcgcctcaaacccaagtggagcatgaaccaagcccacgcagcacaaagctctcctcttcttctggcagtctgggtcttggaatgggcgtgggccttggcaacattatcaccacgccgggagattatccacggaaaaccaagggacccatttgcctcaccgccgtggacacaggaactagtagttcagcggcagagggaaagcccgcaggatcgggaacagtggctggaactggagtaggtggcgttatcaggaagccgcgcattgagatcttcaagaaagtcataattgttgatgacactggggtgagtagaaataattatagaccctttacattaaggtagtaaaactaaacccaaattgaacagatttacgactgcctggatatcatcgatgctgttgtgtggccaactgaacgaatgcgcaacaatggtggcaggctgtcctggaaagactgggagccgagtgccggcatggtgggccatgtggtccactgctggacgcctaaccataaggacattcgcttccgttcgcatgtcaaccgctatgtttacctcgtggagatcggtgaccactatgtgcccgtagaggagttgggtctaagggaatataatcagattatgggcagcaccgaggagatggccaattcgcgacgaagctccatccagcgtgattttcacgagtacaacattcagctaaagctggctggtcttgctccaattattggaggcggcgaatcctcaacggcaacgactagtgatgcttctaaatcacacaaggcgaaaatccgagcggtaagcagcagcagttccgaggacgaggatacgtcgtccactcgctccattccattaccacagggcgatgatggcgacttgacgaacttcaccaggctggtgagcatgtggaaggaaatcattttggacaataacaagagaagactctacgatatgggtgagttgtccccagagctgctacaaaaactggatgatgccgttcagcagcagcagcaactggaagatgcactagcggaggaatcgaaggaaaagggcacagccacagtcactgccaacgaaggtgaagagggggtaggagaaatggaaattgagccagaacaggaacagaaagaagtggtgtatctcgaggagcagtcaccgctggaagaggtgaccgtttcgaagcccgacgagcagccagctcagccaacaattccggctagtcccgttcctgctgagaccagctctacttccagtgccaaatccacaagttccccttcattatgccaggaggaagaggatgcagtcgatccggaggagacccctgaactggcctccgaggagtcaccaagcgatgagaatggcgagagcgaggcgggaacaacggtctaagtagatcacatatatttgcatttgtttgccaagcaaacaccccaatggcagggactgacaccaaggcggacatggacacaaccttgtaatacatatcagcaaagagcagaaatatggatattgaaatcgcagaggagacaaccttgccccgggcttccgcactgtacgccttttccatgggtgtggcccatatccgagcaccgttcctggtcagaaaaacaaacaaacaaacaaacaacaacaaatgagaacacttccaagaaatcaaagtaatgtttataaaacgactgcgtttagtgtatgcataggaattaggagcaaactacaataattcagacaaaaacaaacaaaaaaacaaagaattcaattttagtattaataaaagttataggttatactcggtatataggaaaaagagcgcaaatcgagagcaggatattggaaagatcataaaaaatatatttaactaattgttgtaacttgcgaattgtataatatggaaacggaaaaccaaat

SEQ ID NO: 28955 - DNA, 924 bp, DROSOPHILA
atgctcaccagcctggtgaagttcgtcaagtcgccatcatcgccctgtggtaatggaatggagcgagtggacgacgtatcctcgtcctcggaactgctgctgcttaccgctcggattttcgccttttcctgtgtccacggcggtgaggcaaatgggtcccttggttttccgtggataatctcccggcgtggtgataatgttgccaaggcccacgcccattccaagacccagactgccagaagaagaggagagctttgtgctgcgtgggcttggttcatgctccacttgggtttgaggcgcggtaagatcctttcctggctcaccgccggctccaccgctcgctatgggcaaagtggctctgcgttcatgatctctacctcgactgctgccgacttcaggtcttcgactgcgcactccgccactactcgttgctctgcggtgccgggagcagctactcccaagccagatcctgtcgaggcaccaactccggtagcagtggatgcggcaccaacgacgctgccaccgctgccaaaattgcaggcacccagttggacgggtcccgatcccggatgcggttctagagcagatcccgaactgcatccctggcgacagcgctctcgtatacggtgccaccaccccagcactgtatgccggatggtgtctaatgtgatggcgccgccaatcacttcgcacagttgggcatttgtatccgcatatgacgttcgcctgcttggcattctggatacttccgcgctccgggtttctattcctcaggtagatcagttcctgctgctgtcctgcccacaggccacgaacgcactctctgttaagtttgattacccggaagctcagacacctctttgtcagccgaataatgcggtactcatccgagccatcctccattacgtgcctcagggcaagtag

SEQ ID NO: 28956 - protein, 307 aa, DROSOPHILA
MLTSLVKFVKSPSSPCGNGMERVDDVSSSSELLLLTARIFAFSCVHGGEANGSLGFPWIISRRGDNVAKAHAHSKTQTARRRGELCAAWAWFMLHLGLRRGKILSWLTAGSTARYGQSGSAFMISTSTAADFRSSTAHSATTRCSAVPGAATPKPDPVEAPTPVAVDAAPTTLPPLPKLQAPSWTGPDPGCGSRADPELHPWRQRSRIRCHHPSTVCRMVSNVMAPPITSHSWAFVSAYDVRLLGILDTSALRVSIPQVDQFLLLSCPQATNALSVKFDYPEAQTPLCQPNNAVLIRAILHYVPQGK

SEQ ID NO: 28957 - DNA, 2521 bp, DROSOPHILA
ataacaacctcaacagcatcttctacgagcacttaacccgctctctgcagcactccctgtgcggcgatctcctgatgggtcgctggggaaatgtcaaccaaggagactgctttggtaacaacataattttatacctttcctacaaagaggctgagaccctgtttatcctttcagttcttgcctcagacgatcttaactgtttggttcacatcattgagctaggcaatggcttatgcacgtttcaaatgcgcggcttggagttccgcggcacctattgccagcaacgcgaggtggaggccatcaccgaggacgtagaggacaacgacggatgctgttgctgcgatccaggccacctgccccaattgctcagcgccaacgccatgttctccacccgctggctggcctggcaggtggtcgcagcccagtatgtcatcgagggctactcaatatcagacaacttagccagcgccacgctacaggtgtttgaatatcgcaaggtgctcataacctactacattaaggtgagccctctggatttgctcgtaataacttttgctaatcaaaaaccattttatagagcatcatctactatgttgtaaagaatcccaagcttgagcagtggcttgcctccggtcccatacaagatgccctccagcatactctaagccgacagttcgttgacctagatcccatttttaatttcaatttagacgaggactttgattttcgggcagtaggcatcacgcgttccagtttttgctacgtgtacctcaaatggatcaattactgtgtggatatgcgccgagatgccaactctatgggaggcgcaccacctgcccaagcaccagcagctgctggaggagcttcgtccgctccggcaacagcgggtgttgctccaccagcgccggttacgcccgcccacaatgactccaagagcactcccaatctctcggcgcacggtggacaggctggtccgtcttcaggtcaatccaagtcacagtcacagcagcagctgcgccgtccacaaaagagtgttgcccaggaaaccagcgtaggcggaggaggtgtagttgtcggagggactactgtccctggcacaggaggagtgaccggtggtggtggagatccgcagctgagcagctcccatagctttgccaatatctcccggcaaacatcggagagtgctcccggactgggtggctacgtagcgtatatggatcaaaatgttttcgtgaagctggctaagagtagcaccaccacaggagcaggagccggagcaccaactagccggaaagaaagtcaggaaaaaccagcacttcgtctgaaactagccagcgtgggaaaagatgcaccgctcgtgtccctgtgcctggccctgggccttttggccaggcgatcactggccacggcctcgcacagcgcgttgaccggtgtggagttctttctgcatggtttacatgctttgttcaagggagattttcggatcacatcgccgcgcgacgaatgggtctttgcggacatggagctacttcattccgttgtggcaccggcggttaagatggcacttaagctgcagcaggaccacattaccaatcccgatgagttcctggatcctcatgccctgtacgatgccattgacaactgctctaacgagttggtaatttcgcatgaggctgatcccgtttggcgaagtgccgtactacgaggagcacccaatctacttgccctgaggcacgtaatggaggatggctcggatgagtaccgcattattcggctgacaaagaggtgtctgagcttccgggtaatcaaacttaacagagagtgcgttcgtggcctgtgggcaggacagcagcaggaactgatctacctgaggaatagaaacccggagcgcggaagtatccagaatgccaagcaggcgctgcgcaacatcatcaactccagctgcgatcaacctattgggtatcccatctacgtgtctccactcacaacgtcatatgcggatacaaatgcccaactgtgcgaagtgattggcggcgccatcacattagacaccatccggcatacagtgctggggtggtggcaccgtatacgagagcgctgtcgccagggatgcagttcgggatctgctctagaaccgcatccgggatcgggacccgtccaactgggtgcctgcaattttggcagcggtggcagcgtcgttggtgccgcatccactgctaccggagttggtgcctcgacaggatctggcttgggagtagctgctcccggcaccgctggcagcacgggaggcgagtccggggatctagctcctgtttttatttctgctcctctctacaacactcttacggttaacagttactacagcgtgcgtccgggaaatgttcccggaggacccattcccggaaatctgggcggtaactatgtgagcgacagtttggcggtggtgcgtggaggtctggcagtgatgcctgtgaaacccacatccactacacttattgcgggtctgctgaacagagaacgc

SEQ ID NO: 28958 - DNA, 369 bp, DROSOPHILA
atgtccgcaaagacccattcgtcgcgcggcgatgtgatccgaaaatctcccttgaacaaagcatgtaaaccatgcagaaagaactccacaccggtcaacgcgctgtgcgaggccgtggccagtgatcgcctggccaaaaggcccagggccaggcacagggacacgagcgccacccagtccgggagcactctccgatgtttgccgggagatattggcaaagctatgggagctgctcagctgcggatctccaccaccaccggtcactcctcctgtgccagggacagtagtccctccgacaactacacctcctccgcctacgctggtttcctgggcaacactcttttgtggacggcgcagctgctgctgtga

SEQ ID NO: 28959 - protein, 122 aa, DROSOPHILA
MSAKTHSSRGDVIRKSPLNKACKPCRKNSTPVNALCEAVASDRLAKRPRARHRDTSATQSGSTLRCLPGDIGKAMGAAQLRISTTTGHSSCARDSSPSDNYTSSAYAGFLGNTLLWTAQLLL

SEQ ID NO: 28960 - DNA, 4576 bp, DROSOPHILA
aaaagtggtaaagtaccgagaagtggatgaactaagaagaagacgcagaggaggctccccggcagatgcggctgaggctggaaacgagtttgccctagtcaaacagaccaagcaggcctcgcggaattcctcctcctcgaattcgacgcacagcatcagcttgaccgatagcctgacggctgacattcacaagatgctctggctgatgcacggcggagccgtcgatgaccggggccgtccaatcaccggcacctcggcggacggcactccaatcccggcaagcagcagcctggtcccgccgaacatgtccaacgcacacttccagttctaccaggatgctattcaagcgcttcagggcacccatcccacttccggttccagtgtggaacacatgaccaacattgagttggctagggataagttgcgcctggatgccaaattgatgtgcgagcagctggttgcggcggcggaggccaactcaggagtccgaggaaacacactcgcaactcagcaaatgacgcagcagcaggtgggcatgttaatgcgcggaggctctagctcccggcacccatccagtgctccgttctcggtccaaggattaatcaatgtgatccgaagtgagcgcccggcagcgcgcagtcaattggacgccttgcagcaactaagtgatgcagcagcagcattggccgctaatgccagtgaggctgcctccgtttcagcctccggtgcaggaggaggagcatcgagtggcgggggaggagttttaagcgccctaggactggcgaatcaccccagcaaccagatcagccaaatcagtcagctcagtcagatgagccaacccatgctgaatgtggacgggcattttgcaccctactgcgactactggagacccgcgtgccttctatccgcgacagaaaagccagcggctccaaagagtttctacaagtaccgattcaagtggtgcggccaagagcatgagttcaagattgccatggaccggctagagcttcttgccctgttcgaccgtgatctccactggatgcacgtccttctggccagtctgctgtgcaccctggtagcctgcttgggagcggcgatcttgcagcacgatcactacaaggatctatgtgccctgctcttctgcgcagtgatcgcgggagctcagtactcgctagtaaaaagtgtgcaaccggacgcagcttcgccagtgcacggattcaacaagacagtcgcctactcgcgggctatatacttctgccttgccgggggcatgctgttgctactaaagcgcctagatacggactacggggaacggacaccggaccctgtggtattctttggcatgcgctactctcctgctgatgtggttgccctccttctgcaggcgctctacatcttgctgctgtgcttccccatcatattctcggtgggattgtgtccccagataaacacgtttcttatgtacctgctcgagcagatcgacatgcatgtctttggcggaaatgctgctagcagtcttctaggtgagaactctttaatccctattttgcttcttagactaattcctaatactgtacaggttcctttttgtgcgtcgtccggtcggtgctagctgtaatgctgctttacggacctctgtacggagcattggacgagcagcgcgggacgcagtacattctgttctccatcttctgcgctatgctggtacccctgggctaccatctgtctcgatgtgccagcgacttcagccacctgtggcggctgatcaagacgtgcattgtgagcacgtatcgggacgatgaggatgaagatctcagccagatgcaacatatagcaaccggaacagttactggatcagggactgccaatagcactgcccttcaattgaccaccagtactccaaagcagcacaggcaaacagacgtaaaaacggaacatgagcagatcgagctgagttcgctagaaaagctaacagtcaacgaagaacatcacgagaaagatcacggagcagatgatcaactagagacggatcaagatctgcctctgcaacaaaagcacagcaaatcaaaaacttcgtccttgggcagcagtcagcaaaccctgggtaagacgatcagcagtagcaagagggccataaccgcctccagttcgtgtacctccattggaacgggagaaccagcggtggaagctggagctttgaccgaggaggcggtggaaggcgaggagcaacgtaggaatacactggctggcgaggtggggagcaagcacgaattagcggagaactatgaccaagccgccaaaattgatgagtgtgaagacaagatctccagctcatctgccacaaaccccggggacatgtctacgttgacagcgggggcgggcacagccaccactgatgccacacccgcttgcctggaggcagatcctgacgccgaagctgaggcacctgctgacgaaaagcaacatcaggggattctgggaacgggaactggaactggaactggaactaccgaagccagtgaaaatggcagcggtggcggcgctaacggaaataccaatagcaatgggactggcaacgaccttcccgatccactaccacgaaagctgcaggctacagtaacaactcggctgaagaacgacttggtggtgatgaccctgctggcggtcagtgtactggggttgcactgtagcactgtattcaccgccctgcagccggatctcaacgtggttctctactcgttcatcggcgtacttggacttctcctgcactacatagtgccgcagatgagaaagcatatgccctggctttgtttctcccgtccgttgctccggcagcgtgagttcggccagtttgaggtgctcaacgcccccaagatcatgtggttcgaaaagctctacatttacctcagtgtcctggagcggaatgtgctctttcccctgctggccatttcctctctaacggcggactcgcagttgattgtggctaagtttggattgccctggggcacgctcatcgtggcgatctgcgccctaaagtgtgagtcatccgatcatagaaatcgatcatttgaaatcgttattaaatgtatattaatatatctaaagactgaacggcaaaccctatatgcagatcttccatctccctcacttttaagctaatcccaatccatctatctctttttatcagttgtaaggaacgcttactcggatccgaccaaccagtacctgataataatttttacggttctgctattccgcatcgactttgccatggccacagagacattcattatagattatttctttgtgtcgctggcctttcgcaagtgctgtgacttcctgcttaaggtgagaacttggcctggccattatactattctaataaatgctaatgcatgttctttcttagctgcaatttattgtgacgtacatcgctccgtggcaaattacttggggatcggccttccacgccttcgcccagccatttagtgtaccgcactcggcaatgctgttcctgcaggcggccatctccgcagtgctctccactcccctcaatccgtttttgggcagcgccatctttctcacttcgtatgtgcgtcctattaagttctgggagcgggactacaacacgcgccggatagaccactccaatacaaggctaagctcccagctcgagcgggacttgggtgcggacgataacaacctcaacagcatcttctacgagcacttaacccgctctctgcagcactccctgtgcggcgatctcctgatgggtcgctggggaaatgtcaaccaaggagactgctttggtaacaacataattttatacctttcctacaaagaggctgagaccctgtttatcctttcagttcttgcctcagacgatcttaactgtttggttcacatcattgagctaggcaatggcttatgcacgtttcaaatgcgcggcttggagttccgcggcacctattgccagcaacgcgaggtggaggccatcaccgaggacgtagaggacaacgacggatgctgttgctgcgatccaggccacctgccccaattgctcagcgccaacgccatgttctccacccgctggctggcctggcaggtggtcgcagcccagtatgtcatcgagggctactcaatatcagacaacttagccagcgccacgctacaggtgtttgaatatcgcaaggtgctcataacctactacattaaggtgagccctctggatttgctcgtaataacttttgctaatcaaaaaccattttatagagcatcatctactatgttgtaaagaatcccaagcttgagcagtggcttgcctccggtcccatacaagatgccctccagcatactctaagccgacagttcgttgacctagatcccatttttaatttcaatttagacgaggactttgattttcgggcagtaggcatcacgcgttccagtttttgctacgtgtacctcaaatggatcaattactgtgtggatatgcgccgagatgccaactctatgggaggcgcaccacctgcccaagcaccagcagctgctggaggagcttcgtccgctccggcaa

SEQ ID NO: 28961 - DNA, 540 bp, DROSOPHILA
atggcgctgcccaaaaacggattgaggggagtggagagcactgcggagatggccgcctgcaggaacagcattgccgagtgcggtacactaaatggctgggcgaaggcgtggaaggccgatccccaagtaatttgccacggagcgatggcgcagatcgccacgatgagcgtgccccagggcaatccaaacttagccacaatcaactgcgagtccgccgacactgaggtaaatgtagagcttttcgaaccacatgatcttgggggcgttgagcacctcaaactggccgaactcacgctgccggagcaacggacgggagaaacaaagccagggcatatgctttctcatctgcggcactatgtagtgcaggagaagtccaagtacgccgatgaacgagtagagaaccacgttgagatccggctgcagggcgtgatcgtgctgcaagatcgccgctcccaagcaggctaccagggtgcacagcagactggccagaaggacgtgcatccagtggagatcacggtcgaacagggcaagaagctctag

SEQ ID NO: 28962 - protein, 179 aa, DROSOPHILA
MALPKNGLRGVESTAEMAACRNSIAECGTLNGWAKAWKADPQVICHGAMAQIATMSVPQGNPNLATINCESADTEVNVELFEPHDLGGVEHLKLAELTLPEQRTGETKPGHMLSHLRHYVVQEKSKYADERVENHVEIRLQGVIVLQDRRSQAGYQGAQQTGQKDVHPVEITVEQGKKL

SEQ ID NO: 28963 - DNA, 2270 bp, DROSOPHILA
tcctacgcaaggctatggcgacggaactccctccgctggaggaggagggcctggtaacagcagcacatgcagcagtctctttttcggcagctccagcgcctgcggttccacaacagcattgattgaacctccagtataccccatagtggagcactctgacgagaagacggcgcacgaagaacacggtgatgattgcttgggaataggacaaggcaacgccgacgatgacgatgaggtggacgacgtcccgatccgaagaagaacgcgggcgttaggctgcagccaaacgcactacagtgttgaatcggatgtaggtggcttcttggcagacgaagtcggtgctgacgaggatgtgtttaaagatttcgacgacaaccttgagcacattcttagtgagctgcagcagacgcataatcagctggatgacgtcctaaagacccacgatctccatcaccactcgcatttgcaccatcataaagcagcatcagtggagggcgctgggccgtcgggaggatccgtggcagtaggggtaagtgccggaaatgatgacgaagacgaggaaacggaggataataacacggggtcgagatctccattgctcaacgatcgcaatcgccagccggcaacactgcgagagattcaagctgacaagcaactccgtcaggagctatcacaccagtccggggcagtaattcctgcccctaatcctcccgtccccatacgcagcgaggcggactcaggctgcccttcaagtgattgcgagcaagtgagcgccagctccaaggaccaactcctgtcgggaatagagttggagctgcagcagtatcagatcctgcaaaggtgtcaactagacgaagagcaaccatgcacctcgaaaatggctgccaaaagcctgggagccattccaaaagtggtaaagtaccgagaagtggatgaactaagaagaagacgcagaggaggctccccggcagatgcggctgaggctggaaacgagtttgccctagtcaaacagaccaagcaggcctcgcggaattcctcctcctcgaattcgacgcacagcatcagcttgaccgatagcctgacggctgacattcacaagatgctctggctgatgcacggcggagccgtcgatgaccggggccgtccaatcaccggcacctcggcggacggcactccaatcccggcaagcagcagcctggtcccgccgaacatgtccaacgcacacttccagttctaccaggatgctattcaagcgcttcagggcacccatcccacttccggttccagtgtggaacacatgaccaacattgagttggctagggataagttgcgcctggatgccaaattgatgtgcgagcagctggttgcggcggcggaggccaactcaggagtccgaggaaacacactcgcaactcagcaaatgacgcagcagcaggtgggcatgttaatgcgcggaggctctagctcccggcacccatccagtgctccgttctcggtccaaggattaatcaatgtgatccgaagtgagcgcccggcagcgcgcagtcaattggacgccttgcagcaactaagtgatgcagcagcagcattggccgctaatgccagtgaggctgcctccgtttcagcctccggtgcaggaggaggagcatcgagtggcgggggaggagttttaagcgccctaggactggcgaatcaccccagcaaccagatcagccaaatcagtcagctcagtcagatgagccaacccatgctgaatgtggacgggcattttgcaccctactgcgactactggagacccgcgtgccttctatccgcgacagaaaagccagcggctccaaagagtttctacaagtaccgattcaagtggtgcggccaagagcatgagttcaagattgccatggaccggctagagcttcttgccctgttcgaccgtgatctccactggatgcacgtccttctggccagtctgctgtgcaccctggtagcctgcttgggagcggcgatcttgcagcacgatcactacaaggatctatgtgccctgctcttctgcgcagtgatcgcgggagctcagtactcgctagtaaaaagtgtgcaaccggacgcagcttcgccagtgcacggattcaacaagacagtcgcctactcgcgggctatatacttctgccttgccgggggcatgctgttgctactaaagcgcctagatacggactacggggaacggacaccggaccctgtggtattctttggcatgcgctactctcctgctgatg

SEQ ID NO: 28964 - DNA, 270 bp, DROSOPHILA
atgggtgccctgaagcgcttgaatagcatcctggtagaactggaagtgtgcgttggacatgttcggcgggaccaggctgctgcttgccgggattggagtgccgtccgccgaggtgccggtgattggacggccccggtcatcgacggctccgccgtgcatcagccagagcatcttgtgaatgtcagccgtcaggctatcggtcaagctgatgctgtgcgtcgaattcgaggaggaggaattccgcgaggcctgcttggtctgtttgactag

SEQ ID NO: 28965 - protein, 89 aa, DROSOPHILA
MGALKRLNSILVELEVCVGHVRRDQAAACRDWSAVRRGAGDWTAPVIDGSAVHQPEHLVNVSRQAIGQADAVRRIRGGGIPRGLLGLFD

SEQ ID NO: 28966 - DNA, 3373 bp, DROSOPHILA
gatcccggaaaacaaacaacggcgtaacgccagtccggagttggagtgtttccagaggagccgcagcattgtctcctgtcccacagctttccctcaaaaaaaccagcgactctgcctttgccttcccctccgcccccgttcaccacccacgctaccaccgcctcccaaggcctcgcccgcagaccacgccccccgcctgcagcttggcaggcttactcagcaaataaacaaacggaagagtgacgaagtgcagcggcagcagaagcagcaactcctactgtgagtaatccggaagctggagcagcaaaagcgtggatcctcatccattcggcggctaagcgatgcagtataggccaccatgggttcacagaccttggagattctgcgccagggcgtgtgggcctcgctgaccggcggttacttttacgatccgcatcagggtgtcttctgcaacgtggtgcacctttacctgtggctctacctgctctgctcgcccttcgtggcctacctggtaagtagtgaccgagtgtagtcctaagtagtccgttcatagatcttcttgcagtactttccgagcacttggttgacatggtgcctgtattgcgtgataacgagcttaaccatactgatggtaaagctggccaatctggcgctgcacaggctctacgatcgcgcacagaccatgtccgaggggaacctaaaggggcagttcgtgaaggtcaccaaggaaacggaaccgcgccacgacgacgagggcggcatcgagatgaaggtcatccgaccgggcggctcacgcatttccggcgagcaggccattaatgaagcaagcgaggagaacagcatcatgtccatcgacaacgtgaacagcattattggtgagtggtgcttcttgtgcacacgtgctatagcctaagaactcctcttcgcagatctcaaggtcgatgtgcatcgcaagaacagctcggagtccattgaactgatgttctacgccccatccatgctatccggcggtagccaacaggatcaacaatcgctggctggttccgccagcgttagcaagtccattcggagtacaggaccgggcggaaactcgtccaccagcgccgccgctcaagcagacatgttcaacaagtacctcactgtctatccggaggttgtcgaggcggctggaagcagtgcgggtagcgcagatggaggaagtagtggtggcgacagtagatcaggcgcagcagtgagtacactgggacatacaggagcgggaacagcaccagcccagcacgtacgcactggacatctgtcgcgcaagtgttctgaggtgtttagccgccgccatcgacgacgtctcgaacggcagagcagcttggacacagcggcggcagctgcaaactccaacgcggaaaacaagttgatgcgcaatcagtcggatacgatagccacagcggcaccctcgttcctgcactctcagccaacgaacaaggcgcgcggtcagaccaatccgcgtcagcactttataaccagcgccccatcaacaggaataggcggaggagatgctcccacttcatctaccgccgtcgttgtcattgcccccgcctcgaactcattggttaatcctggacgttcctcacgtctgcagcgccacagaagttcggagacgcatgacgagcggctgaagcaccagagccgtggtggactcttccagcccattcttcaacttccgcaccacagtgcagccagcagcatcggcgcactggcagtgctcggtggaggaggcaatgttgccgcaaatgatgtggaagacatggaactgggcctggttaggaatgcgggcagcggcggagtggcggatgcttgtagccgggcactacagtcctggatattaggtaagctgatacaatatcagaactcttcattgtcgtagtttagaaatctcaataaattagttttaatatgtactatgttgcccatttagatccctttccggatgggtacctggaggacgatagctacaccaaatctgatctgggcattgaacagccacaccagccaactttccgcacccagcatcgtcatcaccatcaccaccaccacctgcatcatcacctaggaggtgcaatcattcgtaaggatccaaccagcacaatgtctgcacttcaattggctgcagtcacccagccaggaacgggaggatcggtaacaggcggtggtggagcagcaggtggaggtggatctgctgctggtatgaagcgacgcagacattccaacgctacgagctacaagcacggctcgagccagagcaacaaatcgtctctggtgggcggcggaggttccaggggtccgtctggagaagcaggcacttccggaggggccggaggaactggtggagtgaggcgcattaagagcgcagccctggaggttctgtgcccgcagccctctgtatccaatcttagtccacaccccaacagcgtggaggccatctcgggtcaacaacagatgcggaaccctctaccacctcctagcaaaagtctggtgcgaaaccagcaccttaacctttatcctacgcaaggctatggcgacggaactccctccgctggaggaggagggcctggtaacagcagcacatgcagcagtctctttttcggcagctccagcgcctgcggttccacaacagcattgattgaacctccagtataccccatagtggagcactctgacgagaagacggcgcacgaagaacacggtgatgattgcttgggaataggacaaggcaacgccgacgatgacgatgaggtggacgacgtcccgatccgaagaagaacgcgggcgttaggctgcagccaaacgcactacagtgttgaatcggatgtaggtggcttcttggcagacgaagtcggtgctgacgaggatgtgtttaaagatttcgacgacaaccttgagcacattcttagtgagctgcagcagacgcataatcagctggatgacgtcctaaagacccacgatctccatcaccactcgcatttgcaccatcataaagcagcatcagtggagggcgctgggccgtcgggaggatccgtggcagtaggggtaagtgccggaaatgatgacgaagacgaggaaacggaggataataacacggggtcgagatctccattgctcaacgatcgcaatcgccagccggcaacactgcgagagattcaagctgacaagcaactccgtcaggagctatcacaccagtccggggcagtaattcctgcccctaatcctcccgtccccatacgcagcgaggcggactcaggctgcccttcaagtgattgcgagcaagtgagcgccagctccaaggaccaactcctgtcgggaatagagttggagctgcagc

SEQ ID NO: 28967 - DNA, 717 bp, DROSOPHILA
tcctccggcccctccggaagtgcctgcttctccagacggacccctggaacctccgccgcccaccagagacgatttgttgctctggctcgagccgtgatgatgcaggtggtggtggtgatggtgatgacgatgctgggtgcggaaagttggctggtgtggctgttcaatgcccagatcagatttggtgtagctatcgtcctccagtgcccggctacaagcatccgccactccgccgctgcccgcattcctaaccaggcccagttccatgtcttccacatcatttgcggcaacattgcctcctccaccgagcactgccagtgcgccgatgctgctggctgcactgtggtgcggaagttgaagaatgggctggaagagtccaccacggctctggtgcttcagccgctcgtcatgcgtctccgaacttctgtggcgctgcagacctgccgccgctgtgtccaagctgctctgccgttcgagacgtcgtcgatggcggcggctaaacacctcagaacacttgcgcgacagatgtccagtgcgtacgtgctgggctgccgcctcgacaacctccggatagacagtgaggtacttgttgaacatgtctgcttgagcggcggcgctggtggacgagtttccgcccggtcctgtactccgaatggacttgctaacgctggcggaaccagccagcgattgttgatcctgttggctaccgccggatag

SEQ ID NO: 28968 - protein, 238 aa, DROSOPHILA
SSGPSGSACFSRRTPGTSAAHQRRFVALARAVMMQVVVVMVMTMLGAESWLVWLFNAQIRFGVAIVLQCPATSIRHSAAARIPNQAQFHVFHIICGNIASSTEHCQCADAAGCTVVRKLKNGLEESTTALVLQPLVMRLRTSVALQTCRRCVQAALPFETSSMAAAKHLRTLARQMSSAYVLGCRLDNLRIDSEVLVEHVCLSGGAGGRVSARSCTPNGLANAGGTSQRLLILLATAG

SEQ ID NO: 28969 - DNA, 4656 bp, DROSOPHILA
cgagattttgaccactgttcgagggtgacgctattatcgctgttctctattctttcgctagctcgctcgctcgctttttctgtttccccctttcttagccgctgcttcttcttgccgctgggactctggccgatgacagccagtgatatcgataggctccgcattctatgagtgatcgtatttgaaattgaatagcgaacaagttcgggattcgcaattaaataacacccgcaaatctggcaaatcgcctgtacgattgcataatagaaatatgctccatgtgcatgcgatctatttgtaacgtatttctctatttctcgcgttacgtgccatgtactcaagttagccggggagtcgggcgggggcttaataaataaatccaggggctgagcgaccatgcaacatatctttgtgagtattaaacacacgctgcactcctgctatttacgttgactgagtttgggtcttcggtgtggggctccggctcctagctattgagtgcagttttccgtgccttccgtctgcgtgagctgctgaaaaaaggcatagctttagaagaagttcacacacagccgaaacaaaacggaaaaacaaagaaaataaacaatggtaaaaacccatcaatggggacggagctctcatgccctgcaaattgggggaaaaccgaagtcaggggttacattaattcggtgaattgggcaaccaataaaggtggctttagaagatccgagctttttatctgataggtaattgcaaagtctaggtctaatgtaacgcaaaaattagtagctaatacaggtgcaaactccatactttcgttgtgggcttttatatacataatatacacgcgtgatttcttcttatttttaacagtgcaaattccacaatttggggctagcctccgtctcggtagagagtagtcctcctctggctgaaaaccacccacaatccatgacacgatgatcgctgccatccgaaatgaatggaaattgcaggtttttcactgagcagccaactccgctgtttcgcggcgcgtgcgcagaagctccaccaagtgtggctccaccaaagcagagcgaggcccatggctctgcccatatcgttggtggtggactgcgtcacggaagcgcagaagccgccaactggcgtcggggtattcgtattccaccgcattccgtgtgcctgcgcctgtataaataaaatggtcgcagtggggcagcaatcaaagcagccgcttcgtcggagccttcaacacctcagcacctgggtctcaagccaagcgatatggataaccgcagtttggtgagtggcgaccgggtattgcaactacacaaggattacacccgatatccgtgctccctctattcgcagctcctgaggctctcaattgtggtggcgctggtgttgcttctcgtctgcgtgccggaaacggatgcggggtatggattatcatggggactactgggccagatagaggatacatcgcggcacaggccccttaacttaaagcgtcattcagattaacgaacattttacaacttcaaatcatagaaagccaatcactctcgctaaataatttcaaacgaacttagctaaaatatttaacttaagctatattaataatcttccaaacgaaaagtgtatggaatcaaataatttattaggttaaaaatgtatttgctatccttttcaggggccaccagaaaaaaaagaaaatcgtgatccacgtgcccattcacaagaaaatcgaaacgcacatacacaccgtggtgaaacacgtgcaccaccaccacaagccactcgtcctaaaggaggagaagaaggtgatccacgaggaccaccgacccatccagattcaccagaccaaggaacacattcaccaccacgagaagcacgatcaccatgatcaccacgaccaccacgaccatcatgaccaccacgagcaccaccacccacttccgcctccggtggcgcctccagcgctgccggaactcgaagaggaggaggagcacatccaccaccaccacaactatgagcacaggggcggactgcgagacgacttcattggcggtgacgggagcagcagtgaggagcgctgactatgcagcgcccatgtgggggcgcagactgaccggatgcggcagacgtggaccgatcgatcggatcatcccggattcttgtgattccctagatacgtacgcactctttttgttttttttttttttctagcctaatggaaatgtgaacggaaataaagttaaatcggaggaaggacttagttttagagaagtgttaagggcaaccaaagacaaggttattcatattagttttttagccttgccattatttactaagttaggctctacgtaatgttagtaacggggtttggtagttttagcccttaaaacatttatttcttttgaataaaattgtacattcatggatatataatttactattaataaatatgttttatattacactcaattaatcgctgttaaaacgtataaaaagtttacgaaaattgaaggtaatttcataagaaattattaagttaacaaatttaattaatggtaatgtaaaaaagtgtgtaaaagaaagaaaattttaaatttaaataccagactgcagtgttaccatttttcctagtaatatcgaagtgcgatagggcccgataggttcgggccaataatcgatgacaggacaggctctaaacaaaagaaaaaaattaaaattacagcaggattgcgagcgatattcgttttatcccattgcagcatcattgagatcccggaaaacaaacaacggcgtaacgccagtccggagttggagtgtttccagaggagccgcagcattgtctcctgtcccacagctttccctcaaaaaaaccagcgactctgcctttgccttcccctccgcccccgttcaccacccacgctaccaccgcctcccaaggcctcgcccgcagaccacgccccccgcctgcagcttggcaggcttactcagcaaataaacaaacggaagagtgacgaagtgcagcggcagcagaagcagcaactcctactgtgagtaatccggaagctggagcagcaaaagcgtggatcctcatccattcggcggctaagcgatgcagtataggccaccatgggttcacagaccttggagattctgcgccagggcgtgtgggcctcgctgaccggcggttacttttacgatccgcatcagggtgtcttctgcaacgtggtgcacctttacctgtggctctacctgctctgctcgcccttcgtggcctacctggtaagtagtgaccgagtgtagtcctaagtagtccgttcatagatcttcttgcagtactttccgagcacttggttgacatggtgcctgtattgcgtgataacgagcttaaccatactgatggtaaagctggccaatctggcgctgcacaggctctacgatcgcgcacagaccatgtccgaggggaacctaaaggggcagttcgtgaaggtcaccaaggaaacggaaccgcgccacgacgacgagggcggcatcgagatgaaggtcatccgaccgggcggctcacgcatttccggcgagcaggccattaatgaagcaagcgaggagaacagcatcatgtccatcgacaacgtgaacagcattattggtgagtggtgcttcttgtgcacacgtgctatagcctaagaactcctcttcgcagatctcaaggtcgatgtgcatcgcaagaacagctcggagtccattgaactgatgttctacgccccatccatgctatccggcggtagccaacaggatcaacaatcgctggctggttccgccagcgttagcaagtccattcggagtacaggaccgggcggaaactcgtccaccagcgccgccgctcaagcagacatgttcaacaagtacctcactgtctatccggaggttgtcgaggcggctggaagcagtgcgggtagcgcagatggaggaagtagtggtggcgacagtagatcaggcgcagcagtgagtacactgggacatacaggagcgggaacagcaccagcccagcacgtacgcactggacatctgtcgcgcaagtgttctgaggtgtttagccgccgccatcgacgacgtctcgaacggcagagcagcttggacacagcggcggcagctgcaaactccaacgcggaaaacaagttgatgcgcaatcagtcggatacgatagccacagcggcaccctcgttcctgcactctcagccaacgaacaaggcgcgcggtcagaccaatccgcgtcagcactttataaccagcgccccatcaacaggaataggcggaggagatgctcccacttcatctaccgccgtcgttgtcattgcccccgcctcgaactcattggttaatcctggacgttcctcacgtctgcagcgccacagaagttcggagacgcatgacgagcggctgaagcaccagagccgtggtggactcttccagcccattcttcaacttccgcaccacagtgcagccagcagcatcggcgcactggcagtgctcggtggaggaggcaatgttgccgcaaatgatgtggaagacatggaactgggcctggttaggaatgcgggcagcggcggagtggcggatgcttgtagccgggcactacagtcc

SEQ ID NO: 28970 - DNA, 789 bp, DROSOPHILA
atgctgttcacgttgtcgatggacatgatgctgttctcctcgcttgcttcattaatggcctgctcgccggaaatgcgtgagccgcccggtcggatgaccttcatctcgatgccgccctcgtcgtcgtggcgcggttccgtttccttggtgaccttcacgaactgcccctttaggttcccctcggacatggtaggccacgaagggcgagcagagcaggtagagccacaggtaaaggtgcaccacgttgcagaagacaccctgatgcggatcgtaaaagtaaccgccggtcagcgaggcccacacgccctggcgcagaatctccaagcgctcctcactgctgctcccgtcaccgccaatgaagtcgtctcgcagtccgcccctgtgctcatagttgtggtggtggtggatgtgctcctcctcctcttcgagttccggcagcgctggaggcgccaccggaggcggaagtgggtggtggtgctcgtggtggtcatgatggtcgtggtggtcgtggtgatcatggtgatcgtgcttctcgtggtggtgaatgtgttccttggtctggacgagtggcttgtggtggtggtgcacgtgtttcaccacggcgcaggcacacggaatgcggtggaatacgaataccccgacgccagttggcggcttctgcgcttccgtgacgcagtccaccaccaacgatatgggcagagccatgggcctcgctctgctttggtggagccacacttggtggagcttctgcgcacgcgccgcgaaacagcggagttggctgctcagtga

SEQ ID NO: 28971 - protein, 262 aa, DROSOPHILA
MLFTLSMDMMLFSSLASLMACSPEMREPPGRMTFISMPPSSSWRGSVSLVTFTNCPFRFPSDMVGHEGRAEQVEPQVKVHHVAEDTLMRIVKVTAGQRGPHALAQNLQALLTAAPVTANEVVSQSAPVLIVVVVVDVLLLLFEFRQRWRRHRRRKWVVVLVVVMMVVVVVVIMVIVLLVVVNVFLGLDEWLVVVVHVFHHGAGTRNAVEYEYPDASWRLLRFRDAVHHQRYGQSHGPRSALVEPHLVELLRTRRETAELAAQ

SEQ ID NO: 28972 - DNA, 6388 bp, DROSOPHILA
gtaagtgaccatgtttcaaagctacgaaataagcatatataacgagcagttaaagattagcattttaattataaagaacttgttaaataataatagactacagatagtgtattgactagtttagtttattgttaagtatgtaagaaaggtgtaaattataaatgaatttatcaagtaaatatgtactatgtatttacccaagcacaggcatttgataagtttatattttaatatgatgttagaacgcacacagcatcagatttactttgcatgatgtgcgtgagactgaaatcaattcactttaaattgtgtaaataggttgaacatttctaacattacacacgatcaaacaaaattacaatctccaaatgcaaatcaaattgactaaattcattattggtacataaaatcctacccaaataaaagttaaacatacgaagtgtactttaaattaattgatagctgattcgaatatttttctcttaatgtgaaatagattaaatagattttgaaaggtgtaaacggttttcatttaagaaatcaattaccaagtgggaaattggtcctaaagttatccattttttctgtgccaggtttttaagactaagatatgatcaatcactttacaggaaaaaaattttttttttaatagaaatagtttttgtcacaaatgtattcaacatattattaaacaaaaagtttcaaaagaagggccaccaaaatttatgtaaaattttctatagctgtgccgttaattacttaaaatttaattatatttcaaaaataataaaaaatcatgtggtatagttaagttgagttagaaaaagtgttcatttaaatttgaaaagcatattagcgatacggccactcaaagtaagaaatctggtatttttatcgttcgtgaacaaacgaagtgattcggtattttcgaaaggtcccactaagtgcagcatatatataaatgcgtttcatcatcagatttgtatgtatattgtgtcagttcgcctttgttttttaattgctagtccgtcaattaagaaatgcttttacggtgtgtgtccaactaatcgggataacctttcctcgggacgagcccactggaagggctgtttgggagcataaacaatggaaagggttgcatctgtgggagcgtgtatgtttgtatacgtatacccacaccattgttacgatgcacctggaaggccaaaagagaaatgcagtggaaagtgtattgttgcagtgtgttagcgatcctggccagctgagtggctgcgcggattagacacagtgctatccggttctacacagatactggcgatccagggtttggcctggtgtctagacattttgaaaagaaagtgaggaaaacagtgtgtgcgtgtatgtaaatagatgtattttcccattcctttgtaccgaaaacaaagcaaagttgattaatacgagctaagacagtcgggggcgaaagtattggccaaaacagattccttaaatttctctcttctcaagtgctccaaaataagcttatcgtcaaactttagctgctatctgttatgacgtagtaaaatttgtaagattttaaaataaggttattcattgttgatgtcaaacttttacgattcctgataattttttgcatatgtccagctattttaggagactaatatttcttgcagtactgaatttaattaagggatagttacaattgcgttctattccacaacagaccccattgtttgaagtctatgatatgggggtgcacttttgctggtggtgtgggtgaaccagttttctcccatggagcattaaaaattatagaggtaattttacagtccaaaaaagaaatcgcatgagtatgagtaagaaaactccataacctttaaatgcgacacaatcaaaacaaaagtgttgtcgaaatttcaatacaagtcaagactagttgaatcatactaaatgtgttaaacagtataaaactttagctttgagataatataatttaacttttctaatttccctcggtttcccaagtatatgaatgaagccatgccaacattttagtcaacgactgtgcggccatcagctagggatgtacatacgcaagtaaaatgcatgtacattgcacttacacatgtatatacatacaaatgtaatgtgtaggaaaaaaaagagccgaatgaaaatacccttgattttgatattgattgattttgactattgacgagattagcagactcgataagtggctctctcatttttgggtagtaatatttgtaaggaagcttttaaacaagatacaccacaaactgcactttccatagcagcgggttaaaggtcgaaccacgaaacaaagttacatataaagccccaaatgaggcattaattattttctgggacccgtaccccgtcaatagaatgataacgaactgcattcttacaatgtaacaggaatataatgtgctatacctccactgcaggtcgtagattgaactgctatcagcaagtgctatcaactgccataaacggagccacaatcacgataacatcacttgagcaatcgtcgactcaggccgcataggcccatcaggcagcggttcaggttggaggcacttgctcggcatcgggttccggtagagaggctgagcctgaggcagagcctgcttgttgctgccgcgttcgcaaaggactcaaaattgatagaaacaacaaaaagtctgctgcaactggtgcctcatctgaggaccagccgccgcgcaaaaagggtcgtcgctcaggaggctcaggctccgcgtcctcatccgcttattccacttcccctgccgcaggatcagttgatgcggcatccacgtcgcgagcggcccagcagttacagctccaactaaactcatccagttctacagagcgcagcacggcagcatccgcaaatcctagcagagggcaccacaaaccgatagacagcaacaaaagaccacgcgatcgtagtagcagcagtacacagggctccgaggcaaccatgcagagcaccagttccacgtcgagcggctcttgctccaggcccctcgagggttccacactcaattccggcggcagtgccgagaacgtggctcgcgatggaggcagtggcgatgacagcgtcggcatcggtgatgagaatccatcgggcagcagcgccgccacgaacggacacgactccaaacacaacggcttcattgtcaacaataacggcagcagcagtcgcatcgtcgacggcgagaacaatcgggaaaacaccagctgcagcggtgtgcagctggacaagtccaaccaagagatcatccggctgatcggacagtatctgcatgacgtcggtctcgataagtcagtccaaacgctcatgttggaatccggatgctacttggaacacccctctgcaaccaagtttagggagcacgtcctaatgggtgactggtcaaaggcagattcagaccttaaggtaaataagcttctctttcgtactagcatggtcatgagtttttttagtttggtgcttgttttgcggaggattggattatcaatatttgaaatgagatttcaatacttcaactattccaatcgctactactactacactataactttcaaaacgaaaacaattttttttttgtgtttcaagtgctcgagtgttttcaaactaaggccctcttattattaaaatatatttttaagcagctactaaaatcttaagaccttaatattgcaggacctagagccactaatcgacaatgggaaattggcaacgatcaccgaaatgaagttcatattgctggagcaaaagtatttagagcatttggatgatggcaatcccttggacgcccttcacgtccttcgcagcgagctgactcccctgcagcacaacataacgcgtgtgcaccagctgtcctcgtacatgatgtgttctaccaaccaagacctttaccagcgtgccaagtgggagggcaagggcatcctgtcgcgtgccttggtcatggagcgcctacagacatttatgccgccgtcggtgatgatgtcgccacggcgcctgcgcaccctgctgcagcaggccgtggagctgcagagccaacactgcccctgccacgacatggcgtgggagacgaatctggagacagtctcgctgctcaccgaccactgctgcaccacggacggctttccaatgcaaactattcagattctcaccgaccattgcgacgaggtctggttctgcaagttctcgcccgatggcctcaagctagcgacgggcagcaaagactccactgtgattatctgggatgttgatccgtacaagctgacccttaagcaccgtcgcgttctcgacggtcaggcccagcttagcgtgagcttcgtcagctggagccccgactccaagctcatccttgtcggcggcaccgaggactcccatgagctctacatctggaacgtggacgacggcaagctagtggtcaagttctcgcagtctctggaggacagcctggcctgcggtgccttcagtcgcgatggcgctcgattcgtctgcggcggccagaagggtcagctttacctatgcgacctcaacggtaccatcgtggactcctgggagggagtgcgcgtaaacagcatagcctttcgggcggacaacaaaacgatcttagcggcggataatcattaccgaatcagagggtgagcggaattagttgtgggtgctagcacttagcagacttgatgcaccaaagcattcatttattatctaaagttttatttatgtgttataaaaaatttaaaaacattaccttatataggctctaaaaatgttccttttaatataaagggactgtaaatcagcaagtcaatgattatttttacgatataaattaaaaactcacctaactccaatagagcacaatttaagtgtttcttcttttttcaggtacaactttgatagcccgcgttcagactttgatattctgagggagccacatcccataatgacctttagtatcaactccgccgaccgcttggccttgctgaacgtctcgaaccaaggccttcacctttgggacatcgaggacaagtgccttgtgcgccgtttccagggaatacgtcagagcaacttcgccatccactcctgcttcggcggcgttaacgagagcttcgttgccagcggcagtgaggacaaggttgtctacatttggcacatcaagcgcgaggagccgctggccaagctggccgggcacactaagacggtgaactgcgtgtcctggaatcccgtgtacccgtccctgctggccagcgcaagcgatgacgccaccgtgagaatctggggaccgaagcccaacggcagcagcgcaacgactgagagcgacgattgctcttctagctcgtcttcgtcctcctggaatatgacttaaggtcccgagcagtagcaaatggatgtgagtgggatagattttggatgctgatatagttatagtgcgccctgatttcgatataaagcttaatgcgtaccgctctgatggcgcatcggggtcgtcgttgctacaaactgccattacaacaatatgtatgagcagcatgacttacgattagcattaattacttaagtacattaatacgaaaggagaggcataacatcatatctactatgctataacaagaaatcgattcgttctcagatttcttttttatatatgtatgcatacggcgatgcgaattaatatttccggcctatattagcgactcttctcgatcttttcatttattaaaagtgcgatcgacctgcttggttttcaaattattaaagattgccatttgatttgttctatgcagtttccgacatttagtatgtaacacgatttgacgtaattgatacccagcagacacaataaaagtagttctatatatgtttttaaatgtcgatgtttcttttcgattaacgtgggtcataagcaatcaataaaatttgagtaaaaaactagcttgcttttttattttaggtcatgtcacatatttcagagcaaagtgctgtctttgaagagttatatttttgttaaataaaattttggtttactattttcagccttctataatcaattgtcctccaccactagtgatacaaactgcctcgcggtttccttgaaggcgaaagctataacaaccaaagttagagcccaccatcgaaggttcttcctagtggctccgactgcctggtaggcgaggaccagggagcagaggtgatgtcccatgaccagaagatggtgcaagttccggccaaaaacggtcgtgttatttcgccacaccaaaatgggcagaaggaagaacttggacaggttggatatcagcaccactttgagtataattaaagaaaaatttcgaaagccta

SEQ ID NO: 28973 - DNA, 2480 bp, DROSOPHILA
ttcgcctttgttttttaattgctagtccgtcaattaagaaatgcttttacggaatataatgtgctatacctccactgcaggtcgtagattgaactgctatcagcaagtgctatcaactgccataaacggagccacaatcacgataacatcacttgagcaatcgtcgactcaggccgcataggcccatcaggcagcggttcaggttggaggcacttgctcggcatcgggttccggtagagaggctgagcctgaggcagagcctgcttgttgctgccgcgttcgcaaaggactcaaaattgatagaaacaacaaaaagtctgctgcaactggtgcctcatctgaggaccagccgccgcgcaaaaagggtcgtcgctcaggaggctcaggctccgcgtcctcatccgcttattccacttcccctgccgcaggatcagttgatgcggcatccacgtcgcgagcggcccagcagttacagctccaactaaactcatccagttctacagagcgcagcacggcagcatccgcaaatcctagcagagggcaccacaaaccgatagacagcaacaaaagaccacgcgatcgtagtagcagcagtacacagggctccgaggcaaccatgcagagcaccagttccacgtcgagcggctcttgctccaggcccctcgagggttccacactcaattccggcggcagtgccgagaacgtggctcgcgatggaggcagtggcgatgacagcgtcggcatcggtgatgagaatccatcgggcagcagcgccgccacgaacggacacgactccaaacacaacggcttcattgtcaacaataacggcagcagcagtcgcatcgtcgacggcgagaacaatcgggaaaacaccagctgcagcggtgtgcagctggacaagtccaaccaagagatcatccggctgatcggacagtatctgcatgacgtcggtctcgataagtcagtccaaacgctcatgttggaatccggatgctacttggaacacccctctgcaaccaagtttagggagcacgtcctaatgggtgactggtcaaaggcagattcagaccttaaggacctagagccactaatcgacaatgggaaattggcaacgatcaccgaaatgaagttcatattgctggagcaaaagtatttagagcatttggatgatggcaatcccttggacgcccttcacgtccttcgcagcgagctgactcccctgcagcacaacataacgcgtgtgcaccagctgtcctcgtacatgatgtgttctaccaaccaagacctttaccagcgtgccaagtgggagggcaagggcatcctgtcgcgtgccttggtcatggagcgcctacagacatttatgccgccgtcggtgatgatgtcgccacggcgcctgcgcaccctgctgcagcaggccgtggagctgcagagccaacactgcccctgccacgacatggcgtgggagacgaatctggagacagtctcgctgctcaccgaccactgctgcaccacggacggctttccaatgcaaactattcagattctcaccgaccattgcgacgaggtctggttctgcaagttctcgcccgatggcctcaagctagcgacgggcagcaaagactccactgtgattatctgggatgttgatccgtacaagctgacccttaagcaccgtcgcgttctcgacggtcaggcccagcttagcgtgagcttcgtcagctggagccccgactccaagctcatccttgtcggcggcaccgaggactcccatgagctctacatctggaacgtggacgacggcaagctagtggtcaagttctcgcagtctctggaggacagcctggcctgcggtgccttcagtcgcgatggcgctcgattcgtctgcggcggccagaagggtcagctttacctatgcgacctcaacggtaccatcgtggactcctgggagggagtgcgcgtaaacagcatagcctttcgggcggacaacaaaacgatcttagcggcggataatcattaccgaatcagagggtacaactttgatagcccgcgttcagactttgatattctgagggagccacatcccataatgacctttagtatcaactccgccgaccgcttggccttgctgaacgtctcgaaccaaggccttcacctttgggacatcgaggacaagtgccttgtgcgccgtttccagggaatacgtcagagcaacttcgccatccactcctgcttcggcggcgttaacgagagcttcgttgccagcggcagtgaggacaaggttgtctacatttggcacatcaagcgcgaggagccgctggccaagctggccgggcacactaagacggtgaactgcgtgtcctggaatcccgtgtacccgtccctgctggccagcgcaagcgatgacgccaccgtgagaatctggggaccgaagcccaacggcagcagcgcaacgactgagagcgacgattgctcttctagct

SEQ ID NO: 28974 - protein, 621 aa, DROSOPHILA
MQSTSSTSSGSCSRPLEGSTLNSGGSAENVARDGGSGDDSVGIGDENPSGSSAATNGHDSKHNGFIVNNNGSSSRIVDGENNRENTSCSGVQLDKSNQEIIRLIGQYLHDVGLDKSVQTLMLESGCYLEHPSATKFREHVLMGDWSKADSDLKDLEPLIDNGKLATITEMKFILLEQKYLEHLDDGNPLDALHVLRSELTPLQHNITRVHQLSSYMMCSTNQDLYQRAKWEGKGILSRALVMERLQTFMPPSVMMSPRRLRTLLQQAVELQSQHCPCHDMAWETNLETVSLLTDHCCTTDGFPMQTIQILTDHCDEVWFCKFSPDGLKLATGSKDSTVIIWDVDPYKLTLKHRRVLDGQAQLSVSFVSWSPDSKLILVGGTEDSHELYIWNVDDGKLVVKFSQSLEDSLACGAFSRDGARFVCGGQKGQLYLCDLNGTIVDSWEGVRVNSIAFRADNKTILAADNHYRIRGYNFDSPRSDFDILREPHPIMTFSINSADRLALLNVSNQGLHLWDIEDKCLVRRFQGIRQSNFAIHSCFGGVNESFVASGSEDKVVYIWHIKREEPLAKLAGHTKTVNCVSWNPVYPSLLASASDDATVRIWGPKPNGSSATTESDDCSSS

SEQ ID NO: 28975 - DNA, 6181 bp, DROSOPHILA
tgttagaacgcacacagcatcagatttactttgcatgatgtgcgtgagactgaaatcaattcactttaaattgtgtaaataggttgaacatttctaacattacacacgatcaaacaaaattacaatctccaaatgcaaatcaaattgactaaattcattattggtacataaaatcctacccaaataaaagttaaacatacgaagtgtactttaaattaattgatagctgattcgaatatttttctcttaatgtgaaatagattaaatagattttgaaaggtgtaaacggttttcatttaagaaatcaattaccaagtgggaaattggtcctaaagttatccattttttctgtgccaggtttttaagactaagatatgatcaatcactttacaggaaaaaaattttttttttaatagaaatagtttttgtcacaaatgtattcaacatattattaaacaaaaagtttcaaaagaagggccaccaaaatttatgtaaaattttctatagctgtgccgttaattacttaaaatttaattatatttcaaaaataataaaaaatcatgtggtatagttaagttgagttagaaaaagtgttcatttaaatttgaaaagcatattagcgatacggccactcaaagtaagaaatctggtatttttatcgttcgtgaacaaacgaagtgattcggtattttcgaaaggtcccactaagtgcagcatatatataaatgcgtttcatcatcagatttgtatgtatattgtgtcagttcgcctttgttttttaattgctagtccgtcaattaagaaatgcttttacggtgtgtgtccaactaatcgggataacctttcctcgggacgagcccactggaagggctgtttgggagcataaacaatggaaagggttgcatctgtgggagcgtgtatgtttgtatacgtatacccacaccattgttacgatgcacctggaaggccaaaagagaaatgcagtggaaagtgtattgttgcagtgtgttagcgatcctggccagctgagtggctgcgcggattagacacagtgctatccggttctacacagatactggcgatccagggtttggcctggtgtctagacattttgaaaagaaagtgaggaaaacagtgtgtgcgtgtatgtaaatagatgtattttcccattcctttgtaccgaaaacaaagcaaagttgattaatacgagctaagacagtcgggggcgaaagtattggccaaaacagattccttaaatttctctcttctcaagtgctccaaaataagcttatcgtcaaactttagctgctatctgttatgacgtagtaaaatttgtaagattttaaaataaggttattcattgttgatgtcaaacttttacgattcctgataattttttgcatatgtccagctattttaggagactaatatttcttgcagtactgaatttaattaagggatagttacaattgcgttctattccacaacagaccccattgtttgaagtctatgatatgggggtgcacttttgctggtggtgtgggtgaaccagttttctcccatggagcattaaaaattatagaggtaattttacagtccaaaaaagaaatcgcatgagtatgagtaagaaaactccataacctttaaatgcgacacaatcaaaacaaaagtgttgtcgaaatttcaatacaagtcaagactagttgaatcatactaaatgtgttaaacagtataaaactttagctttgagataatataatttaacttttctaatttccctcggtttcccaagtatatgaatgaagccatgccaacattttagtcaacgactgtgcggccatcagctagggatgtacatacgcaagtaaaatgcatgtacattgcacttacacatgtatatacatacaaatgtaatgtgtaggaaaaaaaagagccgaatgaaaatacccttgattttgatattgattgattttgactattgacgagattagcagactcgataagtggctctctcatttttgggtagtaatatttgtaaggaagcttttaaacaagatacaccacaaactgcactttccatagcagcgggttaaaggtcgaaccacgaaacaaagttacatataaagccccaaatgaggcattaattattttctgggacccgtaccccgtcaatagaatgataacgaactgcattcttacaatgtaacaggaatataatgtgctatacctccactgcaggtcgtagattgaactgctatcagcaagtgctatcaactgccataaacggagccacaatcacgataacatcacttgagcaatcgtcgactcaggccgcataggcccatcaggcagcggttcaggttggaggcacttgctcggcatcgggttccggtagagaggctgagcctgaggcagagcctgcttgttgctgccgcgttcgcaaaggactcaaaattgatagaaacaacaaaaagtctgctgcaactggtgcctcatctgaggaccagccgccgcgcaaaaagggtcgtcgctcaggaggctcaggctccgcgtcctcatccgcttattccacttcccctgccgcaggatcagttgatgcggcatccacgtcgcgagcggcccagcagttacagctccaactaaactcatccagttctacagagcgcagcacggcagcatccgcaaatcctagcagagggcaccacaaaccgatagacagcaacaaaagaccacgcgatcgtagtagcagcagtacacagggctccgaggcaaccatgcagagcaccagttccacgtcgagcggctcttgctccaggcccctcgagggttccacactcaattccggcggcagtgccgagaacgtggctcgcgatggaggcagtggcgatgacagcgtcggcatcggtgatgagaatccatcgggcagcagcgccgccacgaacggacacgactccaaacacaacggcttcattgtcaacaataacggcagcagcagtcgcatcgtcgacggcgagaacaatcgggaaaacaccagctgcagcggtgtgcagctggacaagtccaaccaagagatcatccggctgatcggacagtatctgcatgacgtcggtctcgataagtcagtccaaacgctcatgttggaatccggatgctacttggaacacccctctgcaaccaagtttagggagcacgtcctaatgggtgactggtcaaaggcagattcagaccttaaggtaaataagcttctctttcgtactagcatggtcatgagtttttttagtttggtgcttgttttgcggaggattggattatcaatatttgaaatgagatttcaatacttcaactattccaatcgctactactactacactataactttcaaaacgaaaacaattttttttttgtgtttcaagtgctcgagtgttttcaaactaaggccctcttattattaaaatatatttttaagcagctactaaaatcttaagaccttaatattgcaggacctagagccactaatcgacaatgggaaattggcaacgatcaccgaaatgaagttcatattgctggagcaaaagtatttagagcatttggatgatggcaatcccttggacgcccttcacgtccttcgcagcgagctgactcccctgcagcacaacataacgcgtgtgcaccagctgtcctcgtacatgatgtgttctaccaaccaagacctttaccagcgtgccaagtgggagggcaagggcatcctgtcgcgtgccttggtcatggagcgcctacagacatttatgccgccgtcggtgatgatgtcgccacggcgcctgcgcaccctgctgcagcaggccgtggagctgcagagccaacactgcccctgccacgacatggcgtgggagacgaatctggagacagtctcgctgctcaccgaccactgctgcaccacggacggctttccaatgcaaactattcagattctcaccgaccattgcgacgaggtctggttctgcaagttctcgcccgatggcctcaagctagcgacgggcagcaaagactccactgtgattatctgggatgttgatccgtacaagctgacccttaagcaccgtcgcgttctcgacggtcaggcccagcttagcgtgagcttcgtcagctggagccccgactccaagctcatccttgtcggcggcaccgaggactcccatgagctctacatctggaacgtggacgacggcaagctagtggtcaagttctcgcagtctctggaggacagcctggcctgcggtgccttcagtcgcgatggcgctcgattcgtctgcggcggccagaagggtcagctttacctatgcgacctcaacggtaccatcgtggactcctgggagggagtgcgcgtaaacagcatagcctttcgggcggacaacaaaacgatcttagcggcggataatcattaccgaatcagagggtgagcggaattagttgtgggtgctagcacttagcagacttgatgcaccaaagcattcatttattatctaaagttttatttatgtgttataaaaaatttaaaaacattaccttatataggctctaaaaatgttccttttaatataaagggactgtaaatcagcaagtcaatgattatttttacgatataaattaaaaactcacctaactccaatagagcacaatttaagtgtttcttcttttttcaggtacaactttgatagcccgcgttcagactttgatattctgagggagccacatcccataatgacctttagtatcaactccgccgaccgcttggccttgctgaacgtctcgaaccaaggccttcacctttgggacatcgaggacaagtgccttgtgcgccgtttccagggaatacgtcagagcaacttcgccatccactcctgcttcggcggcgttaacgagagcttcgttgccagcggcagtgaggacaaggttgtctacatttggcacatcaagcgcgaggagccgctggccaagctggccgggcacactaagacggtgaactgcgtgtcctggaatcccgtgtacccgtccctgctggccagcgcaagcgatgacgccaccgtgagaatctggggaccgaagcccaacggcagcagcgcaacgactgagagcgacgattgctcttctagctcgtcttcgtcctcctggaatatgacttaaggtcccgagcagtagcaaatggatgtgagtgggatagattttggatgctgatatagttatagtgcgccctgatttcgatataaagcttaatgcgtaccgctctgatggcgcatcggggtcgtcgttgctacaaactgccattacaacaatatgtatgagcagcatgacttacgattagcattaattacttaagtacattaatacgaaaggagaggcataacatcatatctactatgctataacaagaaatcgattcgttctcagatttcttttttatatatgtatgcatacggcgatgcgaattaatatttccggcctatattagcgactcttctcgatcttttcatttattaaaagtgcgatcgacctgcttggttttcaaattattaaagattgccatttgatttgttctatgcagtttccgacatttagtatgtaacacgatttgacgtaattgatacccagcagacacaataaaagtagttctatatatgtttttaaatgtcgatgtttcttttcgattaacgtgggtcataagcaatcaataaaatttgagtaaaaaactagcttgcttttttattttaggtcatgtcacatatttcagagcaaagtgctgtctttgaagagttatatttttgttaaataaaattttggtttactattttcagccttctataatcaattgtcctccaccactagtgatacaaactgcctcgcggtttccttgaaggcgaaagctataacaaccaaagttagagcccaccatcgaaggttcttcctagtggctccgactgcctggtaggcgaggaccagggagcagaggtgatgtcccatgaccagaagatggtgcaagttccggccaaaaacggtcgtgttatttcgccacaccaaaatgggcagaaggaagaacttggacaggttggatatcagcaccactttgagtataattaaagaaaaatttcgaaagcctattttctgcatccaatcaatactcagagtg

SEQ ID NO: 28976 - DNA, 2551 bp, DROSOPHILA
gcagtgtgttagcgatcctggccagctgagtggctgcgcggattagacacagtgctatccggttctacacagatactggcgatccagggtttggcctggtgtctagacattttgaaaagaaagtcgtagattgaactgctatcagcaagtgctatcaactgccataaacggagccacaatcacgataacatcacttgagcaatcgtcgactcaggccgcataggcccatcaggcagcggttcaggttggaggcacttgctcggcatcgggttccggtagagaggctgagcctgaggcagagcctgcttgttgctgccgcgttcgcaaaggactcaaaattgatagaaacaacaaaaagtctgctgcaactggtgcctcatctgaggaccagccgccgcgcaaaaagggtcgtcgctcaggaggctcaggctccgcgtcctcatccgcttattccacttcccctgccgcaggatcagttgatgcggcatccacgtcgcgagcggcccagcagttacagctccaactaaactcatccagttctacagagcgcagcacggcagcatccgcaaatcctagcagagggcaccacaaaccgatagacagcaacaaaagaccacgcgatcgtagtagcagcagtacacagggctccgaggcaaccatgcagagcaccagttccacgtcgagcggctcttgctccaggcccctcgagggttccacactcaattccggcggcagtgccgagaacgtggctcgcgatggaggcagtggcgatgacagcgtcggcatcggtgatgagaatccatcgggcagcagcgccgccacgaacggacacgactccaaacacaacggcttcattgtcaacaataacggcagcagcagtcgcatcgtcgacggcgagaacaatcgggaaaacaccagctgcagcggtgtgcagctggacaagtccaaccaagagatcatccggctgatcggacagtatctgcatgacgtcggtctcgataagtcagtccaaacgctcatgttggaatccggatgctacttggaacacccctctgcaaccaagtttagggagcacgtcctaatgggtgactggtcaaaggcagattcagaccttaaggacctagagccactaatcgacaatgggaaattggcaacgatcaccgaaatgaagttcatattgctggagcaaaagtatttagagcatttggatgatggcaatcccttggacgcccttcacgtccttcgcagcgagctgactcccctgcagcacaacataacgcgtgtgcaccagctgtcctcgtacatgatgtgttctaccaaccaagacctttaccagcgtgccaagtgggagggcaagggcatcctgtcgcgtgccttggtcatggagcgcctacagacatttatgccgccgtcggtgatgatgtcgccacggcgcctgcgcaccctgctgcagcaggccgtggagctgcagagccaacactgcccctgccacgacatggcgtgggagacgaatctggagacagtctcgctgctcaccgaccactgctgcaccacggacggctttccaatgcaaactattcagattctcaccgaccattgcgacgaggtctggttctgcaagttctcgcccgatggcctcaagctagcgacgggcagcaaagactccactgtgattatctgggatgttgatccgtacaagctgacccttaagcaccgtcgcgttctcgacggtcaggcccagcttagcgtgagcttcgtcagctggagccccgactccaagctcatccttgtcggcggcaccgaggactcccatgagctctacatctggaacgtggacgacggcaagctagtggtcaagttctcgcagtctctggaggacagcctggcctgcggtgccttcagtcgcgatggcgctcgattcgtctgcggcggccagaagggtcagctttacctatgcgacctcaacggtaccatcgtggactcctgggagggagtgcgcgtaaacagcatagcctttcgggcggacaacaaaacgatcttagcggcggataatcattaccgaatcagagggtacaactttgatagcccgcgttcagactttgatattctgagggagccacatcccataatgacctttagtatcaactccgccgaccgcttggccttgctgaacgtctcgaaccaaggccttcacctttgggacatcgaggacaagtgccttgtgcgccgtttccagggaatacgtcagagcaacttcgccatccactcctgcttcggcggcgttaacgagagcttcgttgccagcggcagtgaggacaaggttgtctacatttggcacatcaagcgcgaggagccgctggccaagctggccgggcacactaagacggtgaactgcgtgtcctggaatcccgtgtacccgtccctgctggccagcgcaagcgatgacgccaccgtgagaatctggggaccgaagcccaacggcagcagcgcaacgactgagagcgacgattgctcttctagctcgtcttcgtcctcctggaatatgacttaa

SEQ ID NO: 28977 - protein, 630 aa, DROSOPHILA; identical to SEQ ID NO: 16950

SEQ ID NO: 28978 - DNA, 6392 bp, DROSOPHILA
gaaataagcatatataacgagcagttaaagattagcattttaattataaagaacttgttaaataataatagactacagatagtgtattgactagtttagtttattgttaagtatgtaagaaaggtgtaaattataaatgaatttatcaagtaaatatgtactatgtatttacccaagcacaggcatttgataagtttatattttaatatgatgttagaacgcacacagcatcagatttactttgcatgatgtgcgtgagactgaaatcaattcactttaaattgtgtaaataggttgaacatttctaacattacacacgatcaaacaaaattacaatctccaaatgcaaatcaaattgactaaattcattattggtacataaaatcctacccaaataaaagttaaacatacgaagtgtactttaaattaattgatagctgattcgaatatttttctcttaatgtgaaatagattaaatagattttgaaaggtgtaaacggttttcatttaagaaatcaattaccaagtgggaaattggtcctaaagttatccattttttctgtgccaggtttttaagactaagatatgatcaatcactttacaggaaaaaaattttttttttaatagaaatagtttttgtcacaaatgtattcaacatattattaaacaaaaagtttcaaaagaagggccaccaaaatttatgtaaaattttctatagctgtgccgttaattacttaaaatttaattatatttcaaaaataataaaaaatcatgtggtatagttaagttgagttagaaaaagtgttcatttaaatttgaaaagcatattagcgatacggccactcaaagtaagaaatctggtatttttatcgttcgtgaacaaacgaagtgattcggtattttcgaaaggtcccactaagtgcagcatatatataaatgcgtttcatcatcagatttgtatgtatattgtgtcagttcgcctttgttttttaattgctagtccgtcaattaagaaatgcttttacggtgtgtgtccaactaatcgggataacctttcctcgggacgagcccactggaagggctgtttgggagcataaacaatggaaagggttgcatctgtgggagcgtgtatgtttgtatacgtatacccacaccattgttacgatgcacctggaaggccaaaagagaaatgcagtggaaagtgtattgttgcagtgtgttagcgatcctggccagctgagtggctgcgcggattagacacagtgctatccggttctacacagatactggcgatccagggtttggcctggtgtctagacattttgaaaagaaagtgaggaaaacagtgtgtgcgtgtatgtaaatagatgtattttcccattcctttgtaccgaaaacaaagcaaagttgattaatacgagctaagacagtcgggggcgaaagtattggccaaaacagattccttaaatttctctcttctcaagtgctccaaaataagcttatcgtcaaactttagctgctatctgttatgacgtagtaaaatttgtaagattttaaaataaggttattcattgttgatgtcaaacttttacgattcctgataattttttgcatatgtccagctattttaggagactaatatttcttgcagtactgaatttaattaagggatagttacaattgcgttctattccacaacagaccccattgtttgaagtctatgatatgggggtgcacttttgctggtggtgtgggtgaaccagttttctcccatggagcattaaaaattatagaggtaattttacagtccaaaaaagaaatcgcatgagtatgagtaagaaaactccataacctttaaatgcgacacaatcaaaacaaaagtgttgtcgaaatttcaatacaagtcaagactagttgaatcatactaaatgtgttaaacagtataaaactttagctttgagataatataatttaacttttctaatttccctcggtttcccaagtatatgaatgaagccatgccaacattttagtcaacgactgtgcggccatcagctagggatgtacatacgcaagtaaaatgcatgtacattgcacttacacatgtatatacatacaaatgtaatgtgtaggaaaaaaaagagccgaatgaaaatacccttgattttgatattgattgattttgactattgacgagattagcagactcgataagtggctctctcatttttgggtagtaatatttgtaaggaagcttttaaacaagatacaccacaaactgcactttccatagcagcgggttaaaggtcgaaccacgaaacaaagttacatataaagccccaaatgaggcattaattattttctgggacccgtaccccgtcaatagaatgataacgaactgcattcttacaatgtaacaggaatataatgtgctatacctccactgcaggtcgtagattgaactgctatcagcaagtgctatcaactgccataaacggagccacaatcacgataacatcacttgagcaatcgtcgactcaggccgcataggcccatcaggcagcggttcaggttggaggcacttgctcggcatcgggttccggtagagaggctgagcctgaggcagagcctgcttgttgctgccgcgttcgcaaaggactcaaaattgatagaaacaacaaaaagtctgctgcaactggtgcctcatctgaggaccagccgccgcgcaaaaagggtcgtcgctcaggaggctcaggctccgcgtcctcatccgcttattccacttcccctgccgcaggatcagttgatgcggcatccacgtcgcgagcggcccagcagttacagctccaactaaactcatccagttctacagagcgcagcacggcagcatccgcaaatcctagcagagggcaccacaaaccgatagacagcaacaaaagaccacgcgatcgtagtagcagcagtacacagggctccgaggcaaccatgcagagcaccagttccacgtcgagcggctcttgctccaggcccctcgagggttccacactcaattccggcggcagtgccgagaacgtggctcgcgatggaggcagtggcgatgacagcgtcggcatcggtgatgagaatccatcgggcagcagcgccgccacgaacggacacgactccaaacacaacggcttcattgtcaacaataacggcagcagcagtcgcatcgtcgacggcgagaacaatcgggaaaacaccagctgcagcggtgtgcagctggacaagtccaaccaagagatcatccggctgatcggacagtatctgcatgacgtcggtctcgataagtcagtccaaacgctcatgttggaatccggatgctacttggaacacccctctgcaaccaagtttagggagcacgtcctaatgggtgactggtcaaaggcagattcagaccttaaggtaaataagcttctctttcgtactagcatggtcatgagtttttttagtttggtgcttgttttgcggaggattggattatcaatatttgaaatgagatttcaatacttcaactattccaatcgctactactactacactataactttcaaaacgaaaacaattttttttttgtgtttcaagtgctcgagtgttttcaaactaaggccctcttattattaaaatatatttttaagcagctactaaaatcttaagaccttaatattgcaggacctagagccactaatcgacaatgggaaattggcaacgatcaccgaaatgaagttcatattgctggagcaaaagtatttagagcatttggatgatggcaatcccttggacgcccttcacgtccttcgcagcgagctgactcccctgcagcacaacataacgcgtgtgcaccagctgtcctcgtacatgatgtgttctaccaaccaagacctttaccagcgtgccaagtgggagggcaagggcatcctgtcgcgtgccttggtcatggagcgcctacagacatttatgccgccgtcggtgatgatgtcgccacggcgcctgcgcaccctgctgcagcaggccgtggagctgcagagccaacactgcccctgccacgacatggcgtgggagacgaatctggagacagtctcgctgctcaccgaccactgctgcaccacggacggctttccaatgcaaactattcagattctcaccgaccattgcgacgaggtctggttctgcaagttctcgcccgatggcctcaagctagcgacgggcagcaaagactccactgtgattatctgggatgttgatccgtacaagctgacccttaagcaccgtcgcgttctcgacggtcaggcccagcttagcgtgagcttcgtcagctggagccccgactccaagctcatccttgtcggcggcaccgaggactcccatgagctctacatctggaacgtggacgacggcaagctagtggtcaagttctcgcagtctctggaggacagcctggcctgcggtgccttcagtcgcgatggcgctcgattcgtctgcggcggccagaagggtcagctttacctatgcgacctcaacggtaccatcgtggactcctgggagggagtgcgcgtaaacagcatagcctttcgggcggacaacaaaacgatcttagcggcggataatcattaccgaatcagagggtgagcggaattagttgtgggtgctagcacttagcagacttgatgcaccaaagcattcatttattatctaaagttttatttatgtgttataaaaaatttaaaaacattaccttatataggctctaaaaatgttccttttaatataaagggactgtaaatcagcaagtcaatgattatttttacgatataaattaaaaactcacctaactccaatagagcacaatttaagtgtttcttcttttttcaggtacaactttgatagcccgcgttcagactttgatattctgagggagccacatcccataatgacctttagtatcaactccgccgaccgcttggccttgctgaacgtctcgaaccaaggccttcacctttgggacatcgaggacaagtgccttgtgcgccgtttccagggaatacgtcagagcaacttcgccatccactcctgcttcggcggcgttaacgagagcttcgttgccagcggcagtgaggacaaggttgtctacatttggcacatcaagcgcgaggagccgctggccaagctggccgggcacactaagacggtgaactgcgtgtcctggaatcccgtgtacccgtccctgctggccagcgcaagcgatgacgccaccgtgagaatctggggaccgaagcccaacggcagcagcgcaacgactgagagcgacgattgctcttctagctcgtcttcgtcctcctggaatatgacttaaggtcccgagcagtagcaaatggatgtgagtgggatagattttggatgctgatatagttatagtgcgccctgatttcgatataaagcttaatgcgtaccgctctgatggcgcatcggggtcgtcgttgctacaaactgccattacaacaatatgtatgagcagcatgacttacgattagcattaattacttaagtacattaatacgaaaggagaggcataacatcatatctactatgctataacaagaaatcgattcgttctcagatttcttttttatatatgtatgcatacggcgatgcgaattaatatttccggcctatattagcgactcttctcgatcttttcatttattaaaagtgcgatcgacctgcttggttttcaaattattaaagattgccatttgatttgttctatgcagtttccgacatttagtatgtaacacgatttgacgtaattgatacccagcagacacaataaaagtagttctatatatgtttttaaatgtcgatgtttcttttcgattaacgtgggtcataagcaatcaataaaatttgagtaaaaaactagcttgcttttttattttaggtcatgtcacatatttcagagcaaagtgctgtctttgaagagttatatttttgttaaataaaattttggtttactattttcagccttctataatcaattgtcctccaccactagtgatacaaactgcctcgcggtttccttgaaggcgaaagctataacaaccaaagttagagcccaccatcgaaggttcttcctagtggctccgactgcctggtaggcgaggaccagggagcagaggtgatgtcccatgaccagaagatggtgcaagttccggccaaaaacggtcgtgttatttcgccacaccaaaatgggcagaaggaagaacttggacaggttggatatcagcaccactttgagtataattaaagaaaaatttcgaaagcctattttctgcatccaatcaatactcagagtg

SEQ ID NO: 28979 - DNA, 2557 bp, DROSOPHILA
tccgtcaattaagaaatgcttttacggtgtgtgtccaactaatcgggataacctttcctcgggacgagcccactggaagggctgtttgggagcataaacaatggaaagggttgcatctgtgggagcgtgtcgtagattgaactgctatcagcaagtgctatcaactgccataaacggagccacaatcacgataacatcacttgagcaatcgtcgactcaggccgcataggcccatcaggcagcggttcaggttggaggcacttgctcggcatcgggttccggtagagaggctgagcctgaggcagagcctgcttgttgctgccgcgttcgcaaaggactcaaaattgatagaaacaacaaaaagtctgctgcaactggtgcctcatctgaggaccagccgccgcgcaaaaagggtcgtcgctcaggaggctcaggctccgcgtcctcatccgcttattccacttcccctgccgcaggatcagttgatgcggcatccacgtcgcgagcggcccagcagttacagctccaactaaactcatccagttctacagagcgcagcacggcagcatccgcaaatcctagcagagggcaccacaaaccgatagacagcaacaaaagaccacgcgatcgtagtagcagcagtacacagggctccgaggcaaccatgcagagcaccagttccacgtcgagcggctcttgctccaggcccctcgagggttccacactcaattccggcggcagtgccgagaacgtggctcgcgatggaggcagtggcgatgacagcgtcggcatcggtgatgagaatccatcgggcagcagcgccgccacgaacggacacgactccaaacacaacggcttcattgtcaacaataacggcagcagcagtcgcatcgtcgacggcgagaacaatcgggaaaacaccagctgcagcggtgtgcagctggacaagtccaaccaagagatcatccggctgatcggacagtatctgcatgacgtcggtctcgataagtcagtccaaacgctcatgttggaatccggatgctacttggaacacccctctgcaaccaagtttagggagcacgtcctaatgggtgactggtcaaaggcagattcagaccttaaggacctagagccactaatcgacaatgggaaattggcaacgatcaccgaaatgaagttcatattgctggagcaaaagtatttagagcatttggatgatggcaatcccttggacgcccttcacgtccttcgcagcgagctgactcccctgcagcacaacataacgcgtgtgcaccagctgtcctcgtacatgatgtgttctaccaaccaagacctttaccagcgtgccaagtgggagggcaagggcatcctgtcgcgtgccttggtcatggagcgcctacagacatttatgccgccgtcggtgatgatgtcgccacggcgcctgcgcaccctgctgcagcaggccgtggagctgcagagccaacactgcccctgccacgacatggcgtgggagacgaatctggagacagtctcgctgctcaccgaccactgctgcaccacggacggctttccaatgcaaactattcagattctcaccgaccattgcgacgaggtctggttctgcaagttctcgcccgatggcctcaagctagcgacgggcagcaaagactccactgtgattatctgggatgttgatccgtacaagctgacccttaagcaccgtcgcgttctcgacggtcaggcccagcttagcgtgagcttcgtcagctggagccccgactccaagctcatccttgtcggcggcaccgaggactcccatgagctctacatctggaacgtggacgacggcaagctagtggtcaagttctcgcagtctctggaggacagcctggcctgcggtgccttcagtcgcgatggcgctcgattcgtctgcggcggccagaagggtcagctttacctatgcgacctcaacggtaccatcgtggactcctgggagggagtgcgcgtaaacagcatagcctttcgggcggacaacaaaacgatcttagcggcggataatcattaccgaatcagagggtacaactttgatagcccgcgttcagactttgatattctgagggagccacatcccataatgacctttagtatcaactccgccgaccgcttggccttgctgaacgtctcgaaccaaggccttcacctttgggacatcgaggacaagtgccttgtgcgccgtttccagggaatacgtcagagcaacttcgccatccactcctgcttcggcggcgttaacgagagcttcgttgccagcggcagtgaggacaaggttgtctacatttggcacatcaagcgcgaggagccgctggccaagctggccgggcacactaagacggtgaactgcgtgtcctggaatcccgtgtacccgtccctgctggccagcgcaagcgatgacgccaccgtgagaatctggggaccgaagcccaacggcagcagcgcaacgactgagagcgacgattgctcttctagctcgtcttcgtcctcctggaatatgacttaa

SEQ ID NO: 28980 - protein, 630 aa, DROSOPHILA; identical to SEQ ID NO: 16950

SEQ ID NO: 28981 - DNA, 4204 bp, DROSOPHILA
aaaggatgttggcgtggagtacggagcacaattgtcggtggcgatcgttgtttgggtttctgttccttagcactccttggggatggcggtgaatatacgttaggttgctataggcgtcatagtttaggatccttcgtacgcttcgctggggaactactgcctttactgatgggtgagtctgaagcctttctataataaactctgatgatgattcataaccgtcgcaaactcgtaagatatcaaaatcacttggatattgccaagccaaatttagacggggaacaattctccagttcgttacctaaaaatggaaagggatataaaagagcttgtgaaaagtgtttaaaactttaaaaaggtacttttctgtcagaaaagatgcgtttgtgtctttcaaaagaagcaggctcaatccgtttgaaataaacaggagaatagacatttaaggtataaatataaccatttgaatacaaacttacgtttgaaccaagaagttttgctgcgatgtaggattctcggaccggggcaaagtattttgaatggaagtgaacgatgaactcatttggaacaacggctgttttaaaggcgtcgaggctgcaaattgcgcttattataaataagaaagtaaacacattcatttaactttgcgaaaggaataatttttacgaaaagttcaacaggcttcgtctgtgtagaaaaataaataaacaaaccgtaatcagctgttagcatgaacgaaaacgtttatatgaaaaataccatgaaattcggaaatgggagatactaacctgtaaacgtgtaagaaataagattcatttcaaaaacttatatttttaccccatagaatattaatgcaacaacattcagttacttttaacaaaaaaaaaaaaacgtttacgttagtttagttcgaacatgttttgtatgtttggtgtatcagcaatgtttattcccacattcctgcacattgaagttctggtcacactgcgtctcgtccggcaaagtttttaatcaagtttaagtaagatatgaaaagctaattaaaatagatcaggaactgcgaaccagcggagtctctgcatttcaacaataagtgatttataattcctttgcaaaagaaatgcgaatagttaactggggcgttcagtagtaggttttacaccttagaaaaaattattgcaattcggttatacttaaagcggcatattcacaggtaccgaaaacacaaagtctaggcgccaaaattgccgtattttctattttttagggcacttcaattcaagttgtacagtcaattcacttgccatttgccttcgggtaatgtattgagttgtccaacatcatagaactactcactactctttatttaaatttattcggaacccattttaattgcatttgaaaagtatattcgcctacgaatacctgctaaccaatatttctatcctacaaataacttgcatgaaaactccacataagaactgataacaccagcgaagcaatataatcatcggctagctgctagctcgatttatcatatactaataagttaatcaaacagaagcatttactttaaagaagatctaaatatgaaatgtaaagagttatcaacaacgagttagttatattaatggaactttgtcgaaaggcttcattcataaatttgcgtatttttcaatcgcagattgaggccctatcatggaggagctgtgcaacaattccggacactcggctacttccagcagtggcagcaactcgtcgatatcggccaaaaccgcgctaagtgaatgctctgctgcttggataaattacttgagcgccttgaacaacctatgtactgccggctccaaattggcgcactctattgcagttttggaacagtggtcgttgagcgaaaagccgttgttcaataattatacaacgacttatttaaccaattcatggaacgacttggcaaggtaaggcaattgacctatttacatacttaagatatacttaaagatatttgtctacactagagcaacaaccgtggccacaggaacagtcaagacccacatgctggccttgctgcaggatttcgtcaccatatcatccatggaccagacctccagtaccgacttggatcaaaagcggctcagggagcacaacgaactgattgtgttagagaatgcacaggctgtaatcaacattcagcaccagttctgtgcagccagctatgatgccttttcgtccctaacttgctgctttgtttgccaatcgccagttggatttccacatgaacaggactgcagtgttatgaagcagcggtacatcacgattaattatccaatttgaacttaacaattaattttttcattttttgaaagcaatcaatacgaccaacgatctcaaacaccttcgcccaatttatgtgggccgagtacaaagatggattcatccaggggaaactcattaactgatcaacgcccaattgccactgcaatttcagaaacaggttgctttagatattcgaacttttatgtccttatataaaaggcaatttcctttcacttaagccgaccagcccagaggtccctcgcctcaactgaacttttgcgatgccaatcctatgcaggccattttcgagcatacacgaggtcccttgccaaaccccggccaattactgtccatgaagattccatttcaccggaacgtcaagtcgtccttaagttttccattatttcccctgaacggtcagcgtcgatggtcggaagcagctgctgccgaggtgatcgatggcatctccacggatcccgaaagccaaatgaggaggtggtcaatgccatgggaagcatctaagactgataggaacactgtcacatggaaccaaaccaggataatgccaatgaacactttgaaaacctcttgctacaagatgtctagctcggaacgatatacttcccactccggtattccctcaaatcattataatttcattttaaaatctaaaacctatttgctgcagatggaaactggcccctggcttcaaccagtcaagatgggctgttagaagctattcaactactatccatcaaacccaccaccgtcccacaaatgagtactcagccctcaattttgtcgacttctccggatggagcatcacttgactaaatttcatctaaactgaaacgaaaataaaaataaatatcaagcatattatacattaaaataatctcaaccactcaattaatttctttattttctgggtttatagaggttattgcgcgacgttggatataaaacacaccacttgggggccaaagaacccgtatccacaaaaatatgttatctactagtaaaatgatttattcgtgctttttaagtttgttatgtataatgccattcattattagtaggtagatcttacacgcttaatttaaagtaaatcttttttatcgaaattataacactaatgagatattctctatttcttacgattaagaacacttataattaaaataaaagatactttatgtttatcattatgtccataatacgttccaaattttacggatattgcgcacatacttgtacgtataaacttacaaaataattattaatataattactactttcaatatatcccggtttaaaagattaattttgtatcatacatttgttttattttttgttaattttattaagactattaatatgttaatgtttgattatgtatctaaggatttctctaataatatggagttttagtattcgtttaagatgtgttagtttaaactaatagaggaatcgtcctacatcttctttaaacttagaaattatttaactaaactctttaattcaggaaaagtgaagacagcaatcatacatttaaaaagtgaattaaaatattttttgttaaacaatattgcacaatattatatatgaatatattttctgtttgtaaatttaattataattaacataaacaatcccactacacagactaatttaagaaactgaggaagtttctcttccagaccgatggttcttattacataattatttaaagttctatatttaatttttaagttccttttattctacaatcgttgaacgatattgcaatatgtatttatgtattttatgattacaggagggtatatactgtattccttaaagtttctatatgaagttggtaagcttttttcagctttgaattttaatg

SEQ ID NO: 28982 - DNA, 1232 bp, DROSOPHILA
aaagtttttaatcaagtttaaattgaggccctatcatggaggagctgtgcaacaattccggacactcggctacttccagcagtggcagcaactcgtcgatatcggccaaaaccgcgctaagtgaatgctctgctgcttggataaattacttgagcgccttgaacaacctatgtactgccggctccaaattggcgcactctattgcagttttggaacagtggtcgttgagcgaaaagccgttgttcaataattatacaacgacttatttaaccaattcatggaacgacttggcaagagcaacaaccgtggccacaggaacagtcaagacccacatgctggccttgctgcaggatttcgtcaccatatcatccatggaccagacctccagtaccgacttggatcaaaagcggctcagggagcacaacgaactgattgtgttagagaatgcacaggctgtaatcaacattcagcaccagttctgtgcagccagctatgatgccttttcgtccctaacttgctgctttgtttgccaatcgccagttggatttccacatgaacaggactgcagtgttatgaagcagcgccgaccagcccagaggtccctcgcctcaactgaacttttgcgatgccaatcctatgcaggccattttcgagcatacacgaggtcccttgccaaaccccggccaattactgtccatgaagattccatttcaccggaacgtcaagtcgtccttaagttttccattatttcccctgaacggtcagcgtcgatggtcggaagcagctgctgccgaggtgatcgatggcatctccacggatcccgaaagccaaatgaggaggtggtcaatgccatgggaagcatctaagactgataggaacactgtcacatggaaccaaaccaggataatgccaatgaacactttgaaaacctcttgctacaagatgtctagctcggaacgatatacttcccactccggtattccctcaaatcattataatttcattttaaaatctaaaacctatttgctgcagatggaaactggcccctggcttcaaccagtcaagatgggctgttagaagctattcaactactatccatcaaacccaccaccgtcccacaaatgagtactcagccctcaattttgtcgacttctccggatggagcatcacttgactaaatttcatctaaactgaaacgaaaataaaaataaatatcaagcatattatacatt

SEQ ID NO: 28983 - protein, 276 aa, DROSOPHILA; identical to SEQ ID NO: 23685

SEQ ID NO: 28984 - DNA, 5170 bp, DROSOPHILA
aaataccggatggcggctgcgacgagctgccggccttcgagatccgcgccttctcgccgcatggacgcaccccgtcgcccatcgacgatctcgatctgtcggacatcgagacgcccaagcagccgcagaggcagcatctccttccggaagaggaaccccagaacgatcctcagtacgttgccctacacgagataaacgcccagatcagcccgcccaatgacgccgacgactccaacagcttggagacgatcttcgagggcgttttcctgagcaccccgccccgcgataaagcttccagctcgggcaattcccgatttacgcccaagcgcggacgtgcaaatctcatcgagctgatggccaaccggctgcacggcggcaaggagaaccagtcgccgggagcgcgagtctctgacccgcatttaccctcgccactcaaggaccccacctagtgaccgcagtccagccttcccaaccaaagccatggagccctcgctcagactgccatcgatgttctagaataagttaccatttacctgaatgtattgttcacacccagcggtcagcaggtgtacacccagatgtgtatcctcggctgatccttcagtttacctaagcttcgtgtcacgcgttttccgatgtcaggctaaaagattttgtagtggtaaataaagattgtcgtctttccatgtttcaaacattaaaccaaggttatgctcttccctgccgggcagatggtccaggtaggcagaaggaaggtttatattgctcatagaacagactgatcagcggtacctagaactaaaccaaccactattgtaaacactggaaagttcgatggctaattgacggatctaggcatacattgctactacgtaatttgtagtacaaattgattttcgaagccagtatgtttacaacatattgtagaatgttcgatgtaacagtttgaaaaataaaatatcgtactacgatgttcgtttaaaaacttgtctgaataatatccttctcacgtttcgatttatttataaagaaaatgtcaatatttgcttattaatctgaaatgtaatggtaatttttggacctcgtgtaccttaggactactatttttacactaatcctattgtacctaggtagtacattgagtaaactagtataaaaataagtaattctgtgattaggtatattattggaagatactaaatcactactttcctgagtcgcattgcgaattcgcgtcgtacacaaactctacgctggaagcattattcaaacttaaaaataattgggacgagcattgaaagtaatatagagtaataaaatcgggaatgtttcataggttatagaacacattcgaaagtaaaacagcgaccaggacaggggaaaatgattacttaactttacaattttgtaggcaattacaaaagttaaataacacttgctttttttctatatggcagtgtgaaacgcattttgtccagcaagtcctgtcgtgcgattcgcatccaatcagaagttctttgaatgacgcgatgctgaaaacaccttgacgcgcagcaaccctggattaacttcttgccatctgaaataggttggtgaataattagacgacttttaacgaaatatgccccttactaaccgcaaacggcgttcgcccagcctggccttcaccctgttcttaatggtggacactccgtttgcgctgtgaagaccacggcccgtgataatgaatacgtgcttgtacacgcgggtggtgttgcgcagcacagttatgtggcggtcaaggaacaagtccaggcaactgatcgcctctaccgtgtgtaggtaatgcaggtctagcaggtccgggttgttctgggtgtgccgatgcacctccattatgcaattggccgccctctggttgaatacgtcgatcttctgcttgtgtaacttggctatctccgagtagtataacgccacgctactattgccgcgctgtaccgcctgtttggcctttagatagcactctgctttaagttgggagtgatgggcggccatgtttcgcgtctcttcaaagtcgcgaagagcggcgcacttgacctcctcttgcagttggggcgaccggccagaggcgtacgaactggagctggagcgctggccttggccggaggagttatgttgcttttgttgctgctgctgccgccgctcttccagcgccatttgctcactaagcttttcgccctcgcgaagggccttatcatagagttccgctttgctcagcatactcttaacgttgctgtccaagacctcgactgtttgaacgtaattgctgccggttgcggcaaagacctcaagcacagtgtcggtaggaacgtccgggaacgtctcgcacagcttcatcttggttaggtgggtagctatatcggtgggcgtttgtttgcgagcggtcaactcggctgccttcttggcggccagctgctcgctattgtatatgctccaggccaactccatatccaaaagctcagccacgttgctcggagactcgctgcaatcggcgtaacctggatgcttgagcaggcgggcgaactgctcgtcatcgcgcattgtctgctggcgtatctcctctagctggttaaacacagcttccatccataacatgtaaagctgcttggctagctgacgcggcataaatatttttgttgcggtgggaagctcctgttccggcggcaacaactcgtcctccgtgtggaactgagcgcgcagctgctcaattaaagtgccgcccaaatcaatttccagcagagtattttcttcagggtcctcctcctcctcctgctcttcaagctctggttcctcgggtgcttccagtagcttaggcactgtaggttgatccaggattccattgcgaatatcgcgaattttacgggtgtgctccgagtattgttcgtcgcctaaaaatcaataatcattagttattattagttatttaatattagttagcatcagatatcgaactcgaatctctaacataatataatggaaatacattaaattcattagtgccgtgagtgttaacgcaatataaataataagtttatttttaattgactcctattagaacaatatcttacctaacacaaagcaattctggattttcagttgcaactctttgttggtgggggccgatgctcgtttgttgcgcggttgacgttgcggcttggattcggtcttcgatactggtaaagttggtgaggcgcagatgggagttgaaatcggagattcctgggcttcaaccgccttgtcgcagtcgcattgaaactgcgccgcctcctcgctatcgatagtttcttcaaatccgatttgatccgaaccagtggccgcgttgagctcgtcctcctttaatagaatatcaacggcccaatccacgtcggcctggcactttacaaacagatcccagaggccggccagctgtttgttgggatacatctggcgcaggtgtgcaaaccctttcggttcatttgggcagtctaggctgtgcatctcaagaggctttgccccgctagactccgctttcgacggcaccacctttatttggttctcttcgcggagcagatcaataatagacaattcgctctttacgggagctgcggcacccaaagcatccggaatttccggaactgtcgcgtcgcctgtgtctactgagttcactgtttgcgaccagtatgaaggcgctccgtgctcgtagggcacccacgtttgggcattagcattcagcttaaaggcattttccgctggcgctgggactggggcttccagcagcttgctctcttcaaagctcgtgatgataggcacggcaggaaggggcgggtgattgcgtagttgcggcagctccacagaatactttgtctccttcattaactgtcgcataaaatattccggtagaggatgtgaaagatacaaactatagtaagtgccattacttaataagcttcggggtagaaaataaaatacaaccaagaacgtaatataccaaaaatttaccaataaaaaatgaaaacgagctagttgcctcaaattgtatgtgtatgtggctagactgccacattccgatcctcggatattcgatacccgtcttctctcagctacaaaaaagcgactgtttctcagattgccagcgactttctgactgaccatggtatgccctaaaaaattaagtagccaacaaaaaaggcctctactatgtttctgcaggtggtctgaatgtttttcgcaattcaaaggaagttcgccggaaaaataatgaaatgcaaagaagcaaaattgaattggtcagtgataatgattaagaataaatatatacctcttaaagattttttatcgagcttagttaaacgttttacactcgcgtaacgggtatacaattacacatttttggctgactcacaatgagattgcagttaacaataaatctctatctttatatacatatgtatgtatatagacgatttaaagtgccttcttacctgaatgagctctcccgcagtcgtccgctcgaatcgctctagcatgcgctgaatattctcccgtgggacgttgtggacgtttttctgggccagtttgctggcagacttgcaccaactagtattgggctcgagaagctcaattacgtaaccgtggcgcacggcgaactggacatatggctgcatctcccagaccattgtattggtgttatccacgatgatggggctccagccggaggcggccttatcgcgcactcgctgctggttccactcgtgggcagctggcagcagagtggggttgaagacatagccgcggcgcgtcttgaagtagtcgtctgagctcaggacaaagtcgcgcacctggtgtcgatcgagtagatgcgcctggcgcagcagagactctgccagtgtactcttaccgctgcctgaagggccgcgcattatgatcatcagcttatggcccgcctgcgcccgctggcaaatcgagttaaattgtttgttgctttggttgctgttcagattgctggcggggcacattctaatggagcttggggcttcagcagttgcatatttcctgtgagttccaccgctcttgctgcgaccgcaattgttattgtcattattattattgttgttgttgttgttgttattattattattattattcttattat

SEQ ID NO: 28985 - DNA, 2810 bp, DROSOPHILA
atggtcagtcagaaagtcgctggcaatctgagaaacagtcgcttttttgtagctgagagaagacgggtatcgaatatccgaggatcggaatgtggcagtctagccacatacacatacaatttgaggcaactagctcgttttcattttttattgttaatgaaggagacaaagtattctgtggagctgccgcaactacgcaatcacccgccccttcctgccgtgcctatcatcacgagctttgaagagagcaagctgctggaagccccagtcccagcgccagcggaaaatgcctttaagctgaatgctaatgcccaaacgtgggtgccctacgagcacggagcgccttcatactggtcgcaaacagtgaactcagtagacacaggcgacgcgacagttccggaaattccggatgctttgggtgccgcagctcccgtaaagagcgaattgtctattattgatctgctccgcgaagagaaccaaataaaggtggtgccgtcgaaagcggagtctagcggggcaaagcctcttgagatgcacagcctagactgcccaaatgaaccgaaagggtttgcacacctgcgccagatgtatcccaacaaacagctggccggcctctgggatctgtttgtaaagtgccaggccgacgtggattgggccgttgatattctattaaaggaggacgagctcaacgcggccactggttcggatcaaatcggatttgaagaaactatcgatagcgaggaggcggcgcagtttcaatgcgactgcgacaaggcggttgaagcccaggaatctccgatttcaactcccatctgcgcctcaccaactttaccagtatcgaagaccgaatccaagccgcaacgtcaaccgcgcaacaaacgagcatcggcccccaccaacaaagagttgcaactgaaaatccagaattgctttgtgttaggcgacgaacaatactcggagcacacccgtaaaattcgcgatattcgcaatggaatcctggatcaacctacagtgcctaagctactggaagcacccgaggaaccagagcttgaagagcaggaggaggaggaggaccctgaagaaaatactctgctggaaattgatttgggcggcactttaattgagcagctgcgcgctcagttccacacggaggacgagttgttgccgccggaacaggagcttcccaccgcaacaaaaatatttatgccgcgtcagctagccaagcagctttacatgttatggatggaagctgtgtttaaccagctagaggagatacgccagcagacaatgcgcgatgacgagcagttcgcccgcctgctcaagcatccaggttacgccgattgcagcgagtctccgagcaacgtggctgagcttttggatatggagttggcctggagcatatacaatagcgagcagctggccgccaagaaggcagccgagttgaccgctcgcaaacaaacgcccaccgatatagctacccacctaaccaagatgaagctgtgcgagacgttcccggacgttcctaccgacactgtgcttgaggtctttgccgcaaccggcagcaattacgttcaaacagtcgaggtcttggacagcaacgttaagagtatgctgagcaaagcggaactctatgataaggcccttcgcgagggcgaaaagcttagtgagcaaatggcgctggaagagcggcggcagcagcagcaacaaaagcaacataactcctccggccaaggccagcgctccagctccagttcgtacgcctctggccggtcgccccaactgcaagaggaggtcaagtgcgccgctcttcgcgactttgaagagacgcgaaacatggccgcccatcactcccaacttaaagcagagtgctatctaaaggccaaacaggcggtacagcgcggcaatagtagcgtggcgttatactactcggagatagccaagttacacaagcagaagatcgacgtattcaaccagagggcggccaattgcataatggaggtgcatcggcacacccagaacaacccggacctgctagacctgcattacctacacacggtagaggcgatcagttgcctggacttgttccttgaccgccacataactgtgctgcgcaacaccacccgcgtgtacaagcacgtattcattatcacgggccgtggtcttcacagcgcaaacggagtgtccaccattaagaacagggtgaaggccaggctgggcgaacgccgtttgcgatggcaagaagttaatccagggttgctgcgcgtcaaggtgttttcagcatcgcgtcattcaaagaacttctgattggatgcgaatcgcacgacaggacttgctggacaaaatgcgtttcacactgccatatagaaaaaaagcaagtgttatttaacttttgtaattgcctacaaaattgtaaagttaagtaatcattttcccctgtcctggtcgctgttttactttcgaatgtgttctataacctatgaaacattcccgattttattactctatattactttcaatgctcgtcccaattatttttaagtttgaataatgcttccagcgtagagtttgtgtacgacgcgaattcgcaatgcgactcaggaaagtagtgatttagtatcttccaataatatacctaatcacagaattacttatttttatactagtttactcaatgtactacctaggtacaataggattagtgtaaaaatagtagtcctaaggtacacgaggtccaaaaattaccattacatttcagattaataagcaaatattgacattttctttataaataaatcgaaacgtgagaagga

SEQ ID NO: 28986 - protein, 767 aa, DROSOPHILA
MVSQKVAGNLRNSRFFVAERRRVSNIRGSECGSLATYTYNLRQLARFHFLLLMKETKYSVELPQLRNHPPLPAVPIITSFEESKLLEAPVPAPAENAFKLNANAQTWVPYEHGAPSYWSQTVNSVDTGDATVPEIPDALGAAAPVKSELSIIDLLREENQIKVVPSKAESSGAKPLEMHSLDCPNEPKGFAHLRQMYPNKQLAGLWDLFVKCQADVDWAVDILLKEDELNAATGSDQIGFEETIDSEEAAQFQCDCDKAVEAQESPISTPICASPTLPVSKTESKPQRQPRNKRASAPTNKELQLKIQNCFVLGDEQYSEHTRKIRDIRNGILDQPTVPKLLEAPEEPELEEQEEEEDPEENTLLEIDLGGTLIEQLRAQFHTEDELLPPEQELPTATKIFMPRQLAKQLYMLWMEAVFNQLEEIRQQTMRDDEQFARLLKHPGYADCSESPSNVAELLDMELAWSIYNSEQLAAKKAAELTARKQTPTDIATHLTKMKLCETFPDVPTDTVLEVFAATGSNYVQTVEVLDSNVKSMLSKAELYDKALREGEKLSEQMALEERRQQQQQKQHNSSGQGQRSSSSSYASGRSPQLQEEVKCAALRDFEETRNMAAHHSQLKAECYLKAKQAVQRGNSSVALYYSEIAKLHKQKIDVFNQRAANCIMEVHRHTQNNPDLLDLHYLHTVEAISCLDLFLDRHITVLRNTTRVYKHVFIITGRGLHSANGVSTIKNRVKARLGERRLRWQEVNPGLLRVKVFSASRHSKNF

SEQ ID NO: 28987 - DNA, 3003 bp, DROSOPHILA
gcaataagtgtttattgggtgttagatgcttggattgtcaggagaagcacttacttttgggcccgcacttgcttgatgtgatggaacacattgatcacgtctctaatgcggcgcggcgcctcctcgatcttggacgccaggcacacgcagctcatggccacagtctccatgttgtgccgcacaaagctcttcgagtagaagaagcgctggaacagcacctggccggtggccatggcaacctgcggcaagcgcagcaaaattccggctgtctgaataagctcgcagcccagtatgcgcaggtccttctccgtctcatggtccagtccatcctggctggatggcgtcacatcgattttgccctccggaatgaggctgttctccagcgtcagcacgatgcggttaaagagccgaggatagataggcttgttggcgtccgcctgagccgctgccacgccccctgcatcgccgccagctgcatccgcccccggggccgctccactgctgctgttgttgttcgaaatgttgacgctgttcgaatggaacgaagtcaccgtggtcaggacattggtgatcgtctccaccgtcagcgctgtcaccgtcgtgtggaccacagtcgagccggccccacgggtggccattcgtgcgcggttaacccaggaaagcgtttatttaagtgttttaattttttaattttccctttttttttgtaaatttagccgataacaggcgtgcttttatactaaatcgttatcgtcggccctgccaccgaattgatgtcaataatttcctaaattataccacaagcgtttagaaatcccatatggtttgtgtctaaataaggggtggtgggtgcatcgactacaccagcgttgccatattttgtaacagacaaatgtactaaatatcacctaaaacggtatttggtggtcttccgtttatggtcacaccactctcagtcgaaattagttgtgaaggtaagcggttcgctggctggtcgcagaaacgcaaattgtagaaagaaaacattataatcagccgcgtctaagtgcaagtgtgatttatttcttttttgtttggtgtttagtgtgctcgtgagcagatcagtggatcaaacaaacagccagaaaatcgagcgctgggcaagcggaataaatccaattggaattgtccgaaccgcagttttacggagtcgagtgttccgtgtttcgtattccggggcattttccccgccgaaagccccgctcaaccccccaagcaaacagccgaattaggggttgcaaagtttttgcagccagcccggaaaagtcagaggaacttgttttctaagggaagaaaagggaagcacgcaagcgacgactgcccccaaagaccaaacggaatcggagtctgaatcggaatcggaaggggactccgccgaatccttgagagaatcttttgcgcgtgccatgcgtgacctcggcaccaaaatggccgagctaaaattcgaggctccattggcaaagttcgaggaaacggacgagtggggcggctgcgacttcatctcgagtcagaatgccataaacgacacgctcaacctgaatctgaaggactcctccgccggcggcaagccggatgccaccaagctgcggctcctagaggatgctgtacgcgatgcgcacgtgagcaagaacggaggaggagtagtgggaggaggagctggctccattagccccaattgcaacacgctccagggtgggtcgcttattgaaatcggcctgtccgatgtgggattggtgccgggcgagggagccggcgttggtctggacggtctggagaagcgctccctggccgtcggcgaccatgtggacaacttcacggagaccttcggcggaagtctggaggatctggtcaatacgttcgacgaaaagataaccaagtgtttcggcaactacgaagagaacgtcgaggagctggctccggtgcaggtgcgcagccaggaggagatcatgaacgaatgccagtaagtaaaccaacattcctttaagttaagggtttgatttttgtaaataagtaatgggagactgctttcccgtattaccagattaaaagttggcaaattttaatttgaaacgaggcattgggttattttttttccaaatgtctgatgtcatgctataaccacttatagattgggaacattgggggtggcttttggtagagctacatcatgtaaccccaacagtccatggaagtgccgtagtaaggatgccgcatgatacaatccaatcctatagttatgtaaactgcattttgcaatgttttgcgttttagtgctgttttctgctttcgtgtctattgcgacgctgggggtgttgagtgcgcatgctccgagctcggaccgctaccccgtaacccctgacccctgatcccaccccgctccgctacgctccctggctgtctgttccagcccaggcgccacataacgacgtaatcctgcccgaaccgcccgaggggtgggtgatgggtggttggtgacggttggctagtgcttttttgttggatcgataaaagtgccaggagttttcgctgctcgatgttttcatgtgggttgtcgaagactgttgcgctttgcctcggatgcaactgggcgcccaatgtcgctggcagtggtaccaccgccgtggtttatcccattgtaacgctgatccacttatgtcaaggaagcggcaatcatagaaagtgggggcaataaatcatattacgtccattcgccagataaacacttcacagagcatttgccagggaggcgggaaggggtttcgggtggacttgactatggctatggatacgaaagtagagggtggtgaaggggctggcttcagagattcgactccgacgtggaatgcaagtccaacgagaagggaaaacaataatactgtatagatgtgtttccctctctttccctctcggctgacatcagccataaatttgataatcgcgtgcacaccagcgcactatgggaaa

SEQ ID NO: 28988 - DNA, 1003 bp, DROSOPHILA
aaacgcaaattgtagaaagaaaacattataatcagccgcgtctaagtgcaagtgtgatttatttcttttttgtttggtgtttagtgtgctcgtgagcagatcagtggatcaaacaaacagccagaaaatcgagcgctgggcaagcggaataaatccaattggaattgtccgaaccgcagttttacggagtcgagtgttccgtgtttcgtattccggggcattttccccgccgaaagccccgctcaaccccccaagcaaacagccgaattaggggttgcaaagtttttgcagccagcccggaaaagtcagaggaacttgttttctaagggaagaaaagggaagcacgcaagcgacgactgcccccaaagaccaaacggaatcggagtctgaatcggaatcggaaggggactccgccgaatccttgagagaatcttttgcgcgtgccatgcgtgacctcggcaccaaaatggccgagctaaaattcgaggctccattggcaaagttcgaggaaacggacgagtggggcggctgcgacttcatctcgagtcagaatgccataaacgacacgctcaacctgaatctgaaggactcctccgccggcggcaagccggatgccaccaagctgcggctcctagaggatgctgtacgcgatgcgcacgtgagcaagaacggaggaggagtagtgggaggaggagctggctccattagccccaattgcaacacgctccagggtgggtcgcttattgaaatcggcctgtccgatgtgggattggtgccgggcgagggagccggcgttggtctggacggtctggagaagcgctccctggccgtcggcgaccatgtggacaacttcacggagaccttcggcggaagtctggaggatctggtcaatacgttcgacgaaaagataaccaagtgtttcggcaactacgaagagaacgtcgaggagctggctccggtgcaggtgcgcagccaggaggagatcatgaacgaatgccagtaa

SEQ ID NO: 28989 - protein, 185 aa, DROSOPHILA
MRDLGTKMAELKFEAPLAKFEETDEWGGCDFISSQNAINDTLNLNLKDSSAGGKPDATKLRLLEDAVRDAHVSKNGGGVVGGGAGSISPNCNTLQGGSLIEIGLSDVGLVPGEGAGVGLDGLEKRSLAVGDHVDNFTETFGGSLEDLVNTFDEKITKCFGNYEENVEELAPVQVRSQEEIMNECQ

SEQ ID NO: 28990 - DNA, 2734 bp, DROSOPHILA
aacggtacacccatggtcctgcattctggccctctgttgacacaatgtctggcggacagaggaaacggcattgctgcggtcactgaaatgtcatccatccgaggatgtggacaaaaaagacatctacacggcgacagcttcgacgtcggctaacttaaaaaggatccttcaatgtatttgcctaacggtctctgcgacagtcctttctgcggatgggttaacggtgagaactgcgcaggacactaccgaaacgactttgattcggaccgacaattcgggttgaggatccaacaacaactatgaactgtgtctgtaataaaagtttgatattatatagcttgcaatcagagatatttacattttgtgcccatatgcgtttcatcttcagcgaataagcaatcgaaaaaaaccaaacaaaccaagctcgtgatttgcaatcgcacttgtgatcagaactgatcaatacgtatttaagtcccagttctttaaagaagatacttccccttgtgcaagaactcaattttcttagctaattttcggcagtcacccagcaggattcccaaaaaggaccaactactacatcgattttccattgaacttcgtagctgtgaagagtgggcgtattggagtgccgcccatttcagctaacgattatttggcagaaaatttgcaattctgttaaaaagcaaacaggattcatgcaaaaggatttgccagctaaagcgtaaaatgccgtttaagaccattttcccctgagagacccggctattcttaggtaaagatgatgcgacagcctattgacttaagattacgagaatgcagccaaccgaaaggagatcctgactgagcccgttcacttgtcactactcactcacttacctcttaagccggctgagctgcataattttccataaaaaacaaacaataataagaacgacgcatccgtctgttgattgtgaagcaatgcatttgaacaacgtgattaggaagtggttattaactattggctcttcttgacgacgtgcgccaagtcgtagactccgcgcacagccttcagcttaacgccgggcacgtcctgcagacgccccacgcggcacagtacaatgttgtgctcttgcaggttgtgcccgatgccggggatgtaggccaccatctccttgccggtggagaggcgcaccagcacgcactttcgattggccgagttcggcttcttgggcttctttatcagcgtcttcaggacaacgcccttggcgaagggctttccatccagcggctggcgcggcggacgcgtctttatgtgcggtccgctgcggtgcatctgctgcagcgatgccattccacggacggcggtctcatagctgcactggatggctggcaaagaagtgaaagagttagatatgtcgcttaaagaaaaccagtacaacaaaattaactgctccaagtttgagattgcaatcatgatcatttttagaggtaacactcctagttgattatgagaaagtggctagactataaacacacaagggttcggccatcgatcgactcgattgagaatgcaatgatgggagcgaaagagatcgctcgaaatcaataaagcacgactgtaccggcttcgaaatgcggacaaaagggtcacttccacggacagttggtcagtgattgacaatgcccgctggttctgtgctggctcctttgtcatacggctaatctctgtggaaatcgagaattgtggaacggagttggcggctggcgacaataattgcggccaaatgacgcgcaagcatggaagtactcgctccgaatcctgtcaagcctttttggccagaaacaaagcgacgtagcagcgttttcaattataaatatgccaaatgccacacacaacacaagcggcaggtaataatttccatatgcaggattgccggacaaacaaatccggcacctattgtctcctaaactgcgaccttttttttgcggttgaacatttccattgtttccgcgcttttccttctttttcggggtgacaggttttcaattatttttccaatctaaagcgggggagctgcggaatgtgcatgttgatgtgcatgtgaaactggcaatgaaaatattcgcaggcgaaaagtgcggccgccacgcgcggccaactcaaaaagagttggtaaaacctgggggaaatgcacgaaagtcggggggaaaacaaacacttatgcgctcccggtttatttggttttcgcttcgcagcggaagggtggctaaatgcgccaagtcacggactcctgagggccagttcctgcttaggagcagctaatggccaccaaatcaattaaaatattcgatttttaaggtatttaacttggtttagttaagcttaccctgcgaagccaactgtttcgtaatgccaaaggattgccgcagaaaattcatgctcttggagttttgttcagtagttttttgttcagtttgtagtaccagccgtcgctcggattggtggcgcttgctcggaagctatttagtcggccttttgtgttataaaagcgctaaaatatttaataatctaattccaattcaattctaatgtgacaatcagctgttgctgtcctagagctggcacaggtgtcgatagtcacgcatggcagtcacgtatggtaggtgcactcgctaaaacatggtgggtgcatccgccagtgagagttgccagatgaaggcgggatttttaaaaatggtatttaagaat

SEQ ID NO: 28991 - DNA, 734 bp, DROSOPHILA
ttccacaattctcgatttccacagagattagccgtatgacaaaggagccagcacagaaccagcgggcattgtcaatcactgaccaactgtccgtggaagtgacccttttgtccgcatttcgaagccggtacagtcgtgctttattgatttcgagcgatctctttcgctcccatcattgcattctcaatcgagtcgatcgatggccgaacccttgtgtgtttatagtctagccactttctcataatcaactaggagtgttacctctaaaaatgatcatgattgcaatctcaaacttggagcagttaattttgttgtactggttttctttaagcgacatatctaactctttcacttctttgccagccatccagtgcagctatgagaccgccgtccgtggaatggcatcgctgcagcagatgcaccgcagcggaccgcacataaagacgcgtccgccgcgccagccgctggatggaaagcccttcgccaagggcgttgtcctgaagacgctgataaagaagcccaagaagccgaactcggccaatcgaaagtgcgtgctggtgcgcctctccaccggcaaggagatggtggcctacatccccggcatcgggcacaacctgcaagagcacaacattgtactgtgccgcgtggggcgtctgcaggacgtgcccggcgttaagctgaaggctgtgcgcggagtctacgacttggcgcacgtcgtcaagaagagccaatag

SEQ ID NO: 28992 - protein, 154 aa, DROSOPHILA
MIMIAISNLEQLILLYWFSLSDISNSFTSLPAIQCSYETAVRGMASLQQMHRSGPHIKTRPPRQPLDGKPFAKGVVLKTLIKKPKKPNSANRKCVLVRLSTGKEMVAYIPGIGHNLQEHNIVLCRVGRLQDVPGVKLKAVRGVYDLAHVVKKSQ

SEQ ID NO: 28993 - DNA, 6294 bp, DROSOPHILA
actggctaggaagcggacctttcagtaccacatgaggctacatggccagccaaaaattcgccaagaagacaacgaccactgcattgaagagtgcctccaagtggagcccgttttgcaggccaaagctggcgaagatgtctacgagattgtggagaaatcagcacagacttcggcgacgcagaaaactttgcccagtggaagccggccttggaaacccctcaatccctccctacagtgtaaagtaagttggtcatcgcagctcgcaaataactcaaagccgaaggtcatcaattctccctccattcctttagatctgtggcaagcaactaagcaccaacaactccttcaagtaccatatgcagctacatggcacggccacgccctacgtttgcacaatctgcggagagtcctttaagacgcgaaacgcccgcgacggccatgtcacgctgcacgatcgtaacaatccgaacaggtgccccacctgcttcaaggtctaccggcaggcgtcctcgctgcgcacacaccttctaatccacagcggaatcaagccattcgagtgcagcatctgcggcaagaggctaacacagaagtcgggctacaagaagcacatgctcacccacacgggcgagaagccgcacggctgcgacatttgcggccgtcgcttccgctactcgagcaatctgattgcccacaagcgctgccacagccaggagaagccccacccgtgcccggtgtgccagaagcgcagcttcggcagcacatccgagctcaaccgccacatgctcgtccacagcagcgagcgaccgttcggctgtgagcagtgcggcaagtccttcaagcgccgcatctcactcgccatccatcgccagtcgcacaaggcgggcagacagcggaggcgggccgagcatgaagtgggtgtccaactggaggagcaggacgagaatgtggagacctgaagctagatcgcttatactatcggcttaatgtacaaatcgggacatttagttttagttcaattcgcttttattttcggtactttccttcgcacaataacaagttttaagtgtgttcctattgttaggataaatttgattggttttcccacccaaaataatgcgtgtttcatacatacatatatattatatatggtcaacaaacatttcgagtcttctgacgatcctttcgatttgatttaatgtaatgagctttagtttatcaggtggaggcgggagaatctctatacatatggaagtttcgattgggttttgtagttgatagtggctaagggtgagggtgcgggtgcgggtgtggggaccttaagctaagctactatgctgcattgaacttacgcgctagaaaccaattagagtagtgcggaacgagtgtgcgagcgggtaacaaacaaaatggggctgggaattaaaagtgtggattgggagctacgcgttacgctgccgcgcgatacataaagttaatgtataaataaatatatatgttcagacaatgtgagtgcttgctaatacttggcatacataaaatgagtatagatcacaaaaagtcgcgtaaaaacataaatgttagtgggtataacgtgggtgggtgggatgagtgagtaatgagtaatatcagtgggacatgaggcttggaggcacacgtggctttcctttccatcgtccagcttggacgactctcatctcaagatccggacttgggtacacaaacgaagaggacacgaccggattgccgcagtggccactgctaatctttctcctgctgctgcagcagggcggcgatttcctggaacttgtgccgaaagtccacgctgctctcgctgatcaccgacatgcttgacgacggatcctgtggattaggttagaggtcggtccacaatgaatgtcgcaagtggggagtgtggcatgcgttctggcttaccagtatatccctggtggcatcaatctcatccaaatgccccagcagcgacgtcaacgagaagtcattgatattgtcctccagccagcgtgcgttggatgttgaatctctgagcaagtgcatcggactcatgctgccttggaagaagctttgagctgccgcgaagaagataatataaaatttatacaaaaatgaaaagcgaaaacatgctgatgctcctacttgtgctcccgtcttgggccgcctcgttcagggaactgctgacgtccgtcctgttggtggccacgcaaatgtccagattgggcatgtctcgagcgctgacctgcgtggcctcgtcgttgaggaactccaatgccccctgatcccctggctcttgatcctgtgaagcggtcgtggcattcatgctggaatcgggtttcgagccagaggtgctgatgccagcggaacttatgccatccacgcgatcaatcggctcgaaaaggccactgtggagttggcgcacactcagcagatcgtacggacgatcgccagcggatgtgggtggtaggagacggcgctgcacaagcacctgacgactgatcttttgccgtgtgagctagaatgcacgcaatgaatgcaaatcaattgggatttgggtaacgccaataaggaaagaccacttaccgctgagagttggcgcacaggatcgatgttggatatcggccgccgcactggcagcatcggcgttcggaaattgccctcaaccatgccgcccactccgccggtggccgtcgcctctgccagctgctgcgccttggtcatcaggtcccgcttgcgatcgcacgtgtggccgcagttgcattggcgcttgcgcacgcgctcgctgagattggccacgagtagcaggtgcttcagcttgttgctcaccgacgatgtggtgacggccctgacgcgttccacgctatcacagtcgttgggattgtagggcagcgaagtgctcgaggtgctcgaattgctcgatgcgctgacgtagcagttggaagatgcgcctgtttggttggcgttcgaggcggcgctgccggtttgggtggccaccgacgaggagctaggcgttaccgtgttgattgttagtatgctggatgccatggccgtcgaactgtcgacctcacaccaataatactccagctccagcttggaatcctggccaaaaacgacatacagatcaccgatggttatatccgccgcattcgcctgcgtccagcccttgcggattctcttcagtatatcgtcgctgagcagtggcttaaaatttcgagcctgtgccgcggccgccgcctccttagcttctttgcgtttggagcgggctacggatggagccgccaaagaaccggttacaggagtcgaaggagcgggagctgcagcacaggaagtttgtagaacagatgtcgccatggcattagatagatccgcgttggccggataagcctgttgtacaggatcgtgcgatgtttcaagcgcaacagcaacagttgtggtatcaccagtggtggccgaaagagctggaatagtggctgcttgcggatgctgcatggcctccaatatatcgcccagaaactcatgaatctcctcgcccagctcatcaccgctgctattctccatcttcatcagattgccctccaagggcccgtcgtccaaactcttctccagcggcgggctggcactcgatttgggtttctttgtctccggcgaacgcttctcggagccgctttccgttcgtagtcgcttgttggccgccaccgacatgccggccaaattgcccaaggtctcgctgcgcactttgaagcccatgcgctcctcgtatgccgtcaagcaaatactgatgctgcttaggtaggcggtgatgctgagcaaaggtcggtggatggccactcccggccggggctggaagcacattgagggatccagcgatgcaactgacggctgtaatggttccgtttcattgttgttgttattgttgttggacgcagcagatggcaggctgctggaaaagtatgcactcttctcctcgtgcaaacgctgattggcgctgcgccatttgtactcgaacgtcttgatgaagctgattagtttcttgtgcagcggaactatgatcctgccgcgtggattctgcgccagtgactggacgcgtccgaaggcctccatattggcgggagtcaccagcacctccaccttgctgggcagccggatatcctccagtgagtctacggtttgtcattgggtattattgggcaaacatatcgaatggaagcggactcaccatccaattgatttagccgccggagcgccttgcacgatggcgtcttaatgcgaatgttcttgcccttgcaacgcacggttatttggccctggtagaccagctgcttcagcttcatgaagtgcttctccgtgaggaactgcagcttgcgccgcatctcgccgtagttgatcagcgtgtacaactcctgggcgggctttttcagttctaaaacgattgattaaagttacaaaattgtccagcaattgcgaaatgaaatgaaggccaatggcaaaatggcaacgctagttgaattctaggaattaaccgaggcacgaggtttttggcgccgaaaatctatttttccgggaaaccgaaacaagctaactgtgaccttattaacgcattattttgccaatagcttgttaatttaacatttcgggacatgtcatatccagtttgacccttcttcttaccctccgagaagcgcacatatttgcaaatcttgtgatgggtctggtaatagtgctggcgaacttggtccttggttttgaaactatagtcgctgttggcattgcggcgcttcagcttggcattgatgcagttggccaccgcctcgaagtccttgccgaattcgttgagggcgtcgaagaagcagttgcgctccacattcgtccaggtggtcttcccgctgcccgtcttcagctggctgggcgtcttttgggcggccttctcctcctttttgttcggctcccgttcgctgggcggcggtgtcatcgggcgcgtctggtcctgcttcatcttctgtatgacccgggcactggcccgcgttcccggacaattgtgcatggtcaccgagccgaggagctcctcctcgggcagcttagctatcgagttaacaactactgctcctcctcccttgccatttggcagcggctcctcaatggacacggatgacgacggcggcggcggctgcgtcagcgggggtggcggcggctgcttggacagttcctccatgttggccaatccacatccgcttgcctcctagacaggatcaatcaatggcaatatcaattaaactgcgtagtcttccgggaaaagtgggaaaatggcgccgaaccgtccgattgcttggtattgtcgctgaaccgcgcgcccgggctaatccactaccgaccagaaatgatctcgaaggctttcccaagctccgacgtgcactcacctacaaatcagacatggaaaatcggtgccaaacgactatataaaaaacttattaacgagacgccagggatgttgatgttggccaacagtgtggtatcaacagtgcagtgtgtgctgttaggcgcgaagtggttgctgttaagttgttttgtttacccgcagcgatgcccgctcggttgttttacagccgccaatggctagttctagccgcagctttcgtttcctggctgctttccagctaaatgcgtaccctttgaactaaccgttatcttatttacatattaaatttaataaaaatatacaaaatccacacgaaacaaacaaactaatgatttaaagggactcagaatagagcacgctctcaatagcataagcttttattgatttcctttacctgttgattaattgcaaaaattcttcttgaggttttaaagtttattttcttacgtataaattttaaaaataggccaaaaaaataaagtttctcgcgtgcatcacaaataaataccaacaaggagtaatactagcaacacggctgcgagtatcacgatgagcattatctttttctgcaaatacaagggaaaatgccttttagaacccaacgctctcggggattcgcagtgtgcccaccttgcgcgccttcttctggtgctgctccgcctggtccagctcgtcggcgcccttgtccacgtggagcgtggcctgctgggcgtgaaactccacccgctggatcacctcgctctgctccattaccagggtctggatgcgcatgaacagggcgtgcacctcctcgatggacttctccaggcggcgcagctcgttgaatcgatccatcatttcgcgcagtgtctgccgctccttttccgtttcct

SEQ ID NO: 28994 - DNA, 3783 bp, DROSOPHILA
ggaagactacgcagtttaattgatattgccattgattgatcctgtctaggaggcaagcggatgtggattggccaacatggaggaactgtccaagcagccgccgccacccccgctgacgcagccgccgccgccgtcgtcatccgtgtccattgaggagccgctgccaaatggcaagggaggaggagcagtagttgttaactcgatagctaagctgcccgaggaggagctcctcggctcggtgaccatgcacaattgtccgggaacgcgggccagtgcccgggtcatacagaagatgaagcaggaccagacgcgcccgatgacaccgccgcccagcgaacgggagccgaacaaaaaggaggagaaggccgcccaaaagacgcccagccagctgaagacgggcagcgggaagaccacctggacgaatgtggagcgcaactgcttcttcgacgccctcaacgaattcggcaaggacttcgaggcggtggccaactgcatcaatgccaagctgaagcgccgcaatgccaacagcgactatagtttcaaaaccaaggaccaagttcgccagcactattaccagacccatcacaagatttgcaaatatgtgcgcttctcggaggaactgaaaaagcccgcccaggagttgtacacgctgatcaactacggcgagatgcggcgcaagctgcagttcctcacggagaagcacttcatgaagctgaagcagctggtctaccagggccaaataaccgtgcgttgcaagggcaagaacattcgcattaagacgccatcgtgcaaggcgctccggcggctaaatcaattggatgactcactggaggatatccggctgcccagcaaggtggaggtgctggtgactcccgccaatatggaggccttcggacgcgtccagtcactggcgcagaatccacgcggcaggatcatagttccgctgcacaagaaactaatcagcttcatcaagacgttcgagtacaaatggcgcagcgccaatcagcgtttgcacgaggagaagagtgcatacttttccagcagcctgccatctgctgcgtccaacaacaataacaacaacaatgaaacggaaccattacagccgtcagttgcatcgctggatccctcaatgtgcttccagccccggccgggagtggccatccaccgacctttgctcagcatcaccgcctacctaagcagcatcagtatttgcttgacggcatacgaggagcgcatgggcttcaaagtgcgcagcgagaccttgggcaatttggccggcatgtcggtggcggccaacaagcgactacgaacggaaagcggctccgagaagcgttcgccggagacaaagaaacccaaatcgagtgccagcccgccgctggagaagagtttggacgacgggcccttggagggcaatctgatgaagatggagaatagcagcggtgatgagctgggcgaggagattcatgagtttctgggcgatatattggaggccatgcagcatccgcaagcagccactattccagctctttcggccaccactggtgataccacaactgttgctgttgcgcttgaaacatcgcacgatcctgtacaacaggcttatccggccaacgcggatctatctaatgccatggcgacatctgttctacaaacttcctgtgctgcagctcccgctccttcgactcctgtaaccggttctttggcggctccatccgtagcccgctccaaacgcaaagaagctaaggaggcggcggccgcggcacaggctcgaaattttaagccactgctcagcgacgatatactgaagagaatccgcaagggctggacgcaggcgaatgcggcggatataaccatcggtgatctgtatgtcgtttttggccaggattccaagctggagctggagtattattggtgtgaggtcgacagttcgacggccatggcatccagcatactaacaatcaacacggtaacgcctagctcctcgtcggtggccacccaaaccggcagcgccgcctcgaacgccaaccaaacaggcgcatcttccaactgctacgtcagcgcatcgagcaattcgagcacctcgagcacttcgctgccctacaatcccaacgactgtgatagcgtggaacgcgtcagggccgtcaccacatcgtcggtgagcaacaagctgaagcacctgctactcgtggccaatctcagcgagcgcgtgcgcaagcgccaatgcaactgcggccacacgtgcgatcgcaagcgggacctgatgaccaaggcgcagcagctggcagaggcgacggccaccggcggagtgggcggcatggttgagggcaatttccgaacgccgatgctgccagtgcggcggccgatatccaacatcgatcctgtgcgccaactctcagcgctcacacggcaaaagatcagtcgtcaggtgcttgtgcagcgccgtctcctaccacccacatccgctggcgatcgtccgtacgatctgctgagtgtgcgccaactccacagtggccttttcgagccgattgatcgcgtggatggcataagttccgctggcatcagcacctctggctcgaaacccgattccagcatgaatgccacgaccgcttcacaggatcaagagccaggggatcagggggcattggagttcctcaacgacgaggccacgcaggtcagcgctcgagacatgcccaatctggacatttgcgtggccaccaacaggacggacgtcagcagttccctgaacgaggcggcccaagacgggagcacaactcaaagcttcttccaaggcagcatgagtccgatgcacttgctcagagattcaacatccaacgcacgctggctggaggacaatatcaatgacttctcgttgacgtcgctgctggggcatttggatgagattgatgccaccagggatatactggatccgtcgtcaagcatgtcggtgatcagcgagagcagcgtggactttcggcacaagttccaggaaatcgccgccctgctgcagcagcaggagaaagattagcagtggccactgcggcaatccggtcgtgtcctcttcgtttgtgtacccaagtccggatcttgagatgagagtcgtccaagctggacgatggaaaggaaagccacgtgtgcctccaagcctcatgtcccactgatattactcattactcactcatcccacccacccacgttatacccactaacatttatgtttttacgcgactttttgtgatctatactcattttatgtatgccaagtattagcaagcactcacattgtctgaacatatatatttatttatacattaactttatgtatcgcgcggcagcgtaacgcgtagctcccaatccacacttttaattcccagccccattttgtttgttacccgctcgcacactcgttccgcactactctaattggtttctagcgcgtaagttcaatgcagcatagtagcttagcttaaggtccccacacccgcacccgcaccctcacccttagccactatcaactacaaaacccaatcgaaacttccatatgtatagagattctcccgcctccacctgataaactaaagctcattacattaaatcaaatcgaaaggatcgtcagaagactcgaaatgtttgttgaccatatataatatatatgtatgtatgaaacacgcattattttgggtgggaaaaccaatcaaatttatcctaacaataggaacacacttaaaacttgttattgtgcgaaggaaagtaccgaaaataaaagcgaattgaactaaaactaaa

SEQ ID NO: 28995 - protein, 982 aa, DROSOPHILA; identical to SEQ ID NO: 4851

SEQ ID NO: 28996 - DNA, 4732 bp, DROSOPHILA
tattcataagctcgaagagctgggcgagcaaaagagatcccagccaagttatttgatgctaatggaaatgcataaaaagatcgtaaatactcattagcaaagtgtgtggtttctagctatgtatatggcaaagaaagttgcccccatggcggggtcagcacatctcacccaatcatttgcggggtcaacatattttggaaagttactgttgtagggaaagttctatttttggagcgcgtctaagaaatattcccaaaaattagcacactgatccacattcgatgaaaagaaatcgcagagcggaaattactagtgaattcggggaattcacttgacttgcaatcaatctatatctctttgatattcattactaatttatgcacgtgtacaaaatgatagcaatcaggaaatccgattgattaattaagctaatggttcttttgcataacaagacaatggtattgtaagctatttgaagaaatcctgtctatcctgcgtaagaaattatcaacttattgttaatctaaaaaataagttttaataatatgtagttttctttctaaaacagttcattaaattagcgtatgtcatattttgcaaagtatttcctaattaagtgagtcaagtaagtaaatttcctaacaagtaagtcaaaccaaagttacccatcaggcgtggtcatttaaaccataatatgtacggctctctacacccgaactagtttttagaaaatatttcgaaccgtttagaatcgcgacctgcgacccgatctcttttggccaacggtcaacaaaccgcaaactgatttacagcccccagtggcaaaggcaaaaaaaaaaatggagagagctttgccattccgaatggctggctctctttctctctctctctctctccggatcgatcgctctttttggcagaacatgggcttttggccaaaaccgtttgtagacggcacataaaaagctcgggtcgcaatgctcccccaacagttcggcaaacgaaacctctgtctgtggacccccagaaatcgggagcttgattaagaaccagagcgatacaagtcgagaatcccagtgcgtgcgtgaaattagaaacccgaagaaaatccacaaaaaaaccatgaccaagttcgtggtggtgggcatgtgcctgctgatggccttcggccatatggcttccgtttccgccgtgaccgaggctccggaggtggagcagtcaacggagtcgcccatcgccgacatggcgctgattggtaggcccacggatccaatgtcttcccctaacccctagaatttccattaatttatacctgtgtttctcttttttttttcatgtgccgtgtgttttgtttatgtgtgcattttttgtttctgtgatttttgtgcgggtggcgcagaggatgcgccaatggctcccaaaactcccacggagaagccgcccattgtccaggaagccgcaatggtggtggacgctcaggagaagtccgcacaggtggccccacaaccccacacggtggctgactttatcatccacccgctgatcgccttcaagccacgccaggcctccctagaggagatccagggcaaacaggccacaccgagctccagtgccccggcctccccgggcacctggctcttcggcatgaatcccgctcagcagctgggctcctccttttcgacgcttgctggttccgtttccggttggttcaatgatcgcctggcagctgccggacagcagttgcccggtttggtggaaaccccggtgagggagtcaaccacaagcaccagcaccaccacatcaacgaccacccagcgcccagacattgtggtgcgagtacagcagcgtccccaaaggaatggcaaccgcaatggaaaccgcaatggcaatggaaacctcaatggtggaaacctgaacaacaacaggcgtcgtcagcgacctaaccgcttcaataaccgactggactccttcgaggacgactactacgaggacgattacttccagggcaaccgattcgatgacgagttcgacgacgatgaggacgagcaaagcctggagcaattcgaggatgacgattccctggagctgcgtcctcagcaaaaacccaagcgcaaacagacccaggtgcagacccaaaatcagcgcaggaagttccagcaagaggagcaggtgatcagccagaagcgccgccaatcggtgacccagaacaagaagcccaaggttcagaagaagccagttcagccggtggttgaggagtcacaggatgaggaggaattggacgatgatgagaacgagaacgacgatgaggaggaggaagagcaggtccaggaggacgacagccaagagcaggactttcagccggagccgatctatggctccagctcctcgtcgactaggcgcagccaaaaccagcccaatttcatccagcgcggccagcagagcatcatcagtcagattaggcagttcacccgaggtcagacgcccggagaactggctagcacgctgcaccggggtccctcctcgtcatcctcgggctcttcgaagacccgtcggccgcagcagactacgctcctggtaaaccgcaatggacagaccgtttacgtggctcccgagctgctgggcctgaactctccctatccctacgcttatgtccagggtcagacgaagaaacaaagggttcccatcaacggtgcattcccacagccaccactaacggtgccggtgaggcgtcaaggtcgtcccacccagtacatcacgataccctggagccagctgggactctcaccgcccgaccagcaatcagtcgtttccctggccgaaggcatccaagctcagcccctcattctgaatattccgcagagcgccattagtccggtgcgtggtggtgccagctcgagtggccaaaagaaaaagcgcccccagctgaccgcctcggcggttccccttttggctgacgcctcacttatggacatcttccagcctccccagatcccgccctccagaaccggttcatcatcttccggatcctccatcaaaccgatctccgcccagcccgtcctgattgccgctaagcccgtaaaggctggtggagtgggtaccactggactgctacccactcgcattcgtccaggaacgattgtagagaaggcccctgctatggaggcaatggagaagcccatggaggtcaacgagatgaagcaggagcaggaggtgatggccacggagccagctgcttctgcgccacaaacggcagccaatggatccgagcagcaggagttcatcttggttggcgatgatgatgagccaggagtctcgcgacatgtgcagccagctttcggggatgcccgctatgtgtcctacggcgatttccatccgtactttgatctgctgacgcaaaacaggcgattcgcgcttaggaagaccggcaggtctttggagattcccgaagagcaggtggcccccaagggagacttgcagaaggaggagaagccaaaggaggaggagcagaaggagaagcttccaaaggaggaagttcagctagaggagattaagaaggaggagccccagaaggaggagctccagaaggaggagccacaaaaggaggagccccagaaggaggagccacgaaaggaggagccacaaaaggaggagccacaaaaggaggagccacaaaaggaggaacccaaagtggaaaccccacagcctctggagcagtcaaaactgccagcctaattttgtaaacgaacagccctccaaaaatcgaacccaaacgagctcgaattgaaataatgaagataacaaagaaatatgataagcaaaaccaaaaccaaacgattttcaatcctcgtgaaaaccacaaagaaataaattttttttacattttttttttgcgtgtgttaatgcctaaccaaaaagttaaagttttgctggctaaaaagagagaaaactattagcaaacctaaacataattatttttttttattatcgtttcttcggccagttgaaagttcaaatctctaagagcattgaccgtcgagaggccagaaacctgatttggtgccccgaaagcgatggcctgttattgagacccgtgcttttgaccgatttaaatatgtatctaacattttcgaacgcctctttttagcttcaccttaattaatattcccccagcgacaatagaaatttgctgttggggtcaagcataaagaactgactgacagcataattcctaaaatgcaaattagtcggccgattaacggtatttggcgtagatacagttgtctgagcataataatcaatcgaaggcaacccagcgaagcagttttgtagcgcctagcttttcaaagtatttaaggaagtcttaaaaagttcatcttcaccaacgagttttaaagaagatcttagagctttaagctgaacgcaaggatgctagcaagtttgtccaaatcagttaaatctgaaaagattctcatcgctaagcttaagtagggataatgacaggctcagacgcatttgaaggtttttacgagctttaagcccaatattactgcacaaataagacgaaagaaagcattaaaagcagaagaaacaatacagctagatgatgtgttcgaaaagtttaactttagaccatttgaatacgtagtttacacaaaattagttgtggcattacaattattgctaatttaaaactctaaaagtcgataaaatcatataagttttgcttaaaaca

SEQ ID NO: 28997 - DNA, 2588 bp, DROSOPHILA
acgaaacctctgtctgtggacccccagaaatcgggagcttgattaagaaccagagcgatacaagtcgagaatcccagtgcgtgcgtgaaattagaaacccgaagaaaatccacaaaaaaaccatgaccaagttcgtggtggtgggcatgtgcctgctgatggccttcggccatatggcttccgtttccgccgtgaccgaggctccggaggtggagcagtcaacggagtcgcccatcgccgacatggcgctgattgaggatgcgccaatggctcccaaaactcccacggagaagccgcccattgtccaggaagccgcaatggtggtggacgctcaggagaagtccgcacaggtggccccacaaccccacacggtggctgactttatcatccacccgctgatcgccttcaagccacgccaggcctccctagaggagatccagggcaaacaggccacaccgagctccagtgccccggcctccccgggcacctggctcttcggcatgaatcccgctcagcagctgggctcctccttttcgacgcttgctggttccgtttccggttggttcaatgatcgcctggcagctgccggacagcagttgcccggtttggtggaaaccccggtgagggagtcaaccacaagcaccagcaccaccacatcaacgaccacccagcgcccagacattgtggtgcgagtacagcagcgtccccaaaggaatggcaaccgcaatggaaaccgcaatggcaatggaaacctcaatggtggaaacctgaacaacaacaggcgtcgtcagcgacctaaccgcttcaataaccgactggactccttcgaggacgactactacgaggacgattacttccagggcaaccgattcgatgacgagttcgacgacgatgaggacgagcaaagcctggagcaattcgaggatgacgattccctggagctgcgtcctcagcaaaaacccaagcgcaaacagacccaggtgcagacccaaaatcagcgcaggaagttccagcaagaggagcaggtgatcagccagaagcgccgccaatcggtgacccagaacaagaagcccaaggttcagaagaagccagttcagccggtggttgaggagtcacaggatgaggaggaattggacgatgatgagaacgagaacgacgatgaggaggaggaagagcaggtccaggaggacgacagccaagagcaggactttcagccggagccgatctatggctccagctcctcgtcgactaggcgcagccaaaaccagcccaatttcatccagcgcggccagcagagcatcatcagtcagattaggcagttcacccgaggtcagacgcccggagaactggctagcacgctgcaccggggtccctcctcgtcatcctcgggctcttcgaagacccgtcggccgcagcagactacgctcctggtaaaccgcaatggacagaccgtttacgtggctcccgagctgctgggcctgaactctccctatccctacgcttatgtccagggtcagacgaagaaacaaagggttcccatcaacggtgcattcccacagccaccactaacggtgccggtgaggcgtcaaggtcgtcccacccagtacatcacgataccctggagccagctgggactctcaccgcccgaccagcaatcagtcgtttccctggccgaaggcatccaagctcagcccctcattctgaatattccgcagagcgccattagtccggtgcgtggtggtgccagctcgagtggccaaaagaaaaagcgcccccagctgaccgcctcggcggttccccttttggctgacgcctcacttatggacatcttccagcctccccagatcccgccctccagaaccggttcatcatcttccggatcctccatcaaaccgatctccgcccagcccgtcctgattgccgctaagcccgtaaaggctggtggagtgggtaccactggactgctacccactcgcattcgtccaggaacgattgtagagaaggcccctgctatggaggcaatggagaagcccatggaggtcaacgagatgaagcaggagcaggaggtgatggccacggagccagctgcttctgcgccacaaacggcagccaatggatccgagcagcaggagttcatcttggttggcgatgatgatgagccaggagtctcgcgacatgtgcagccagctttcggggatgcccgctatgtgtcctacggcgatttccatccgtactttgatctgctgacgcaaaacaggcgattcgcgcttaggaagaccggcaggtctttggagattcccgaagagcaggtggcccccaagggagacttgcagaaggaggagaagccaaaggaggaggagcagaaggagaagcttccaaaggaggaagttcagctagaggagattaagaaggaggagccccagaaggaggagctccagaaggaggagccacaaaaggaggagccccagaaggaggagccacgaaaggaggagccacaaaaggaggagccacaaaaggaggagccacaaaaggaggaacccaaagtggaaaccccacagcctctggagcagtcaaaactgccagcctaa

SEQ ID NO: 28998 - protein, 821 aa, DROSOPHILA
MTKFVVVGMCLLMAFGHMASVSAVTEAPEVEQSTESPIADMALIEDAPMAPKTPTEKPPIVQEAAMVVDAQEKSAQVAPQPHTVADFIIHPLIAFKPRQASLEEIQGKQATPSSSAPASPGTWLFGMNPAQQLGSSFSTLAGSVSGWFNDRLAAAGQQLPGLVETPVRESTTSTSTTTSTTTQRPDIVVRVQQRPQRNGNRNGNRNGNGNLNGGNLNNNRRRQRPNRFNNRLDSFEDDYYEDDYFQGNRFDDEFDDDEDEQSLEQFEDDDSLELRPQQKPKRKQTQVQTQNQRRKFQQEEQVISQKRRQSVTQNKKPKVQKKPVQPVVEESQDEEELDDDENENDDEEEEEQVQEDDSQEQDFQPEPIYGSSSSSTRRSQNQPNFIQRGQQSIISQIRQFTRGQTPGELASTLHRGPSSSSSGSSKTRRPQQTTLLVNRNGQTVYVAPELLGLNSPYPYAYVQGQTKKQRVPINGAFPQPPLTVPVRRQGRPTQYITIPWSQLGLSPPDQQSVVSLAEGIQAQPLILNIPQSAISPVRGGASSSGQKKKRPQLTASAVPLLADASLMDIFQPPQIPPSRTGSSSSGSSIKPISAQPVLIAAKPVKAGGVGTTGLLPTRIRPGTIVEKAPAMEAMEKPMEVNEMKQEQEVMATEPAASAPQTAANGSEQQEFILVGDDDEPGVSRHVQPAFGDARYVSYGDFHPYFDLLTQNRRFALRKTGRSLEIPEEQVAPKGDLQKEEKPKEEEQKEKLPKEEVQLEEIKKEEPQKEELQKEEPQKEEPQKEEPRKEEPQKEEPQKEEPQKEEPKVETPQPLEQSKLPA

SEQ ID NO: 28999 - DNA, 6369 bp, DROSOPHILA
atgttatatgtatcttttgccgaaaaattagcacataacttaattaaatctattccaatacctccttcaatccgcgacacgaatagaggaatttcaatttttctaatgtttattcaggggattaataaaaataaaataaatacgtgggcatttgtacaattagttttagtgcttccttgactttattacaggctagctttaagtaggttaacatttaaaaggactagcacaggggagtaatcctctcagctcagcgtatgtatatatatatatatatatatatatatattgcgtatttgtaggcatatgtgatatacatacatatgtatgtatatttgcattcaatatactcatgtggttttctcgcagggagtgggcgaatacttggcgttcttggagttagctaattatttagttaggggcgggagcaagtgagctaataaaaaaatttaaattaattatacaaaacaattaaatacattttataaaagtacaaacacacgatcttcactcacgacctgaaggaagggcttggcttggccctttcattctttttccctcgatacaattttgctttgtcatgtcttctggggcagctactctgtcacggcagctgcccagcgcatcttcccagcgaacaacattcgcatccggctaacagaggtctaacttaatgcttaatgaccaatttacaactcgatggggctcctctaacgggctaagattagtgggtaacacctctaaggtgcctctattcatttcataaaactaaactcacattgcaggcgtgctcttcgacttctggttaataaatgcacttcccgaggccgattcactagctctgacagggactcgaaggcgccaatcgagacaagcaagacaaaaactagcgccttttaggcgctttccttgcggagacctaaatggccacatagcggcggtgcatgaattagggaaatttaaaagaactactcgacgatgctccttcagttggctaaaattataaatacaccttgaaggcgctccagccgtggaagcacttggtgaaacggcgcgactccttgttcttcatcgtgaggaagagcttcctcggccgctccggctgcttgatccgcatgtgctggatgtagacctgggcggacttgtaggccagcttcacctccacctcgctgcaacgcggtcccatccacaggaagacgtgctcgccgttgtccaggatcatgatatcgtcgtcggccagatcgtcctggcaaaagtcggcgcacttctcggccaccgtgtagtagccgcgctcgttggagcaccggaacagccgcgtgtagttcatgtactcggcgtccgtatcgtaaggcttgcggccgcccagcgccacccagaagaagttctccggctcgtcgccctcgttgagaatctgcaaaggatggatgaaaagaaacgattaacaagagcgtgtaccttaatataaacatatgtacaatatattccacaaaacagcccactacatggttgaaccacattaacacatggaacccacctgtaagctcacccacggcgagttgaacatctgctcggcaatatcctgcaccagtttggcctcttcgttgcaggccttgctgcctatccacacgtacacaatccccgactgcgaatcgtcctccgtttcaaatggcacatggagtatgtagctgaaataatgcgtatggaatataaatattggagcgactactactatgttcgctatcttttggatatatataaataatactgtgtcatatcacgtaggcttccaggaatttcagtttcaaccaacgataagacaagaatgttgatccaataaaatcgcacttgtcatacatctcaaaaaaaaaaaactgggtgattattaccacccacagtaataaattattggtaatttgctcaccagaaggttagttgagatgcactgcatccggattaatttggataaggcgagtggtgagcgcaccgccgttcgatcgcaggtgaaagaactcaactggggacttgcccttcgcggtgtgcgccttgtccttccgcttgccggtgtggatgatgaacttccgcttgaagtgggacatgaacttgaggttctcctgctgctggaagatccgcaccacctccagctcctcgccgaacatcgccttgaacttcttttgcagtgtaaaggtaaacgtgagccatcccatattgccggcattgcgtccctgccaaaagtaaacgacgcactggatctcgtcctctggctgattgttggcgctggatttactgacgtctgcggctgggttagcaccatcttcggagccattctcgggctcctcgatgggaatgcaatagcggcagaggaacacatagcattcgccggtgtaaaagcgacccaattcctcctcgggcagccggacgaacttcttgttctccagtacaaaggcctccatcatctccagatcgtagttccactcctcctccaactgttccgcctccgccaatggcatggccgactgtcggggcataaatagcgcggcaagatccgtgcgcgtctcctgctgccgagcccactgtgtgagattagcccctgtcttggccaccgacttcgccgttctcgtgaagtccacggccattacctcatcccagccagcgaacttggttcggaagatctgcatttcattgccctcgggtacacgcatcaccagcgcataatccggacgatccatcatgttaaagagctcccgactcaacttgacagcggccgctcggaccaaacgcgtcgacttcttgccaaaccaaacgaacagatcggtgtaacagtcgagtatgtagacgtgcttgctatttagcaaggtatggcaaagtttttgctcaggtaactccacttgcggcaactccagataacccatgccaagttgcacctggtagaggcgaggctgcaccggctgatagtcctctggaacgtgctcctttggtggctctgcggcgtctgcctcctccgaggtcatgcccagtccttgccagaattcggcactctcctcgccctgccgctccaactggatttcacatttgttcttgcgctccgttttgctgatcttttccgccattaacctggccttggagttcagcgtgttcttcgatctttcgcccatccaaatgtaaatatgggtgcccagatccaagacaaaggcgtggcggggatccagggaggtaatggcaggagccactggctccagatgaatggtagcgccataggcgtgcactaaatacaatctggtgatgtgtatcatctcttctatggtatagaaaccagtagctgtgcgtccgccctcgatgtagatgacttccgtctcgaagagggacagaaactgctcggattcatcgccctgctcctcgcgaaccgttcgacatcgggcgcccagaaagtttcttaggttcactgcatgaatggcagcgcaagctcgtttgtccagcgtggcttcgttgcctatccaaaagaatatttcccaatcgagcaggcccaggtcatcgaacttggtcttgaggactatgtagcagtcgccctcgtagaatttgccatgcaccacctcctcaattttgttgggcaggaagttctcgatttcccaaatggtcaagcccggcagctggccatcgtccttctcaaagaacttggagtagtccagttgcggtttttccagtgactcgtcccatctcttaggtttgagcgactctggctttccgtcctcgggcacagcacccgcctcgttatccttatcctttgccacatccttcatgcccttgagcaccttggcagcatcctgatcgccttcactgcgaggaccgcgtcgtaaacgtattttcctcgccgttgaatccttgggcgttgctgacgatggcatggaaggcggcacagcagccccagctaaccgaagctgagtctgcagactaaaatctatgttgtagaactcaagactggtggctttactcgcttcgcttggcttgggcggcatcactagctccggattgttgcgcaagtccaactggtctaggccctccagcaggtgaatggcatcgggcagggttataagccgattgcagctcaagttgagctgcttcaaagcaccgcatcggcagagtccctctggcaccatttccagcaggttgttggctgccgaaaacacctccagagctccgagtttgccgatgcccgaggggatgccctcgaagtttagcttattgtcgttcaccagcaatcgtcgcagctttggtagtttgcagagggcagccggcagcgcaaccaattgattccgcgacagattcagcgactccagacgctgccaaagctctacaccggcagtcagttcggttagctcgttgtcgctcagattcagtcgcaccaaagtgaccacattgtagacgcagtctggcagcttgggcagcgaattgtgcgacaggtccagttcgcagagattggccaaactgtctatgctagtgggaaaattgaggagcgtgcgctgcgtgccgctcatcttcaggacctccaagctctgcagcgagggcaattgccgcagttgaaacagctccagcggattgtgcgataggtccagggttttcagattaatcagacgtcgcgtctgcggcggcagtgtctccagtctattgtgcgacagatccaggaacagcagatccgttagatggatgaacagcggcgtgggtatgctctcgatctgattgttgctcaggttgaggactatcaggttcttggcccgctccaaaccctcgggcacctccttcagtttgttgtgcgacaggtccagcgtggtcagctcctccaggtgaaacagctccggcggtatgccgctgttcttcagctgattgtgccgcaggtcgagggatcgcaggcaggacagctctgtcagctcgccaaagatcttctccagtcggttgtggttcagcgacaggtgctccagcttctgtaggtggcctagctcctcgggaatctccgccagctgcgtgcgatccagtgtgagccactgcacccgcgacatctgccgcatggagctggggaatgttgcctgcaatggaatcaatcatatttcgggattatctctgctccgcacttatgactaatgctcaggtgcttctcggtgacctgtttcttagcttcttttttttttagaacctgaaccactccgaaaaaacaacaaggctgcaactgtttttgctggttgtactcacgctgaaatcatttttcgtaaagtccacaccgcgcacaaacggcagcacgctcattttgaccacataaaatgttatatttgttttatatttgggctcaagctgctggccctgtttttcgtttcttcttctttattttgttttttttttgcactaaaaaaaagaagactaagtggtgaccgttcaccgctcacccgagcaaacggcatggtcgcaccttcgtatgcagttgccggaactggccacactgcgcattttacgagggttaggcaacactaaagtgttggaaatcacagaaggcacactcgcgttgcacttcgtaggtttggtgcagctgatttatcatatagaaggggagctttgtgggcttaaaaaatttggttcatatacggcaataattacatttgtgaccaaaatagagtttctcgcctttaaatattaattttgcatggcttttaacggtacgtccaccactgtattatacgagcttaagtcgagtgtgaccgttaatgtctaaaaatggtgtggctaatttaaaaattattttgaattcccggaaccgagctaaaagcgacttaagttttggagtttttgattctttttgaaaacagagccgttagtttcaaatggtcctatggacttacaaataatacgttgaaaactaacggagtaagtgattgaaaccaaggtttttgtttttgatttatttattatttatttaaagaaattgaaatacacatataatttgtataaactaaatttgattaactatacatttgatgtgtgccttaagacttaaatataataaattcctttttgctgatctgtgagagccgaacgcttcggactatgttagtttgctcaaaacggtcacattggatggggttcgggtttttcgaagggtccttttcgtcctgcgaaaaaacagtaacatcgtatcgtgagcataatccagagggtgtgaccaaattgaacgacacgaaattttcatactttgcccagtcttcggaatgtgaaggtcctcgctcgtgtgttttgttgcctttgcaccgatattgcaaaaacataaaatcaaacctagcctcaaaaacaatacaaacccgaatgaaatttaatagatacgccagaaatacg

SEQ ID NO: 29000 - DNA, 3760 bp, DROSOPHILA
aaagaagaagaaacgaaaaacagggccagcagcttgagcccaaatataaaacaaatataacattttatgtggtcaaaatgagcgtgctgccgtttgtgcgcggtgtggactttacgaaaaatgatttcagcatgcggcagatgtcgcgggtgcagtggctcacactggatcgcacgcagctggcggagattcccgaggagctaggccacctacagaagctggagcacctgtcgctgaaccacaaccgactggagaagatctttggcgagctgacagagctgtcctgcctgcgatccctcgacctgcggcacaatcagctgaagaacagcggcataccgccggagctgtttcacctggaggagctgaccacgctggacctgtcgcacaacaaactgaaggaggtgcccgagggtttggagcgggccaagaacctgatagtcctcaacctgagcaacaatcagatcgagagcatacccacgccgctgttcatccatctaacggatctgctgttcctggatctgtcgcacaatagactggagacactgccgccgcagacgcgacgtctgattaatctgaaaaccctggacctatcgcacaatccgctggagctgtttcaactgcggcaattgccctcgctgcagagcttggaggtcctgaagatgagcggcacgcagcgcacgctcctcaattttcccactagcatagacagtttggccaatctctgcgaactggacctgtcgcacaattcgctgcccaagctgccagactgcgtctacaatgtggtcactttggtgcgactgaatctgagcgacaacgagctaaccgaactgactgccggtgtagagctttggcagcgtctggagtcgctgaatctgtcgcggaatcaattggttgcgctgccggctgccctctgcaaactaccaaagctgcgacgattgctggtgaacgacaataagctaaacttcgagggcatcccctcgggcatcggcaaactcggagctctggaggtgttttcggcagccaacaacctgctggaaatggtgccagagggactctgccgatgcggtgctttgaagcagctcaacttgagctgcaatcggcttataaccctgcccgatgccattcacctgctggagggcctagaccagttggacttgcgcaacaatccggagctagtgatgccgcccaagccaagcgaagcgagtaaagccaccagtcttgagttctacaacatagattttagtctgcagactcagcttcggttagctggggctgctgtgccgccttccatgccatcgtcagcaacgcccaaggattcaacggcgaggaaaatacgtttacgacgcggtcctcgcagtgaaggcgatcaggatgctgccaaggtgctcaagggcatgaaggatgtggcaaaggataaggataacgaggcgggtgctgtgcccgaggacggaaagccagagtcgctcaaacctaagagatgggacgagtcactggaaaaaccgcaactggactactccaagttctttgagaaggacgatggccagctgccgggcttgaccatttgggaaatcgagaacttcctgcccaacaaaattgaggaggtggtgcatggcaaattctacgagggcgactgctacatagtcctcaagaccaagttcgatgacctgggcctgctcgattgggaaatattcttttggataggcaacgaagccacgctggacaaacgagcttgcgctgccattcatgcagtgaacctaagaaactttctgggcgcccgatgtcgaacggttcgcgaggagcagggcgatgaatccgagcagtttctgtccctcttcgagacggaagtcatctacatcgagggcggacgcacagctactggtttctataccatagaagagatgatacacatcaccagattgtatttagtgcacgcctatggcgctaccattcatctggagccagtggctcctgccattacctccctggatccccgccacgcctttgtcttggatctgggcacccatatttacatttggatgggcgaaagatcgaagaacacgctgaactccaaggccaggttaatggcggaaaagatcagcaaaacggagcgcaagaacaaatgtgaaatccagttggagcggcagggcgaggagagtgccgaattctggcaaggactgggcatgacctcggaggaggcagacgccgcagagccaccaaaggagcacgttccagaggactatcagccggtgcagcctcgcctctaccaggtgcaacttggcatgggttatctggagttgccgcaagtggagttacctgagcaaaaactttgccataccttgctaaatagcaagcacgtctacatactcgactgttacaccgatctgttcgtttggtttggcaagaagtcgacgcgtttggtccgagcggccgctgtcaagttgagtcgggagctctttaacatgatggatcgtccggattatgcgctggtgatgcgtgtacccgagggcaatgaaatgcagatcttccgaaccaagttcgctggctgggatgaggtaatggccgtggacttcacgagaacggcgaagtcggtggccaagacaggggctaatctcacacagtgggctcggcagcaggagacgcgcacggatcttgccgcgctatttatgccccgacagtcggccatgccattggcggaggcggaacagttggaggaggagtggaactacgatctggagatgatggaggcctttgtactggagaacaagaagttcgtccggctgcccgaggaggaattgggtcgcttttacaccggcgaatgctatgtgttcctctgccgctattgcattcccatcgaggagcccgagaatggctccgaagatggtgctaacccagccgcagacgtcagtaaatccagcgccaacaatcagccagaggacgagatccagtgcgtcgtttacttttggcagggacgcaatgccggcaatatgggatggctcacgtttacctttacactgcaaaagaagttcaaggcgatgttcggcgaggagctggaggtggtgcggatcttccagcagcaggagaacctcaagttcatgtcccacttcaagcggaagttcatcatccacaccggcaagcggaaggacaaggcgcacaccgcgaagggcaagtccccagttgagttctttcacctgcgatcgaacggcggtgcgctcaccactcgccttatccaaattaatccggatgcagtgcatctcaactaaccttctgctacatactccatgtgccatttgaaacggaggacgattcgcagtcggggattgtgtacgtgtggataggcagcaaggcctgcaacgaagaggccaaactggtgcaggatattgccgagcagatgttcaactcgccgtgggtgagcttacagattctcaacgagggcgacgagccggagaacttcttccggtgctccaacgagcgcggctactacacggtggccgagaagtgcgccgacttttgccaggacgatctggccgacgacgatatcatgatcctggacaacggcgagcacgtcttcctgtggatgggaccgcgttgcagcgaggtggaggtgaagctggcctacaagtccgcccaggtctacatccagcacatgcggatcaagcagccggagcggccgaggaagctcttcctcacgatgaagaacaaggagtcgcgccgtttcaccaagtgcttccacggctggagcgccttcaaggtgtatttataa

SEQ ID NO: 29001 - protein, 1060 aa, DROSOPHILA
MSVLPFVRGVDFTKNDFSMRQMSRVQWLTLDRTQLAEIPEELGHLQKLEHLSLNHNRLEKIFGELTELSCLRSLDLRHNQLKNSGIPPELFHLEELTTLDLSHNKLKEVPEGLERAKNLIVLNLSNNQIESIPTPLFIHLTDLLFLDLSHNRLETLPPQTRRLINLKTLDLSHNPLELFQLRQLPSLQSLEVLKMSGTQRTLLNFPTSIDSLANLCELDLSHNSLPKLPDCVYNVVTLVRLNLSDNELTELTAGVELWQRLESLNLSRNQLVALPAALCKLPKLRRLLVNDNKLNFEGIPSGIGKLGALEVFSAANNLLEMVPEGLCRCGALKQLNLSCNRLITLPDAIHLLEGLDQLDLRNNPELVMPPKPSEASKATSLEFYNIDFSLQTQLRLAGAAVPPSMPSSATPKDSTARKIRLRRGPRSEGDQDAAKVLKGMKDVAKDKDNEAGAVPEDGKPESLKPKRWDESLEKPQLDYSKFFEKDDGQLPGLTIWEIENFLPNKIEEVVHGKFYEGDCYIVLKTKFDDLGLLDWEIFFWIGNEATLDKRACAAIHAVNLRNFLGARCRTVREEQGDESEQFLSLFETEVIYIEGGRTATGFYTIEEMIHITRLYLVHAYGATIHLEPVAPAITSLDPRHAFVLDLGTHIYIWMGERSKNTLNSKARLMAEKISKTERKNKCEIQLERQGEESAEFWQGLGMTSEEADAAEPPKEHVPEDYQPVQPRLYQVQLGMGYLELPQVELPEQKLCHTLLNSKHVYILDCYTDLFVWFGKKSTRLVRAAAVKLSRELFNMMDRPDYALVMRVPEGNEMQIFRTKFAGWDEVMAVDFTRTAKSVAKTGANLTQWARQQETRTDLAALFMPRQSAMPLAEAEQLEEEWNYDLEMMEAFVLENKKFVRLPEEELGRFYTGECYVFLCRYCIPIEEPENGSEDGANPAADVSKSSANNQPEDEIQCVVYFWQGRNAGNMGWLTFTFTLQKKFKAMFGEELEVVRIFQQQENLKFMSHFKRKFIIHTGKRKDKAHTAKGKSPVEFFHLRSNGGALTTRLIQINPDAVHLN

SEQ ID NO: 29002 - DNA, 6544 bp, DROSOPHILA
cgcgtacgaatgaaatgacgaccggaaaatgataaatgcaaacgacagcgtgtgtatatgggtgcggcgttgccaccttgatgttttcccagtcaagtcgatttggtattattttggtaaatatttgtattgtatttgcttgctctacctggagattgttagctatacatttgccaaggattaaattgggattttctgtacgataccaccccaaataagcctatataaggagctaaatgggcgcgtgacttgtctgcttgcagtatggcagctttgatttatacaatgtacacacacctatgaagagaaaatgaaaagaataccaaaaattttatacaaatattttaaagcccagtttacacaatggacaagttacttggtttataaattcattttagttgtattaaaggtttaaatatttaaataaatattaagtatttcataaacatttataattttataaatataaaaaatacaatgttcattatttactatgtgttgggaacgaaaacaacatttacatacaaagaattgtttaaaatcgaattttcatattaacttcttataggctgaaacatcaacaatattttaaatcatttaattggtttatattaaatatttttattttttgcaaaaatttatacaattttcatattcggatttcccaacaggttataatataacgttattatggtttttatttatttgctatataaaatgtttcctttaaagaaaggtgtttcatgagcttactcaaaaaatcggaaatggctaaaatgaaaataagttttataaaactatttaaaagaaacttagcgcccctaaaatgagcttaattgagctcaaatatgaaaatatcaaattcatcaaaatattctatggaacatactagattaaccaccccaaaaaaagaagtgtgtgcacacccttggaaaagccgccatcattcacacaccaacacacgcgaaaccaagaataaaactgtgcagaggcaaaaaagaggaaaagaggaacgaacgtcggttctcttctcgattcaacacacttgtccaatttcattgcgtttgcgattattttctactcaaaagccacaacatatgcatcgtaacttaattcaacaacaactgtgatcgccaaacatcagaaagcaacaaaaaatacacgtcaagaattgccaagttagttattctcaaaaaaaaagacaaaaagaattgcaacaaactagactagtgtgtgtgtgtgagcgagtgagtgcattggtgtgtgtggctgtgtgttttgtgtgcagcttgcaattttatactgcatttcatacgtttcgactatcgttttgtaaattaaaaaaaccgcataatttcagcgctccactaagaaatccaactctccccgccccccgcaggaagataacaaagaaaagtgctacaaaaagtgccgatttttcggcaaacttcaacccaaaagcaatacacactgtgcattacaaaaaggaaaaataaaaacgaggaaaaatatcgcttaaaaaaggtgagccggcgacggcctcgtgtgcgcggtctagaaaaactagcattttccattttcaaaggggtggcgcatactaggaaaaaatcaacataaaaaatgctaaatgggcgtatattttattattgcggcagggctctatctcttaaatttttttttttaccattttagcggctttttttattatcgcttgtgcataacctaaaaatgtacgaaaaattttgtttttgtacatttttgtttaaatgctgctcttcaactatagctttctttgttcttcctacacacgcggttcgcaagcagaaatagagtgggaaagagagaacccgaaagagcggcgcgttcataaccgaatatgtgtgcgtgtgggtttgccgcaactcattgtgcattttttgttttatcggcaaatgtttatggctaaaatggggcaaaggacacctgcaaacattgatatttacttacaccttttaacgctatttcaagtgtttttgcaaggcagcaatttgatattttggccaagctggagttcattgtatgcggcgccacaaccttgagacccgaacataacctcaatttaattcatgctcctcgcttggcggcttcttttttttctttgccaaattgtatgaggtcatttactcgcgcacacacacacacgtgcaaagttcagtcagccaggatcgcaggcataaaagctggagcacgtgcagggttaaatgtcctgcgacggcaagcaaattggaatttttcctgacagctgcactacaccaaatttccccttttcgcatgtgcaaatgtgtgtgggccccaaaagtgggtcaaactgcagcgcgctgcgtctgttttatatgcactgcggtaaaatgagctccctgttttgggtgtacaaacctccccccctccccgccgtccttgtgaccaagcgaaactctagatccttattggagagcacagcaggggtcaacactttggtagtcagtcacatttctctagaaatttatgtaaaagaagcacagattgatttaatggacagtctgaaaatccaattaaatttgtttcttatatttgcgtgttttaccgttatcaagccttaattctccaaattaaatttacacgtgatgaaattaactgataacacaactagtgattcattatggtttctatacttttaccggcacaggtatgaataagccatctttgaacaccttttggagattgtaagaaacagggtagcagcttcctttaatttcaaattatcagattgaaaaatctacacagtcgtctaggacttttgccaacttttctttttttttattaaaaaaaccagacagattttcatagtgcgcgtatattttttgcactatttcgcagacgttcccacactctcaatcgacacagatcagccaccgtgtcgatagatccgagcagcagctagaaagaagggaagcagaaattggaagcggagacaaagaatccgagtcgaagagtccgtagttcagagaggaagaatcaaacgccagctatggtcatggatgcgacccaatcgcagcagccttcgccgcaatctgtgggacgcgagtttgtccgccagtactacacgctgttgaacaaggcgcccaaccacttgcatcgcttctataaccacaactcgtcgtacatccatggagagtccaagctggtggtcggtcagcgggagatccacaaccgaatccagcagctgaacttcaacgattgccacgcgaagatcagccaggttgatgcccaggccactttgggcaacggtgtggtggttcaggtcaccggggagctatccaatgatggccagccgatgcggcgttttacccagacgttcgttctggccgctcagtcgccgaagaagtactacgtgcacaacgacatcttccgctatcaggatctctacatcgaggacgagcaggatggcgagtcgcgatcggagaacgatgaggagcacgatgtgcaggtcgtcggtggcactgtggatcaagctgtgcaggtggccggcgatgtagttgcccagcagccgcagcaacagcaggctcctccgcagccacaggctcaggtcgtggtgccccagcaggtagctcctgtagcggccggtggtgctgccccacagcagatcttctacccattgccagcgggtgctgccgccggacgtcctgtggctgttttgccaccagctccgcaagccgctgctgttccactgcccgcgcagttcaccgttccgccgccacagcccatccagaacggtgtggtgtcgcacgaggagctgcagcagcagcaggtgctggtcccacccagcgtgtctcccctggtacagcagcagcagccgaccggcacgcctgtgttgcccattgttccagtgccaagcgcgggcttccaacagtcgccactggtggcaccacagctcatccagcagcagcagcagcagcaaccggcacagctgcccccgcagcagcagcagcagcagcaacctatccagcagcagcagcctttgcaacagcagcaacaaccgctggctgagcccgaggaagtggaggtggcgccaaggcagcagaagcctcccacgcccgtcgaggatttcaagaccattcacgagcagcagcagcaggagaagtacgaggccgccaagcagcagcagaatgagcccaagacgtacgcgaatctcttcaagtccacgtcctcctcgcccagcggctttgtgaacgccgcactgcagcagcagcaacagctccagcagcaacagcagcagcagcagtccatcagcagcaacacctataactcttcctcggcaacctcgggtggcggtaatggcagtcaggttagctactccaccaccgcttcgtcgtacaacaacagcaacggcaactcgcgactggacaacggtggcccgctgccgcagcgaaacaactcgatccgcaacaacaagggtggtaagttcatcgttccacccttaaattaaaaggggtcattcccctctattcggcttcagggtaaaaagactaaaagatgtagtgcaaacttttggatctcatgtagaaatgaaaacagtggtttctaagaattacttttttagtccccttataatttattatgattggcttacgttcagatttttagaaaggtaatgattcattttgttggtttactttcttatcaacttaaggttggcttatatgataagcaaaattgggtaccgctttttagaaactcttcctaataacttgctgtttatactttacagactttgagcagcgtcgctcgagcaacacgcagcagttcggtgataatcagcagctgtttttgggcaatataccgcaccacgccagcgaggatgatctgcgcgagatcttctcacgcttcggaaatgtcctggagctgcgcattttgtccaaggctggcaacaaggtgccaccaggcatgcgcagtccgctgaactacggattcattacctacgacgatcctgaggcggtgcaaaagtgcctggcgaactgcgtaagttaagcagaaagtagatttaattattggaattgctaaggtatctcttttatctccttacttttactgtgatcagaaaggttatctaaacatattctttccatttcatagcccctatacttcccggagaactcacccgatggccagaagttgaatgtggaggagaagaagccgcgtgtccgcaacgacatggtgccgcgccagcagatcggtggcaacaacctgaacaacaacatgggccgtttgggcggcaacaatggtccgcagtcgcgtccgatgggcaacaacaatggcagcggcggtggcatgatgcgcaacaatgccggtggcaacaatctgcgccagggcggcggcggaggaaacggtgctcctcgcctgggaggcggcggtggattcggacagcgccaggataaccgcaccggtggcggcaacaaccagtctaacggaccgctgcgcggtgccggaaatggacagagtggtggtggcaactacggacgtcgctaagggaattgtccagcagcacgacatcagcaaaagcatcaacaaatgagcaacggcagcagtagcgactataacatcaagaacagcagcaacaacccaacgttaaaaacatcgacttcttccacaatgcaatcaatcaattacattcaagaacatctcatgcaattaaacacacgcaaatcacacactcatacactaagataaagtagttggagcaacataaaacgtcaactgtcctttaaatgttcctgagcgcaactctcggggcgtcgaactacaaacaaaaaagaaggaaagaaagataggatgtaaagagttgcgtcaacggtcctgagtcccttcttagtttaattgcgttaggctcgctttttccagccagttcgtgccaaaatataccgaaattctgtgcaaatcttcgttgtgaatccaaaaactaaaagaatgtaagcttcagctcggcaactgctactctctaccacccaccacccactcacggaatcaacttcaccttgaaacacgtgtattaaatttaagtctcaaccaagcacacccacaaaacactcatcgcaaaacacacgatcgcacacaaaagccaacacaagatacatacactcacccattttagcataaatgtaaactttagtttcagcttttgtttggcattaaccttcaactaaaatctatcttaagtacgcaagatgcaagaaattggtttgatacgaaggaaaggagcaatgcaacacatttttgtttgttttttcattgaataacaccattacttaagctaaaaacaaaaaaataattaaaagggaaaacttacacacttagctaaaaagatataaagagaagtaaaagagaaaaaaaaaaacagaaaaaaaaatgaaaaacctttgtaaaatgcaataaaaaagagcaaaagaaagacttgaaaaaattaatttaaaaactaaaaaaaaaaatggaatgtaaacacgagaaaaatgtaaggcgcggttaaaaacaa

SEQ ID NO: 29003 - DNA, 2566 bp, DROSOPHILA
aggaaaagaggaacgaacgtcggttctcttctcgattcaacacacttgtccaatttcattgcgtttgcgattattttctactcaaaagccacaacatatgcatcgtaacttaattcaacaacaactgtgatcgccaaacatcagaaagcaacaaaaaatacacgtcaagaattgccaacgctccactaagaaatccaactctccccgccccccgcaggaagataacaaagaaaagtgctacaaaaagtgccgatttttcggcaaacttcaacccaaaagcaatacacactgtgcattacaaaaaggaaaaataaaaacgaggaaaaatatcgcttaaaaaagacgttcccacactctcaatcgacacagatcagccaccgtgtcgatagatccgagcagcagctagaaagaagggaagcagaaattggaagcggagacaaagaatccgagtcgaagagtccgtagttcagagaggaagaatcaaacgccagctatggtcatggatgcgacccaatcgcagcagccttcgccgcaatctgtgggacgcgagtttgtccgccagtactacacgctgttgaacaaggcgcccaaccacttgcatcgcttctataaccacaactcgtcgtacatccatggagagtccaagctggtggtcggtcagcgggagatccacaaccgaatccagcagctgaacttcaacgattgccacgcgaagatcagccaggttgatgcccaggccactttgggcaacggtgtggtggttcaggtcaccggggagctatccaatgatggccagccgatgcggcgttttacccagacgttcgttctggccgctcagtcgccgaagaagtactacgtgcacaacgacatcttccgctatcaggatctctacatcgaggacgagcaggatggcgagtcgcgatcggagaacgatgaggagcacgatgtgcaggtcgtcggtggcactgtggatcaagctgtgcaggtggccggcgatgtagttgcccagcagccgcagcaacagcaggctcctccgcagccacaggctcaggtcgtggtgccccagcaggtagctcctgtagcggccggtggtgctgccccacagcagatcttctacccattgccagcgggtgctgccgccggacgtcctgtggctgttttgccaccagctccgcaagccgctgctgttccactgcccgcgcagttcaccgttccgccgccacagcccatccagaacggtgtggtgtcgcacgaggagctgcagcagcagcaggtgctggtcccacccagcgtgtctcccctggtacagcagcagcagccgaccggcacgcctgtgttgcccattgttccagtgccaagcgcgggcttccaacagtcgccactggtggcaccacagctcatccagcagcagcagcagcagcaaccggcacagctgcccccgcagcagcagcagcagcagcaacctatccagcagcagcagcctttgcaacagcagcaacaaccgctggctgagcccgaggaagtggaggtggcgccaaggcagcagaagcctcccacgcccgtcgaggatttcaagaccattcacgagcagcagcagcaggagaagtacgaggccgccaagcagcagcagaatgagcccaagacgtacgcgaatctcttcaagtccacgtcctcctcgcccagcggctttgtgaacgccgcactgcagcagcagcaacagctccagcagcaacagcagcagcagcagtccatcagcagcaacacctataactcttcctcggcaacctcgggtggcggtaatggcagtcaggttagctactccaccaccgcttcgtcgtacaacaacagcaacggcaactcgcgactggacaacggtggcccgctgccgcagcgaaacaactcgatccgcaacaacaagggtgactttgagcagcgtcgctcgagcaacacgcagcagttcggtgataatcagcagctgtttttgggcaatataccgcaccacgccagcgaggatgatctgcgcgagatcttctcacgcttcggaaatgtcctggagctgcgcattttgtccaaggctggcaacaaggtgccaccaggcatgcgcagtccgctgaactacggattcattacctacgacgatcctgaggcggtgcaaaagtgcctggcgaactgccccctatacttcccggagaactcacccgatggccagaagttgaatgtggaggagaagaagccgcgtgtccgcaacgacatggtgccgcgccagcagatcggtggcaacaacctgaacaacaacatgggccgtttgggcggcaacaatggtccgcagtcgcgtccgatgggcaacaacaatggcagcggcggtggcatgatgcgcaacaatgccggtggcaacaatctgcgccagggcggcggcggaggaaacggtgctcctcgcctgggaggcggcggtggattcggacagcgccaggataaccgcaccggtggcggcaacaaccagtctaacggaccgctgcgcggtgccggaaatggacagagtggtggtggcaactacggacgtcgctaa

SEQ ID NO: 29004 - protein, 688 aa, DROSOPHILA
MDATQSQQPSPQSVGREFVRQYYTLLNKAPNHLHRFYNHNSSYIHGESKLVVGQREIHNRIQQLNFNDCHAKISQVDAQATLGNGVVVQVTGELSNDGQPMRRFTQTFVLAAQSPKKYYVHNDIFRYQDLYIEDEQDGESRSENDEEHDVQVVGGTVDQAVQVAGDVVAQQPQQQQAPPQPQAQVVVPQQVAPVAAGGAAPQQIFYPLPAGAAAGRPVAVLPPAPQAAAVPLPAQFTVPPPQPIQNGVVSHEELQQQQVLVPPSVSPLVQQQQPTGTPVLPIVPVPSAGFQQSPLVAPQLIQQQQQQQPAQLPPQQQQQQQPIQQQQPLQQQQQPLAEPEEVEVAPRQQKPPTPVEDFKTIHEQQQQEKYEAAKQQQNEPKTYANLFKSTSSSPSGFVNAALQQQQQLQQQQQQQQSISSNTYNSSSATSGGGNGSQVSYSTTASSYNNSNGNSRLDNGGPLPQRNNSIRNNKGDFEQRRSSNTQQFGDNQQLFLGNIPHHASEDDLREIFSRFGNVLELRILSKAGNKVPPGMRSPLNYGFITYDDPEAVQKCLANCPLYFPENSPDGQKLNVEEKKPRVRNDMVPRQQIGGNNLNNNMGRLGGNNGPQSRPMGNNNGSGGGMMRNNAGGNNLRQGGGGGNGAPRLGGGGGFGQRQDNRTGGGNNQSNGPLRGAGNGQSGGGNYGRR

SEQ ID NO: 29005 - DNA, 10942 bp, DROSOPHILA
ggcgaaataacattttgttacagtttcaacactgttttagccccactttcgttccgtttctatatgtacatatatacatatatattttctttctctccctttcttgaatgtctttgtcacgcttcctttgtgtggagctacataaattgttggctaattgcaagtggctcctttggccaagggaaaatatgaaaaaatgaaaaaaaaaaacaaagtatatgaaaaaatagaaagcggtgaagcttaaaggagaaaagggaggttccttaaagaaagaactgcgttcggggaaagcgagtgaaaagtgaaagctgagcacgacaacaaagactcaaaatggtaacaatgaaagacttctgttctatcgccattccacctttttttgactttttaccccgcgcacacacacacgctttcacccacctacacaaacacacacaaacacacacattgacacacacacaaacatcgaaacattccgtatagaagtctgcgttgtttgctgccttttgtccgcgtaattggtggaaaagaaaaactgggtggaaaattgtgttgtcgggtgcttgctgccacaacagtaagtgaaagctggaccattgccatgacagcaatattcttaacgttatgagctttcattttatttaagaattttctagggggggggggggggaaataaaaactctcacaccccaactggcgactagcacatgtgaggttaagctgcatttgggccaatttgataaatttattaaaggagccaaataggaaaataaaattgaaagaaaatctcaaagtatatatttatatacgcttattacctaacagcaaagcatttcgtctggagcctttaaatcaaatcgaaatacatatatttaaaaaatgacacttataattgatttcaacattcgtgtaatatgattaaggcatcttaaccggtcttgaaacaagtttatatcccaatttgcatgtcgttgcagtggttgtggccaaccagcagatgcgctccaccaccaatctgctgataatcaacctggccgtctcggacattctgttcgtcatcttctgtgtcccgttcacggctaccgattacgtgctgccggagtggccgtttggcaatgtgtggtgcaagtttgtccagtacatgattgtggttacgtgccactgcaggtgggtgtctatatataaatatatatatatatatatatatgttgcataaccgcacatactaacccgacttgtgacttgcagtgtttacacgctggtcctgatgtcctttgatcgcttcctggccgtcgttcatcccgtgactagcatgtccctgcgaacggagcgcaatgccacactgtgagtgtctcatccaaagtcctacttctttcgatcaatcaagtgcatctcactaatcactttcagtggccacatagtatcattgtcaaatcaaatcagaaaccaacttaagaaacaaatgaatagggcgcgcggagatggcacttttggttctaaagtgtaggtaggccatatcccacatcatctagagtaattgcatcaatttgtccgggctttgtaattagctagctctacccacctgaaagccttgttcgctggcctctgaccttttgccttgtgccatctgccttctgccacccgtttcatagatacttcgtctcagttacacaactgaatctttaaaagtggaaaaaactttagccgatagcgagtcgtcaacaaatttcttgcccaaccgagacagatttgcaagaaattaaaaacccacaaaaaaaaacggaccaggaatctttgtagaatttttttttaccctaaatcaagttgaaactttgtggcatgttccttgattaaaaaacttgcaacgcgtctaaagaaacttgaggtaaaaacgaggagtaatgaaggcgaagtaatatcaaaaaaaaaaaaaattataaatgctagcctgatgatttattttcataaacagctccattcaaagttccaaatatattgaaaccctttaatatatatatatatgttacttcttacatatttcacttcaactttcacatttccttagggccatcatgtgcgcctggataacgattgtgacgactgcgattccggtggcactttcgcactcggtgaggatttatcagtaccacggaaatgctggcaccgcttgcgtcttttccacggaggaggagatctggagtctcgtcggttttcaggttagtttcttacactagcttcacacacgagaacgagaacttagctgacaactttataaacttgagacaaacattttcattatgatatatatggtaacgcaaaaccaactgaacacacaaagtaaaaactttaaagcaaatgggttatagaaaatgtttaaaataaataaatattacccttattatgttctgtgtacattccacacactttgttgtgacggcaaatcgcttattgtcgaaatcaagtcatgttttccagcgatttcccagcaaaactgcaatatatttgctacttagaacgagcacttgtctccactccgccccacgcccacttctgagtccttcttttgtgaaatgcgaggattatatatatatatatatatatatatttatatatagtgggttcttaaagtcatgttcaagtccgtagattcacaacaaacagctgtgtgcatatcgatttttgtgactgctttaagccattgatttgtttgcaagcagggaattttaatcaatcctgcctacagagttgttcaaagtgtgaccatatttttggttttattgcactttttgcagcactgaaacgaaacaaacggccacacttctgactaagccactgtgcatccacgcaatgcatcttgcatcttcacagatccccattaagggtcaaagggtacattcagcaaagtggcaaacagcagagtgttcagtgccatattttgcaattattctcgcccgtcttctaagcgaaagatagcgcacaattccatcatcattatggtctagattcccccacatagatcagcgttatcccaaatggtttttccgttcgcttgagttgctcatatttgttcgccccccccccccgagtttgttatgtttattacttgaactttttgtctattaatcaattcgggggacttcgaaggtcttccttcgagtgtaatttcatgccggaaggatgttacaccggaaaacgctacagttgttttggccctctgggcgccgggtgaagggaagtggatggaacgagcttttgtcgtctatttccattcacacacagcggaatgaatgagccactgacaagctacactgagacaaattgtaattaagtagtaaaataaacgaagaaatgctcgattgaatgacttaatgattgtggtgcaccaaagtcaatgatggtattacttgcagtaatagtagtagtagtagtagtagtaggggaatttcgctcagtgtgaaccaggtgacttactggctgcttgactaactgactgactgactgactgactccccgagttattcggtatcttcagctaatatgcacccgagaattttgccggctcacctttccactcaacatgaaaaccaactggcacggcaaattgcacagttcgcttcgcccggggttttccgacactgacacggataaggatacggatacggcgtgtgcttcgtccttatgtccctgtcctgccacgcccccacattccccacacacccccacacatcccctgactgtgcacataaatcgcaattgctttggaaaacacgaaaaggaaaccgcaactttgagagcttagtacaaagtgtgaatgctctttgacggaatggaaataccgtagacacaatcaaaacttgacaattaagccgggatttgggattatgtttaaatatttttcagattatttcaagtatgatttgcttatggtatttgtacacagactacttcgtattccattccatttatttgtgggttcttttagaaagagcattataactgcaatgatacgccatttgagaggcggtgccattcttagttgggatttgattttccgcttttggaagtagccattgtcagggtcaaaacatacatacatacatacatacatacatacatacacatagtgtattatttcgagccttgcctggcaataaaataaaaatggatcaaacttgtgcggcgcgacgacgcatccgtcaaagcaaaacgaacagtgaaactaacgaccgaattgttgtcatcgtaaagaactcataaaactgaaacaaatagtctggaaaggggcggtggaaatgggaaatgagcggaaaatagtgtttatctttcaatactgtgtccaaaaaaaaaaaaataaaaataaataagagaaagtttatttaagttgacttctgttccgctttgctgaagaattcgagttgaactttaccataaatcacgacgccagtgaatggcttaaatttaacaaaatatatatgtaaatatacaagcattaatgtctgacgaattaattttgctattactagtcaactttattaaggctgtaaaaaaaaaacggccatcatttgatgtccgcaatatggcagccaatttataatttcaatcatgtttttggtaaatttcctgggggtaaatacatatacatacatacatacacatacatagatacttaggtatatatttcgaggaaaatttgtgtgaaaacgaagcactcatcagagcccgtggcaagttgattaatttcgctgagtgtcaagttgcgtttatggacaaatcccaggcgcaatttttgggtcatgccgaatattaagtatacgcccccgccccccaaccatttatcatgtggcacacacttcagtttatggctttttattaggaccagcataaagtttaaaggccgattgaatgaataaaaaaaaaaaaaaaaagaaaaaaaggaaggaaatacaaaaagttcgctactcaacttttggcaacttttatttatggcgattgtgctgtaaaatttcatggtgtatatccatcgattcgggcatctctgtatctttgttttctggcatattttgcatctttctatttcctaagtggaagttatataacccccatggcaaagtttatagttgcgagcttagatctagatatattatacgcacttgtctcggaccattgacacagcaaaatggctggctcatccatttccaaatgcaattgggcacagcagaagttccatttcgaaatgtttgctaatcatttggcgcgaaaatgactttcagttttgttttgttttcagcttaaaatgacaatttggctaaaagcagctgagttcactttcgtaacaactagcgaattttgaaagtggctaaaagaagctggaaactacaatatttgcaaatcagagttttctcttctttttttttgtggcttcagcttaccgattaactgaaaacaataattaaaatgccttttaaaaatatataatgaaataagagagggcacaaagccgattaaattaagctagtccgcttgattgagcgcaaaaagatcgaaaggtggcactttcaatcatggaaagagaataattaaaagtataaactgcagagttcatcagatatacatatagttaacatcattgtcgcacattacaaacaatttccttggcaatcaacactttaattgatgcatcggtaatccatccacaccctcatctcagctaaatgaataagtaattctttatgggtttcgatttgcggatacttatctttcaaattgcagaaagtgaaaccatagtacaagaatatatatgtatatatatatatattaagtacataaaatatataaaatatatgaacgtatgtaatggcttacaatataaacaccttttttttgggcttcttgtttactaattaatgggtgtaatgggtgccaaatctggtgagtggacagtgtgacatccggttacgagatgcagaacacaattggatccttattcgtggatacgatttcgagaagtgtcatcacggattatgtcactcgtgtcctggttttccttgccgttgtcgataacaaacgacatgttcattggccatggtcatgggtaaatcccaacaaagtgatttcgattccgtattccatggctgtcaggcattcgcccaacacccaccgcccaccgcccaccgcccaccgcccaccgcccttcgaaatttatgaatgtgaaggcgggccaacgattattattaacaattgcggtatgcgcgatttcatcggtgcaccggcacaaaaattttacatttcagcacatatgtatgtacatttctcaattgatattacaaaaagaaatataaatatatacaccgtttttttctttttgtgtactcatcgcgcttcctttccttttccgtttcattgcgcccatttcgtagcctacaattgatatatgtacatatattttgacttgcacctttgtgcatattttgttgctcctcattgccagttttccgattttccaccggttttatgatggtggtggaaaggggggttgggttgtgccttaatcatttacacctggctgccgactgcctgccacaaaggaaaaccgattccactcgaaagttgaggcgccgccaaatgagttttaagcctagcagctcaatggaaatatatgcagagccccagaaaaaaaaaacgaatgaagccccaaagaattcaaccggattcaaggttccaaatactttaaatatccattgctggctggctgctctaaaaagttgatcaaagtcccaatggggcaaagaaatcttaaagttcgtaaagagcaaaatgtactcaaaactattagatcgatttattattttaacttcgtaataaccacaggcataagttaatatcacttgaattatctttacaattatattccataactcggcgattaatttcagtgcgattcaatcgaaatatgtacagatattcaaccggaagccagtagcaactactcgaattttccgccactttttgaccaacgccactatctcatgcacacgcccattgcatggatatatatgcatataatatatatgcatatatctttttgtctgttgggaatacggctaagcggcagctggtaaatggaaatgggggctttggttttttttttttgtttttttggggggaactggcaagtgtctggtactcatatctggtatctggtcagcattacgggtcagcgcttctgacaatttccatgcagaaacaaaagtagctgacatggcagcagatggcagaggaaaagccttcgaccagttacagcaacataaaacaaaagtagttgtacaaaaaaaaattgcaaaataaatatatacaacttaactgaaagcatatatctatggttaggttttctttttgaactaaaaactattcttgtaagtttaaatctaagcctagtagctacctaagcccatggctactgacgaattcttcagacaaaaatcaatctgttcctgatcttgcacagacgcaacagaagatatttatttacgcattttccgcattttgtatcttatttcaggtctcattctttctatcgtcatatgtggcaccattgacgctgatttgtttcctatatatgggaatgctggctcgtctttggaaaagtgctcctggctgcaaaccttccgcagagtcacggtaagtaaatgtatatcccaacaaactccaacacacgaatatcgcgtatacgccatgggtgcggaaatattccttccgcttgtttcgttcgtcgtatttttttttgtagctacgcacctgctgccatgatgaatgcctttttattaggctgtgcgtaaagctcaggagctttggctcatgcattttttaagtggccaggtcaacgagaccgaatcataagtagaaatgtgagcgatattcccgcaggtttaggaaaatgtgagcgatattcccgcaggttcaggaaaatgcgactaacaaaaaaaaaagcccagtaaaatgacaatttgttgtcatatttcatgctacaaaacataaaactaaaactttaaacattatttcattacttctaaggtaaacctaacattttaaatagccacaaacaagttgctcaaactacgctccgtggataaagcgagaaagtaaagttaactaagccacacagacgtgatcggggtcagcaaccatcaatttgaagttgaacttgcggccactttaaactttgcgaaaaaaaaaaccttgcccccaagttcggttttatcataaatcgaaaactattaaattgtgctcactcttcgtatgaaatgaattcaacttaaataaaaaatattatacaagcatatttaaacctttgcatattttgtaaatacatatgtatatagtaaaattacttgtgatatttttgagtcgaactaatgtaaagacaacgctaagaaataaaaaaatatctaagaaatagctagttcttttgatctcagcttaagactaaaaatcaaatgtaaattggtttgagaagaagacacaatatttgtatttcgggtgattcttaagattaggaaaagattcaaagagagcagtttggagcacccaaatacatatatgtacattgggttgcgttttaaatttgaatggaaatgaacttgcgacgagttcgcaatccgcacgcaaagttcataaatcacagcgcggccaatgcaaaattcagcaactgaaatgcggcataatttatatgcactccagatatccaagtctatacatatgtgcattgtacatatatatccatattagtatatagtatatctcgcatatatcactaactctccgatttctgtttgttcttgttgtttcttgatttcagaaagggaaaaaggcgcgtcacccgaatggttgttgttgtcgtattggcattcgccatctgttggctgcccattcatgtgagtacaataaaacacctggcattaagtgcaaataatcaaaaatgcaatgcaatgcacaaggtgcatagcaaatttgccaaaatttaccaaaacagtaaacaatcgatttgttatatagctaattaagattgaacggcgaacagcaaatgaactcatattcatatacctatattggtagttgttaaaaaaaaaaaaagaaaaataggtcaaggtcaagcttaaatgattttgtaaactttattaaaaacttctaggcattcgaatagcaaagtttcaaattaaattctcagcctgcgttgcaagaaaattacagggctcataatcgatttattgtacttaaagtttcagccaccagtttgagtatcttaaattggcaatgggcggcaacagctgctggtaaaattttgttggcaaacacaatggatgatagttgcgataaattgacatttgcgatagtccgatattctgagtatttgctgaaatgcttaataagccagcagctgctgctccttgagttgccagcacagcaaagtgtttgcacaaaatcaatgtgcttgcaaattacaaacgaaattacaattacacagacactttggagcgcaagaaatgcgccaattgcatctgtcatatggcagcatatggcaactaataatgtaaatgcaggcaactcaaatcaaatgatgaacttaaaatgttttaattttaaatttaaatctatcgcttaaagtatgcaacagcctaagttgtgcctaatttactgaactttcgttgcttaaatctgcctaatgctcctttgcaggtcatcctcgtgctaaaggcactgaatctttatggcggcagccacttatcggtcattattcagattatatcccatgtggtggcgtacacgaattcgtgcatcaatccgatactgtatgcctttctatccgacaactttcgcaaggcattccgcaaggtgggcaacgcatccatccatcaataaatttatgatcattcggtaataatgtgatatcgatcaacttgcaggtggtctggtgtggaagtccgccacctttgatgaccaatcaacaggtgaccaagacaacgcgaactgcaaccggaaacggaacgtccaatattgaaatgctctaagcgggtatgtacatacatacatacatcatacatacatatatgcatacatatgtatgatcttacactccattgaatatttcaattgaatttacccataatatttaactattaattatcttattattatattatcttatgcttgcagctcttgaaagtaaactaattgagatggtcacaacatttttgaaggcgacttacaaactcgaaacagaaaatatgaatttaaaactgacaaagaaaacataaaaacgcggcgcatataagttaactatagtgtatatatagtaaacaatgtatgtctatgaggagaatataattttccgaattatgaaatgtgattgttttgatagtttaaaatgtgtacgcattatttcactaagaataagacaaccgaaaaggtatattataaacacgcatatattctatgttaaattttaatacgattggtttctttttaaacattgagcgccgtgtaagttgcatttgtggcctagaacttaagtatttaacataataaaatttaatttttccaaaataataaaaaaaaaagaaaaaataagaaagttaaagcttaaaactcaattgtttacattttgcacctgaaatattgaaaatggcaaacaaaatctgcaacagatatgctgtaaatttcctgagacagaaatcgatgagagttgacacactaattaatgattagaattgataagcagtgggatttcttaaacaatttgtagattttcgtgttataagcaagtcatatgtcatttagccactaagcgtttaataatataaaatcaattaaaattaattaacagaaaagacagaaaagaaaagttattacagatttacatgaccatattgagaagattagattt

SEQ ID NO: 29006 - DNA, 789 bp, DROSOPHILA
atgcgctccaccaccaatctgctgataatcaacctggccgtctcggacattctgttcgtcatcttctgtgtcccgttcacggctaccgattacgtgctgccggagtggccgtttggcaatgtgtggtgcaagtttgtccagtacatgattgtggttacgtgccactgcagtgtttacacgctggtcctgatgtcctttgatcgcttcctggccgtcgttcatcccgtgactagcatgtccctgcgaacggagcgcaatgccacactctacctaagcccatggctactgacgaattcttcagacaaaaatcaatctgttcctgatcttgcacagacgcaacagaagatatttatttacgcattttccgcattttgtatcttatttcaggtctcattctttctatcgtcatatgtggcaccattgacgctgatttgtttcctatatatgggaatgctggctcgtctttggaaaagtgctcctggctgcaaaccttccgcagagtcacgaaagggaaaaaggcgcgtcacccgaatggttgttgttgtcgtattggcattcgccatctgttggctgcccattcatgtcatcctcgtgctaaaggcactgaatctttatggcggcagccacttatcggtcattattcagattatatcccatgtggtggcgtacacgaattcgtgcatcaatccgatactgtatgcctttctatccgacaactttcgcaaggcattccgcaaggtgggcaacgcatccatccatcaataaatttatgatcattcggtaataatg

SEQ ID NO: 29007 - protein, 254 aa, DROSOPHILA
MRSTTNLLIINLAVSDILFVIFCVPFTATDYVLPEWPFGNVWCKFVQYMIVVTCHCSVYTLVLMSFDRFLAVVHPVTSMSLRTERNATLYLSPWLLTNSSDKNQSVPDLAQTQQKIFIYAFSAFCILFQVSFFLSSYVAPLTLICFLYMGMLARLWKSAPGCKPSAESRKGKRRVTRMVVVVVLAFAICWLPIHVILVLKALNLYGGSHLSVIIQIISHVVAYTNSCINPILYAFLSDNFRKAFRKVGNASIHQ

SEQ ID NO: 29008 - DNA, 7361 bp, DROSOPHILA
agtatgtacatatgtatgtttggccaagtgcgcgcacagtggagcaaactaaatcgagttatttcgtgttagtccggatgaatttttcctttttcctggcccctctaaatgtcaaaatgcttttgctgcttagtaaattagaagtttatatctgacgtgcttaccaccagcttcacttacatatacaatatggggacatgtcgttggactttcataaatgtttagctttattcagagaatggttatgtgaaacgcccaatttcacgcttttgttgtatgtaaatatgtatgtatgtagaacaagtattaatctattttagttgtgatgtgattcaaaaattttcagacaaatacgacgcggccgatttgatttctaaactgattgaaacacattatcatgtatctaaataaaagccgcattgagatccgtgattttgcggctaaaagccgcattgctttctttttaaaaactatattttcgaaaataaaaataaaatgtattcatacagttgcgcaaaataaaatagcaccacttgcccgcccaatcaaggttttaataagtgccgtactttagagcttaaaatgatttaaaaatacctttatggaaagagtaaaccgttaacttattaattccaaaaatacttgtaatatctttgaagtcgcttttgacatacatacatacatatatttcattttccatttataataagttcctaaaaagtgacgagtcataaacttgaaccactgtacctgaatgctgccgctgtggctactgcaacgagttgttgttgctctggccgctttaagctgcgcgaaagttgagtgagctcagcttgagagtcaaaatagcctagcgccaaaacaacaaaatcacagaaaccaaaagtcgggctcgtgagcaaaagggcagcattgccaagccaaaaaagtcggagaagagcgcctgcgcagcaaaagcaacaattacaagttgccaacagtctgattgtgagagcagcagcagccacagaggccgcgccgttgacgtttcagtttcagagtttctcgagtaaaacaaaatacatcgcgcgcagttgtcggtgaaaaaatgcagaaaaatcgaaaataaactcggaggccgcgctagaaaacggaaggcaacggaaaaagtgcattcgagttcgcattgcaattctgtatgtgcttaaacagagcttcagtgttgataaaccctatttaaagaaaacatttgaattcactcaaatttcaaagcaaaaaaagttacttaagccagaaaaactgtgccgaactgggtatccaacgttgtttttgctgcttttgtggcgagagacacatccccctttttgctccctccccgtcgaccaacattccatgcagttggcgcttgtttactcgttaagcgagagagagtggcagagggagagttttcacggagagaatgaagaacagaaaaaacagactatggcggctctttagataatgtttatggaacaaaatgaaaagcagcttctatccgaaacgtacatattacagcgattttgtgccaattataagttcattcaaactttttgctgagtcttgggttttacaatttaattgcgacaacatctgaaacgtcgaaaaatgcacgtgtctgggcgctgctaatgcacttcttactctctttctccctctctctcgtctttcgcagctttctctcacccacactctttttgattctcttttcctttctgtagacgatgcacttgcactgtggggcaaaactgtgtttaaaaaaccaattatatttgttaaatatgcaacgaaataaagtttcccccgttaacaattatgcaaactaaatatttcggttataagtagcagaaaacaataaaagctataaagacagggagaactacatgtaaacaatcattacaacgcattattttgggaatataactaaactgggtaagtgagtaaccctttatttccctaaagtattgatgcaaggtcgggtgtaatttttaaaacaaattgtttgtgccatattccaatttatctagccaagggtcgagctattatggaaatacatatgttattaaaataaaatacttaatttcaagaacccatttcgggtataaactaaaaaaaaaaacagaaacaataacttcacgcaaaaacgcgagcctgaaatatacgaaggtcttaagtaaaatgcatagtatatttttattacaaatgtagatatcaaaaaatatgtgtgttgctatcattatcaaaatgtatgtacatgtattataatacttttttcttttatagatggtaaatgttgtaacttttcggtttttttcgcaacacaaagtttatgcgatttgtttccggccatgttattgaaatatacgtaattaaacgatcaatggttaaatattcgtaacaaaagagaacgctacagtcaagtttctcgactatcaattaccattaacattcttggagtattgacatgaaaataaatcaaaagtttctaaattttgtgggcattagagtaggcctggtcaatgtttttggaatgtcgatagaaattggaaacaaaaataatgaaaataaaaaaatgcaacgaatttctcaaaagtgggcctggcagtttgtggaatggcgaaatagtttactttacacctaccactttttcctgaacaattatacatttcgagctaagttaagttacttatgacagtttttccactctgagaaattgagaacgaaaatacccgagatcggttatgctcagtactctgcatcaatcattctcatgagaagaaaccttcttgatttcgagacgaaaactatctcagtgtaatattttcagacggaagcagtatcgggttaaagattgtggaaaagccatgtcatttgcaatctgagaatgttttgatctcgatctgatgctgagcttgattcgacctcatatagattttgagatcgaaatactccgctaaatcaacaaacgcatcatacatcaagcagattaacatgaaaaaacttattcctaatatagcgatttggaatgcaagaatttaacagatcgcacttcagcgaatgatgcgtaattttgaggttttagtaaatcgtaataaaaattaaaaaccaagtctcaattttgacttttaattttttacatttcttgtttgtgatattctataaaaaattgtaaaaggtattgactactttgcactttagttcctgtgatctcgacattgaacagatagacaaacagacggatggacaaccggatatggctagatcgactcggcttgtgatcttgatctcttgaagaatagggtcggaaacgcttccttctacgtgtcacatatttttcaacgaaactagtataccttttactctacgaataacgggtataaatattaaggaaactctgtggttaatacccaagtgaaaatctctctgttaattgttatgcacataaattccagctgctatgttctcggcagcgttgggaattggaaatgcagatgagttgtggtcggctcaataagttctcccgttgattttagaaaaatactacccaaaccgaattctcctgttttttatgcagcggaaatgcatcatttgcagtgcccgccatctaccgcctctttccctctttggtcgtccgcaatgcttttgtcggtccgattgtctacccacacacacacaagacagcgtgagttaaaaaccagccggtccgagaaattagtgcaagtgcatgccaaaagtaagtcgaaacaaaccaaaaggcgaataaactctgccgattgcataggcactaggggttgaggtggaggaacagctgctgcaattttgaaatagaaaatgagcataactaccgcaaaaatgttaagttcgtagttgcattctctggactgttattgataattttgatttgcgtcatggttaattaaaatttaataatcattctctttgaaaccagatttcagaagggttaaataagcatgaatcaaaattgggtcaaaatgctcggttctagtcggtataggacggcgaagttcggaagtgctcctgcccatcgtgaaacgaccttatcaaggattctgggtcaatatgcttacgccattttgtcggcgctctgcttacgtgcttttcgtgtgtggattttgagagggcttatgcatagggtcattcgctttgtgggaggtacacttgagaattcaattttgcttaagcgaacgcattgatgaatcccttcgctatagttgtagttcaccagtttcatgtaacacataatgtacattaagctactgtgttggcctcgtgataccgttggtaatagatataaataatataaatattgaaataaatgtcaaagggcataaaattatattggtgaaacaaattgtttaagtccataagcgtgggccaattacttctttaaggagcttataagtcaacgacggcagtgatttattggaaattaggcactaaaatgcattggcgttcgtgaaagcagccacttgacggaggcagcgcaacagcctccgtggcgcaattggttagcgcgttcggctgttaaccgaaaggttggtggttcgagtccacccgggggcgaatatttctattttacctgtggaatctctttgttttttgcctactaagcttgacccctttttttaactaaatttttttatagagcgtcgctaaaaaggtatcaatgactgaggttattgttttcttcaacggatcatgaatatgagatttccaataattaataaataattttaaattacaattttttattttaattattgctgttaagaatataaataatgaaagaacatgaaaaataataaataccgcccccgggtggactcgaaccaccaacctttcggttaacagccgaacgcgctaaccaattgcgccacggaggctatggaaccagttcgatattccatatctagttacataccttgttatatcaataagtaaaattgatcagtttttaagaattttatcgataaatacaaaaacaattttcgaagacaattttcttattaaatttctattcaaacgtaaacgatttgctatatttaccggctaaactaagaatatgttctgttcaatttgagaaacaaagaactgtgggagtgcagggtataaagaaacgacgcctatcgtgtatgtttattcatatttaggtaaaacgtggcttgagaacttcgcacggcttattatgcacagatatttttgacacgtacggcgaactaaaatgtttctttcctaagcctatactgatatggatcaatgagttttttctgttttattactaagaataacttgaacacttctttaaatcagatttacgtaaaatttaacttgttttgaaaacaaaagcttttggcttggctgacaatcgacattagtccatcaaaatgtagaagcctccgtggcgcaattggttagcgcgttcggctgttaaccgaaaggttggtggttcgagtccacccgggggcgacttttttattttgatgcaattttactgaattttttactgaatttttttcagctcagttgctaggaaatgatgtgattttaagcgagtgggcatcatgaaggcgcggccatgttgacgacgagtggacaacaacagtcaaagcaaaagctgtcgaccttacctagccatattttgctacaacaacaattagctgcctctgcaggcccatcttcctcagtatccctatccccatcttcttctgccgccctgaccctgcatgtagccagtgctaatggcggtgcaagagaaacaacttctgcagccgcagtcaaggataaactaaggccgacacccacagccattaaaattgagcccatgccggacgtcatttccgtaggcacggtggccggaggatctagcgtagctactgttgttgctcccgcagcaaccacaacttccaataagccaaattctacagcggcgccctcgacgtcggctgcagctgcaaatggtcatttggtgcttgtgccgaacaaaagaccgcgacttgatgtgtaagacaactgaagaaaatgtgaaaaacaaaggcagcatattaataaagtacatattccatctacccgcagtaccgaggactggatgtccactcctagtccaggcagcgtgcccagctctgcgccgccactttcgccttcccccggctcgcagaatcacagctacaacatgtccaacggctatgcatcccccatgtccgccggaagctatgatccttacagtcctaccggcaaaacaggtgagttgaagaatacatttttaagtacaatcggtttaaattttacagtgcagtttttagcgattaatgtagttcaacctacttaaaaatgcttcttaaaatgggttaaattaaataaaatgcttcttatttttccaaacaaaaaaacaaaaaaccgaataagaaagtcaaacaaatgttgccccgtaaaaaaaaactaaacgtttcctttgaatgaaataaataattttttttttaaatagaagatttagaaaataaagaataaagtaagacctcagttttacttcaaaagtgaagaccaaagagcgaaaaaaatgtgtggccaaacaagtgtttgcttcacttactgtcacgtatttgtccagagggcgatttccgccaccgaacatggatgtgagctaaaagactagtgcaatctagatggcgctttaccatcaacatggtcgatatttgttttgttaaaatataacagtttcgggccgagtgccaaaaccaaaaagtagatggtgctgtacaacggatgtgcgagtagaacgaacttcgcttcactgttttgcgtatttgtccagatggcgcttttactccgccaccgtaaaagagctaaaagactcttgcaatctagttggcgcttttcaatcaacatggtcgatttttgctttaaccgtttcaggccgagtgccaaaatcaaaaagtaggtggcgctgtacaacggatgtgcttgtatagcgaacttcatacagtaaattctttcaacaatttatcgacgagcccaagtaataatctactgttaaatagttataacgggggttattaataactataatgtttatatttgttaaaggattgttaaatatattaattttattatatttataatgtttattcacaaaaagaagttcatcaagcttatgttcatcattcatataaaatttgtatataaatatataaaaattacaaatatacaaatatttttttagatttccacgcaagataaattataagagataattaaaaaaaatcaaaagatttttgcaacaaaagtctacaacatttcaataaatggcatcgccaagacaaaagaacttt

SEQ ID NO: 29009 - DNA, 1073 bp, DROSOPHILA
cagccacagaggccgcgccgttgacgtttcagtttcagagtttctcgagtaaaacaaaatacatcgcgcgcagttgtcggtgaaaaaatgcagaaaaatcgaaaataaactcggaggccgcgctagaaaacggaaggcaacggaaaaagtgcattcgagttcgcattgcaattctacgatgcacttgcactgtggggcaaaactgtgtttaaaaaaccaattatatttgttaaatatgcaacgaaataaagtttcccccgttaacaattatgcaaactaaatatttcggttataagtagcagaaaacaataaaagctataaagacagggagaactacatgtaaacaatcattacaacgcattattttgggaatataactaaactggctcagttgctaggaaatgatgtgattttaagcgagtgggcatcatgaaggcgcggccatgttgacgacgagtggacaacaacagtcaaagcaaaagctgtcgaccttacctagccatattttgctacaacaacaattagctgcctctgcaggcccatcttcctcagtatccctatccccatcttcttctgccgccctgaccctgcatgtagccagtgctaatggcggtgcaagagaaacaacttctgcagccgcagtcaaggataaactaaggccgacacccacagccattaaaattgagcccatgccggacgtcatttccgtaggcacggtggccggaggatctagcgtagctactgttgttgctcccgcagcaaccacaacttccaataagccaaattctacagcggcgccctcgacgtcggctgcagctgcaaatggtcatttggtgcttgtgccgaacaaaagaccgcgacttgatgttaccgaggactggatgtccactcctagtccaggcagcgtgcccagctctgcgccgccactttcgccttcccccggctcgcagaatcacagctacaacatgtccaacggctatgcatcccccatgtccgccggaagctatgatccttacagtcctaccggcaaaacagtgcagtttttagcgattaatgtagttcaacctacttaa

SEQ ID NO: 29010 - protein, 209 aa, DROSOPHILA; identical to SEQ ID NO: 1176

SEQ ID NO: 29011 - DNA, 24206 bp, DROSOPHILA
taaaaggcgaagccctcgcagtagcgagtcagttagattcaaacacccgaattgaactcattaaatgtacgcacaagtttatagtgtgaacaattgttctatgtgtggactgcagagccgtgggtttaatgagaagggtgcgtttgtacatacatgcgatttttcagctctttgtagacaataaaaccatgctagttcgctgtgttgtttgctgtaaaaaattatagaatgaaaaaaattcaaaaattgagtgagcctgaaaggattgggcggtttgtggtcgttaaagtggaagtggaaaaacgcttttaggcaaattgatagaaatttacaaaactcataaaaatatgacaaaatatcaaaacattttcaaaagtgtgagagagacagttttacgcggtttacgggcgttagagtgcggcgtggcaacatgcatcaacaaaatggcgctgctttattgtcgtttaatctgttcctgcgatctcgacgttcatacggacagacgggcatggctagatcgactcggctgttgatcctgttccagaatatatatatatgttcactattcacgttattgtctgagcaacgttttatggcggttgagcgatgcatgtctgttctgcgcaatgatcgaaaactaactgactcaatctcttttcacaaaatcagaattatgcgtagttcttaactttacacgtattaccaacaaattttggagaaccactccagtccacatacatcaatactaatgcacaccgcatttttctgtacgcttccgttatttctggagaccccctcttaaaagagactatgttcggcagaaactctaacggtcctatgccgcgcatcaaaagaatagaattcatgtgttccaactttgtcatcatacctcattatcttcttgtcatatcagctatatctatacgactattcaacattttttttaatttttcttttatattctgaaataaatttgtcagtaacaatattccgtgccatatttatatttttatatgtccttcttattatatatcgtataactttattcataaaaagtaacatcttattaataatttttaaacgaaatagggtatgcagttttgctttatacatagaagtattagtcatatgtgttacatacgagctacttaaaatgttgctttttatattaaaattatatgaatatctcttgattcccatgtccaaatcgcaattgacattataaacgttttttatactgctgaaatgtggtccggaagttctccattttcgtatttttcccacattcgtagaaacaatttttctaatcctttggcatactgtgagcaatcaaagagaggactctctacgcgggctttccatacttttgcccgtaaggctttcaaatattctttttttgttcccaggcgtatagcaatattttgatattcttctcttgtacgcgctattaactctggacatccaagggtagccagctgagaggcagccactctgaaacgaaaagaaatgcattcaaataatatacgtttatatttaaaccaaaatttggaatagcttaagaaaacataatgaaataggtgtctttttgtgttcttctttattctttactgttgtaatttaatttgattaggtaaattttattgttttatggttttaattaattgcatgtgcaaaatgccttgccacataattctatacaaacatttgggtttcgcttccatttccttaggtatattgaaaaatgttttaaaaattatatattactaaacacatatgtttattttatatctttaaaacggtataataatgtataattttgatttcttaatacaaatttcggtgttttattgtgcaattaatagaaacatttgtgggcagttatactatgcaaaataaatacaaataatacacaaaaaaaacacagaacaatgaaatttaaactattgtgactaagaatgaatttgcaattttcaaaagcaaactttagttgtgtaggtcactatttatattttagtaggtgcgaacaacataataatgcggtttaagcaaccagtgaaatattaataatctttcgacaaagatcgatagaactttacaagagtaatacaaatatgaaaagattttgaaaaagtgtgggcgtgcaaatttttggcagtttgtaggcgttgaaaaaaattaaaagcgtcgaataaaatttacaaaactaataaaaatatcaaaacatctctagaatctgaatgggaaatctcaacctctagttcctgagatcttgacgttcatacggacggacagacagacggctcggctattgatcctgatcaagaatattatacttcatatggtcggaaacgcttccctctacctttcacataattctcaaagagcctttttacgagtaacgggtattaaaatgataggtataggggtattggggtgatagaaaatcttttgtagagaattccatgaacataccgtgaggctaacgtctctcctggcaaagttacgacaggggtacccgtccacaaaacgtccatagatgttgtatgcccattgcataaaggagtatcaagacatatatcagctaattgaccccgtcgtacgtgctcttcttttgccgcaacattggaaaatattactctatcaggagatattcctagaaataagatatgttttatttttatatcattaattgaaaaaaattatatttaccaaagtcactgacggtttttttaatattttgctcaccaactgctggaaaccttaataaccacaaaactgacttaggcacattttttaaaatttctacccatgactcgagggtttgtggatcgattttgtatagctgattaaaattgcaatacacaacagcgtcatctggtaacatatattgacgtcgagtagttattacaatattttgtggtacctcttcaccagtagcggccttgttgttagtttgggtagtggccaatccgttttgaactacaacgccatttaaagatgtttgcacttgaccagtggctatcattgatactatttgtgttgtatttggtaactccgcaactttatgagttatctcgactggtttttgtgcgttaacaacttcttttatctcctttacatctgtgttttcaacaaggggagataaatctgttgcatttataaccgttacattgtcaacaacggaagattgttgtttgtcacagacaattattcgttcctttaaatgtggaaacatttgcttatgatcacctataaaatatgtgtgcggcatatatgacaatttttcactatattggtaagccaattctaatggactagttacagaatccgtaataatgtaatccataaaactagccccactagtacctggatagcctaaccacattacttgaataggagcagggcgaagagcaaatatttcatttcttgcaccctttgtgtagccattcatattaaccaaaatatgtataccgtcattaaatatcttgtccgctgccttgccattacaagggatctgagaaagatccacaaagttttcagactctcgactgattttgtgtcgaaatgttgtaccatcatctggacttaaggcatagcaaaagatttccacttttgaacgatcatgaagacctggcacagattgcattaaatgcgaggtaggatgattcccgaagtccgagctaagataacctattcgaagccttccttttgtaggcaacttctttaagaaattataaggttttttatgaagcacgtgaactttttctaaacacaaattagcgtgtcgcgctgcaattgctttccgacaatcatgtgtcaacggataaagcatcgagtggtgtggatgcacggatggtaaacggtttttttcaagctgctcagtgacaatgctaaccagttttttcatgcgaatatcgtagtcagtccaatcacaaacaatttgcaagcaatgagccaaattgcagtatgcatcaggaaaatcaggttttaactttagagccgttcggtaagactgaatcgcttcaggaatatttccggaatctttgtgtatgcttgccaaattactatgcgcatcagcaaatgctgggttaatttgaattgctctcgtgtagcattgcaatgccccgctgacatcttgcaattctttaagagtattccccatgtttgaatatgcatcagcaaatgtgggttgaattctaatagcttccttataatgcattaacgcttcctttaatttgccttgctgttgcaaaacagatgccaaatttgaatgagcagcagcaaaatcggggaaaacttccaaagcttttaaataaagtcgcgtagcttcttcaatatacccctgctctctctttatgttagctaaattattaagggaatctgcatgatttgaacatagtcttagtgcagtgttatagcagtcctcagcttctttaacctataaagattacttagttagtgcacaataaaaacataaataatacaaaataataaaacatacctgccccttttctttgagagcgtttgcaagattgcagtacgcatcggggaaatttggttgcagttctattgccctcctatatgtatcgatagctaaatcaataagaccttgttcatagtaaacgcatgccaaattgccatgaactacagcattattcggagatagatttaatgcacgtaaataggcggccacagctctaaaaagtattaaatattttaaaatgtgtgaagggttagtttcaaaaataagttcttaaaaatgttttaaaaatgtatagtaattatactcgattgccaataataatatgctcatataaatttaaacgtaccttttccataaaacctttaactggaaaataattgaaaaggtagttctgacgttgcttgtacatttcaacttatttgtatatttttcatccgaacagcatattttaattactgtataaaccatcacggattgatactccatttaagtagaaaacttatttcgattagttagtattaaatgtttgcaatacaaaaaatgtatacaaattgtctgccgacaaagaaaatatttatattaacatatataagaacacgcgtccaatattattttcgtttaatattcttttgaaaaaaatatgcatgtgtatatacaacacacataagcacggatacaacgaaatagatttatgtgacgtaaataaacgcaaatgttttcacactgtttatcaactgaataggttaggttaaatagctttcatcttcgaaaacgaaaattaaaagtaaaatcatattcaaatttttaattcgaacacttttcaaggccagatttccatgtttttatcttgtccgatttttatataaatatattttgaaattcttaaatattataataaaaaataacgttatagtccaatttcccaactacaatatacccgtcaggctgtaaaagtttttagcagttggacaatattctgaataatacttgcgttcctttagtttacgaccgttcatccgtccgatatatcgggaactataaattctgaagagttcaaattaaccatgccgattctaaagacttcattttttcattctatcatttatctccgcaatttttttgatatgccagaaacatttttggcccgtccactgtaacatccaaagggctcccaaaactttcgtgtcgaaaactctcactatctttgtaaggggtaccgaaaagtatgtaacaggcaaaaggtagggttcccgatcatataaaatatataaagtcttgatcaggatcaatagccgagccgtctgtctgtccgtccgtatgaacgtcaagatctcaggaactagaggttgagatttaccattcagattctagagatgttttgatatttttattagtcttgtaataataataatcttgtaataacccgttactcgtagagtataagggtatactagattcgttaaaaagtctgtaacaggcagaggggagcgtttctgaccatataaagtatttatattcttgatcaggatcaatagccgagtcgatctggccatgtcggtctgtccgtatgaacgtcgagacctcaggaaatataaaagctagaaggttgagattcaccacacagagcgtgccaaaaaattgtttggcaaatcgatagaaatgaaatagaaagactagtaaaattataaaaaacaagagagaatgctatggtcgagttctccgactatcagataccagtttctcagctagtgtgaaggcgaaggcaaaatttcataatttttctgggatatcggtagatattggggaataaaatgaaaaaaaaaaaattaaaaattgttccaaaatgtgggtgtgaacggttcggtggctttcgggcgttatagtgggcgtggcaaaaagttttttttggcaaatcgatagaaattataaaaaaaaatataacattttgcaaaagtgcttaagggcgttagagtgggcttggctttttttttcaaattgatagctatttacaagactaatatacaaatatgaaaaaatataatatatcgtttctttttgcctgttacatacttttcaacgaatctttaactctacgagtaacgggtataaaaagaggcatgaatatactgacagcatttataggctggtagaccattatatcaataaatattatcaagtcaagtaaatcaagtgagtttccctcttcgataaaacgtttcgctgtcaaaaatatattggttaggaaaaagaaaagtgaaagtctgctcttagggaaagtggtcattggtaggggtaaggcattcggcgagctcgattagaccagtgtttagctagcaaatttctaatcctttctttatgctgaaactatccttttctgaatatactatttgtagctacgagctacagattctcttatctttcaccaacttattcccttacacattacacctatttttcggttccttaaaaataaaaaaatctataagctctaaatcatcttgcggcccattgtccagcacagggttcagttatgttcctccaactttggccgcagcgaagaagaaccaaatctcgaatgcctaatatagaggcaaatatccaatatacccaatcatattctctagactcgtaattttaggtaatttacttaattgccacattgatataacatgataacatatgaatttttcacaatcctttaagtttttatgaggaattaggcgtataatagatgtttcttttggttaaatacgaaagtgtttactgcggctggcaaaacaatattatttgaaaaaaaaattcattttttccaaacttaagggaccagttccttgaaactcatacagatttttttcgtaaattgtactctttcaatgattttgggccccttttaatctaaattaataaagatctcatttgtgacacatttaataatacgtttttttttgcattttactttcgtgcttcccattttttatttcagcagcattaataaaagcattttgaaataaaacaaaagtaattagttcaacaattgcatagagatagcgagttacccgaatatcagttactcacctaaagccaatggaacaaacatttcataaattgtattggatatcattgatatttggaaaagaaatttgaaaaaatttaaaaattgttcaaagctgtgggccgatttgaaggtgcaaggaggggcgtggccaaagtgtttttggcataccaactgaaattggcaagacaaggaacaacgtatgggtcaacaagcatgcgctgcgtttatgcctctatgcttaatctcatgagatctcgacgttcatacagacggacatggccaaatctactcggacattgatcctgattaatgtcaatctatatatgtgctttatatggtgggtttcaacaacattcaacagcgtcttggacaacctcacctgcgattttcgagcacgcatcaccgtcgtgggactttaacgtgtgggccgcgctgtgctgttgtcaatgcacccgaaggagacattcaacaaatgtttaagcgagggaaagattcccgacagattgaagcaccagacaccactaccccatctgccaggctgtccatctggctgctggacacgattggcacggtcttcgataagatgatcgcgccgagtctcgaagaaagtcccctccaaaccattacggattccggaaaggcttgtcgacgctggacgcgatcaccacagcacggatgtcggacgttggtcgtaagcagctacttcagcaatcgggtgctcgtccttgactcgacacagagttcggataacggccagagtgccacaaggctctgtccttggaccgctgttcgggagcaccatgtacaatggtgctctaaagcttgctcttccggagagcaccgagatcgtggcgctgacagtggtcacaattgagttttcggccgccgccgaagaatcagcaaacacagcggtcaaggctgtcgaagcattgctagctgtggccggcgtggagttgtggagttgcctctagtctcgagcaggaagctcgtgaaagcagcacgcatcaaggttgggttggttgacattacagtgacgtcgcaacgctcgataaaagaactcggagtcattctcgacacgcgcctttcgttcagagaacacttcgagtacgcccacaaacaggccagcgctactgctgggtctcagtcgtgaattcttctaaacataagaggaccaaagtaaaacactcggaagttgttgacgggcgttgtaacagcctatgcagcttcagtatgggccgaagcttttgcgaccaagtcgtacacgccaccaaccgactatcagcggtgaggcggcatgtgcccttcgcacaatatcggacgatgccgccatggtcatcgctagcctggttcctcttggagaactagttcgggaagccaaggagcttcatccacaaagaacagcgccccaaaacgcaagatcagaaacaaaatagtacgccagaagtcgaagcctagccaactgacaaaccgggtgggaaaacttttcccgaggacgctggacccacggctgcttttggggctaccttaagcgctacgggtatggcacatacgacggctgtacggactgcggcgaagggatagtacagaatgcctatcacgtcatttttaagtatcatggttttcaccacgagcggctagcgctggaggagcttaactcccgaatttttggaacccctagtggtggataccacgaggacatgtaaggcagcttctaaatacgcagcgttcttcatgaagacaggaccgctagaatcgggtcccttattcggtttccacatctccacagttacgaagttatattatgtatgttaataaaaaataaaaacaagaggaaatgctatagtcgagttccccgactatcgactatcagataccccttactcagctagtgtgaatgcgaaatttcataatttttctgggatatcgatattgggtaaacaaatgagaaaatatgtaaacatttttcaaaagtgtgagcgtggccggtttggtggctttagggtggagtaaaaagttatttggcaaatcgatagaaatttacacgactaataacgactgaataattgatcctgatcaagaatatatacacattatatagtcggaaacgctttcttctgtatgttacatacttttctatgaatatagtagaacgatcaaagtcaagatgtagagcgacaagagatctttaatctttaaaaagccacacctaagtattcaaagatcagcaatacagcgtaaaataaaatccttggtgttaccatacaatactctgccgtgatccttaggttatatcactggcataatatacatttagtgggtaaaacctaaatgtaagaaacggtcttacctatcaaatattcgtgcctccttaagaacgtttcccaaatttatgtatgcatccaaaaaattgggatcaagagtcacagctttttcaaagtgatgtatagccaaccaaatttctccctgagcgttaaacacacatcctaggttactccatgcaactgcaaagccaggacatgtttcaattgcctttaggtaacaagcctaaaaatataatatgagaaataatgttatttattttatgattattagaatattgtttgtttgggcttgtaactaatttaatgtattttgctctatacataccttggcttcttccaaacgaccgagagccttaagaagatttcccagatcgctgcgcacacaatacagatcctacaaatgtgtacaataaagcttatatttgtatagatatttaaataaaaccttacaggattatattgtaacgctgtaatataagcttgaacggcagactccatgtcacgagcagcaactaatgcagcagccaaattaatgtatccatcaataaaatctggttttagacgtacagctctgcgatagttgtctaaagcttcttgtaactgtccacgctctttaaaaacatttcctaaattactaaaaaaaagatttttgtaaattacttgtcggtggaaaataatgttctatgattttaattttttctcattttattctgcaatatctatcgatatcaaagaaaacttaataaatttcgcgtccacatttccactagctttccatgtgttttatgtttctctttaaaaaagttccaaacagcaaactgtggtaacgattattggtcgcaatggctgatttttcttaattttttcgtaatattgaacttgtcgccatgttaataagaggctgatagatgattttcaagcggagatgtctacttccgttagattagatggtgaaaatgtgtccacagcgttggtcggtgcattcagcaacgacttcgttgtgtgtaggataattgtaggaatccttcccgacttcattgttaattgagaaggggggtttaacaaaaggggtttatactttgaacttaacattataaatattcaagtcgttttatctactgccacaaatgcaatatgcttacttacttagagcgatgtaaaaacgaaacattcaaattaatgatagcattcatagactcatttgaaaaatatactaaccaagattccattgcctcatttcggtgctaataaatatcaaaaaacttagatatcttatatttccaagtccctgctttgggtaactttttttgtgtgatcagattcggaagtcgagcattaaacattaactttcaaatattgattgactttgcggtttatattttattgtgtgcattttattccactttcgtgtattatttcgacactgtctcttaatttgatcttccattctcggcattagctttggagccgacttaagaaccctttaccacatcgttgctggacaaggcagcaactttgttcaatgctttcgaggcggcggcccatgggctaaacggcttgagtatttacatattcagctcctcatgagcaattcattccgacagtataggagttctaaaggttcaacaaatcacgctcgctgaacgcgaccgtgagaagacatcgttctcagtgaacggagggaagtatgagttccgaaaacttccattagattgattagattgatagattaaattctaaagagcctatatgatgcaaacatgaggatatcggcagaaaattcgcgttttttttaaagggttactagggttcatcgtcatcaacaatggtgaggcgactttacatcgacgaacatctttaccgacccctcacatttgcggtatcggaatacaatccgaacgccaagataaagagatggaaaacacgcatcgatgtcctgcacgtgaattttctacaagcccgtctacaagcatcgctgccgatgccatctcgagacaacaactcaaatttgttagagaccaggaaccagagtcgtgcgcggccaccgtactgtgaactgcatccaaaaccagatcattttagaagaggcgcgatccgcttgaaaacatttatactgttttgaaataagaggcggtactcaataaacttcccatgcaaacaaactttgcttgaggaactcgccaatatctttattgctaaaagtataaatgcattccactgtgaccttcacacggcggcactaatcccggacaacgtggttcgaaaatttccagccacaaaattttggcattgtaaaaataccgacatcttcgcggtcgaggaaagaaaataaattctcaccgctgagcacaacagagctcacaggtcggctcaggaaaacgttaagcaggttatctcggagaaatactttccaaacacgaccaagttggcgagcgaaatagcagccaattgcaaaacttgcgccaaatcgaagtatgacagacatccgaggaaaaaggagctcggtgaaacgccaatcccgactcatgtaggaaaaatattgcatatcgatattttctcaacgaataaaaagtactttctcacctgtattgacaagttttctaaattcgctatgatacagccggttccgtctagaaccatagaggatctaaaagctcccctgctacaacttctaaatgttttttccaaagcaaaaaccatctactgcgacaataaaccgtcattgaaaccgcacacaaatgaagccatgctggaaaaccatttcggcgtcagcatttcgaatggaccacccctccatagcgtctccaacggacaagagaaacgcttccatagcacgttgatcgaacttgctagatgcctaaaaatagagaaaggcataagttacacagaagagtttatcttgctggccactgccagatataacaaatctatccattccgtcattaacaagaaaacggacgaggttgtgcgggcagatacgcacgatccacaaaataacgttcatgttagtccaaacgtagtcaaaaagagggcaccgggagtatctagataacctatccttaatatatatcacaatgaagcacgaaatcttgagtctcaagaaattcgaggaaatgactactaagtaagccaaatggcacttattgcggaagaaatttggtgcgctcttgtcttcatcggcataacttcccagagagccactagagccaaaagattcgcggctcaactaaaggaagtgattgcccacatagggtcgaccgagggcggacttaatcatgagggaggagtagttaactaagttaaccggaccgatcgtccgtacatcagcaccgttcaaattcctgaccaagcccggaagttctcagatagccatcaaagctctgcatagcttttaagtcagttccttcttgacattaaaaaagagcatcactcaatttcaaagaatactccggcaacattttttattgtaccaattgactgagtccctaggccagcaatttagaaggacagttaccctttcaacataatcttcctatctcaacataggagcatcggctacccgaccacataccagtgactgcagcgagggatcctcccctgtagtactagtacatttaatatatttatatattcttgatcaggatcaatagccgagtcgatctggccatgtccgtttgtccgtatgaacgtcgagttcccaggaactgtaaaagctagaagtttgcacttcagcacacagattttaaaggcatagacgcagcgcatgttgctacgcccactctaaagcccaaacttgaaattaagagaaaacagagaaggtatatagaagtatagagaagttatataaaagtttattccttttatgttttcaaaaattcgaaatgtatgcacccaatattattgtacgaaaaagtattcccatctggtaccaccggtatggtagtttttggtaagttgacaacactaaaagttggctttactgctccgttttaactatgtgctcgatatttgtcatcatactaaaggcatccaacgagtacattttatgccagctttcataaaatcagactaaagttttaagtcgttggaactgggcgtgtgaactatgttattcgtttataaaataacaacttctatgattctttttgtgaaaaagtacttacctataagcttctgccagcacagggttttgttttattgccaatgttgagaattgcgctgacttatcaagacgtctgcactgaaagtgaatagatgacagcaacaacaaaactccagtatttgtactgtcttgacgccataattgcatgcaatgcttttccgcgctttcatagtcaacagcttggtattctctatgggccaactcgagtaaacctatattaaaatataaatttaagcattatagtttttgtactacagtacgtttatatatattcctatgtatttatactcgttactcgtatagtaaaaggtatagtaaaagggtatactatattcgttaaaaagtatatagcaggcagaagaaagcgtttccgaggaccgagtggatgccaggtccgtctgtccgtatgagcgtcgagaagctagaagcattcagcaagtttgttggaccatgttgccacgcccactataaaactcgaaagccgctcaaaactgccacgcccattttttgtaaccatttctctaattttttttttaaattttattagttttgtgaatttttatagatttgccaaacatctctttgccacgccctaagccgccgaaccggtcacgcccacactttggaacaatttgtaaattttttcatcaagaaaaattttaaaatttcgcgtccgcattcacactagctgagtaacggctatctgatagtcatagaacttgactacagcattctctcttgtttttttctatgctttgggcaatttttttttccaaactcatctgagcagttccaatctccggagagggcagagaagtaatagctagttaatattggcttatcgttttctgggtttgcaaaggcataaacttgtttactgggtttagtacgcagaaacttcttatatgggctcatattttgtatgagggggttggatggctggggtaaaggatttgaaggcatcttgtttcctgcttgtcctttcttattttcttaattttaacctaaatattgcccatttgcgtgtatagtctataacgatttgtaacgtaactatttgtatattttcgtatgctcaattatacctgttactcgtagagtaaaagggtatatttggttcgttgagaagtatgtaaaaggcagcaggaagagttcccgaatatatatacattttgatcacgatcaaaagacgagtcgatctgattattattattcgagttgtggtaagagtattaaaaccttctaaagatatcacataccgtccgtaggtggcatgtaagattcattattcctagcgcaattctgcctacgtactaaaacaaaaatctcctttcagtacttgcacgctcacgattggtccaagtacagatccttggggaacacctgccgaagcctcgatatctatttggcccagcttccttatcgtaccataggacacggtacccaaagttgctgacaacttctatcctcaggtaccatacagtttatggctccgaggattacgccccatctggcggtgttgaaggcgttctttacgtccagagtcactattgcgtagtattcctccctgcctcctagccatctatcaccagcaagagcggtcttgtcgatgttactcacggccaaaggagtgtccaggatactctttcccttccgaaagccatattgctgacttccttcgtcactgagagcatcgacggcctctattcgagtatacaagatatcttcggacagttttccaactatatttagtaggcatagagggcgggagctggttgcagcatatgctgatcccttgcatttgtgcagcagaactattttctggcttttccaccttattgaaaagattccgtccaaaagacattgctgtaaggtggccctgaagatgtcaggtctaccgaacgccaatgctttaacaactgcaccaggaattccatttagtccagcggctttattgggtttgatacgcttgtctacggttttttatacgacagcgatttggcagccgccatgccacgcttgaactctatgcgtttccttctgaaagccaccatgagctccgcgtggtgggtactgcctctggctcgtttcgccgttctcctagccctgaagcaatcagaccgtagttggcttagggtggcactccaccagtacacgtgtggtttgcgccgtacctttttcttccttctcatggttgcttcgcaagttttaccaagcatattcatgaggtcagccgccgaactctctgcatccctatttgggattaccagggaattgatttgataagccagcattttcctcatcgatcttcctggtatcccatgcttgatcggcgtgccctccggagagactaaaggaaatcatagcgtggtcgcacagcgttaccagcaatgatccttgggcttcgccctctcgcatggcccacaagcacctccacaaactcctcgaactggtcgggggcgtcgctaggcggagcatagcagcagtacatatacacgtgttttaccttcgcatatgcaattgcccgcataggtgatgcagccagttcctgaacgtggggagagctgcaacacttgatagctgctttacctgactcgtctaggatcttggagtattgtccccagtgacgtaaggttcgcttaggagcatgatgtttacatcgcgttccaccgcgattgagcgaccatgcagctgtggagctcctcttcttaggcttcaccttggtccactctgcagtcgtgctagaattctgggagacagattcatagctgcctggcttggactcgtttgctctggatgtcgcctttccttctcccttgctaccagtcgcttggtagttcggcttgggcgcctgaactttgggaacttgctccttgggcacctgcgcattgtgagaagccttttttgtaggcttttctacctatgtctgggtagcactgctcgtcaagcggtgctcgctagtggccccttcatacaactctatcgccctgttgttaagggctgagagtccttagtctctcttgtgacgtgcctttgagtttcaaatgcggatagcaggatgtttatcttgccagttatcctggtgagtatgcacttcaggttctggctctggagagccgtggtcaggtccgaagaccatcccgccttttgcgatggcatggtagtgtagtccatcgtcttctggcttgccgcgatagtagatgctgtaggagccaagttctccacctgtacagccgcaatgcactccctagttaacctgaggtaactagttagcctgcttgctcacccctcgcttccgccggaaccgagattccgtctccctgagtcgggttcccgacgggtttcccttgtttttctttatatatttcttgttttactgaattattcttttgtaaatttgctatgtaccaatctttttaaatgtgataaccctgtaaatttgtttttagatattgtttaaattaaaaatgcttcatacactgcgggtaaccggattagcgccccctgcgccgtttcttaaatctatcgacgttattgttttttgttcactgatattccctctctctttgaggataaaagaagaacagctatctttttaattctgctttgttttcctttcggcgaaaaattgggcacgtatattgcatcatgagattagcgcccccaatgcagttttgaatattttccataatttgaaaggtgagacaacaaaattatttatgctgttaaattgaaaagtttgctttcattttgcgaaaaaagagaagaaaaatctgaaatcatagctttctatcatagctttcttttcgtaaaattgcagaaaaaaagcgcatacatcgcaaaactatagccaattttattaaaaacaattaaacttatagaaaacactataaaggtggcaataacagtgtctttaacgcggcagatcgcaggtccacatgtcaaataccaattcccacaactgctccggccaaattcgagaaaaaaattagggtgattaagaaagctaaacatttaaaacacgaaaaaccgaaaaaatatagaaagttgcgaaaaaaatcacgactaagttttgccggagctcatatgacctagtctaacgagtggcattatgttgtactctgggacgagaaacaaagaaggatcaaataattattaatttcctttaaaaatattctaatttaaatatttaagtgctaatcaactaattttttttgaactgaatcgaaaaacttaaattattgtagggggcgctatcctgatgagccaattttcacttacccatacccattatggattgtctttcttttttatttaaataaaaatctaaaaacaacaaattttacatttatagaattgttcaacttttaagggaaacaaattttcaaagctttcgcttgaacagttttcttaatatctcacatgaaaaatttttgctcaaggagcactaacctggtgacgcacaggaatttagattattaggaggatttagatcttcaatgcacgtctcgataagatgaaatacagtttaagatcctacgtttttttacaaagtttggattttgattttttaagcctgtacctagttactaggtaactaattttaaaggatggacaaacgataaaaactaatttgcaaggatgggaaaacgatagacactaattttaaaggatggtcaaacgattaaaactaattttaaagaaataaattatttttaacagtgggcaaacgaaatatttatttctaagaggtgggcttacgaaataagttatattcaagcgaggcaaacgaaaaaaaaaatttaaagttttttaaaggcggacaaacgacaaaaacaaatattggttgggcaaatgtttttttataatatttggtaaaaaaatttaattagaaaaaattgaaaaggtcaaatttttgattttttaacatttttgattttgatgttgagctcttatgtacacataaactaacggagaacctaatttggtgacggccaaaattgctctctgtccgctcgcttacgatgagagcgtaagcaatctgaaaatagaatttgcttgtttgtgagagttaaaacaagagacgagaacgcgtatatgtgtgcgtgttgtgctagaagacgattttcgggccgaaatcaattctgatcaaagaaacgaatttacatatttggggagttttggccaatttcgtagcaatatgatgaaattgcgcgctgtttaaaaatatcaaattggaataaaacaaaaaaaactgcaactaaccaactgaatctaatgtgcattttaaataatataaatcgatcatttacataaatcatattaagtcgaaggacttaataaatatactaaataattaaggcaaatgcaaaggaagtatgataactactgtaatttaaaacataaattttccaaaaagaagacattaaattgcttacacaagcactcaacaatgccttattaatttttcacacgtcgcaagctgaatactctaatgacaaatattctaatatagtcatttttgaaatttattttgtgacattatgattcggctataactatttctaagctatatttaaataataatgacgttaaggcaagcaaaacaagaattttccgcatgatgccaattgatcaaaaataatatagatatatagatcaaaaataatatatatataaaaataatatagatctataatatagatagataatatctatgaacttctaaggtgaagggcatattttgtcaaatttacaatgcatgagcatacagtgtgcacacatacagttgtctgctatcactgtatgcgtagaaaagagctcttttgctctcgaactaaaattcgagagagcctggagccacctctacactatggggcatttggcctgtttttttttacaaaaattaatacctcctaaactattggagatatttggatgaatttttttttatgcggttacacatgcctccaggaatattttgaaaaagtggccggtgccccaactcccgccccaattttttttttttttaatatattatattataattttttttaataatatatttttaaagtttatttttaatttcaatattgtataattcataaccgtcttcctcttcacaatcggcagagtctgaagaatttttatcaggttcaaattcgcaagctaacatttgaatgacttctggtggaagagatagtcgcttatgttttcgcctctttaaatttattgatgatattatgggatccgtagtatccattgctctgtaaaagacatctgcgaagctactaatagtttttgctttggctgggttcaacaaaagaattttaagtatggctgcaagatcccgcaggcagcacttccgtacagcttgaaccaaaagacattcgttgtgattctgcgcccttacgagttcatctgcttgctgtcttcggccactcaaattttttaaataatatgacgttttcgggagtccagctaatttcctttcctttttatttttctcctttaccttcaggactaggtgttcttctaaccaatttgaaaaactttcaaaaattcatttatttttcgattgcattttctccaatttcgcaaaagattgactgaaatcattcgttattaatattattcggttaatcgttcattaaagtctagcttgctatcagaaatatgcccactgataaaagtgcaaatagaattttccttttgacgaacaaccttttgcttgcgccacacttccagcagggcagcattggaaatcgagatattgctccctaaaaaatgaaatttctcaagaaaccgcaaaaaacgcacatagagactacctgatatgagttagaaattgaacacactacaacatggatataaacacttactgaacaaatttgaacaaattgttgtagctctattcaaagtttaaaattttttcaaacaactacatgttgacaccacttgctaaatgtacaaattgttagaaataggcgcacacaataaacaatatattaataacaacacataataaaaacctaaagattgattatctatttcaaattatactctccttcttcttctttttaaattttaacactttgaaagttaagctaaattttgcgcgcaaagcagccacgtgatatatgctcgcaacagccgactttaacagctgttattataacggtgcattgtaaaattaacttttgcgggctgtatcataacagtttaacgtatttccaatgtattaatactaaaatacttcaaatttgcatacttgtgaaaaacacattattgtaaaaaaaacaggccaaatgccccatagtgctctagagccacatcgaatggcgttacgcatcttgttattctggtgtctttggccgtaccctttggtcgagttccgcaacagatttttaaatcaataaaacatagcaaggcaaataataaaatgaaaacaaaacttatttttaaacttccttcttcacactgaatattatttcgtgcaattatcagaggaagtaatctgtataagcttcatactttagagaaggcaactagatactatgctcaagagataattcctcaggtacagcaaggaaagatgattgagacacacactgagaactgcagacacatgcatatgtatgcagattgaaatacaggtatagatcatacacatccagattcaggactaccctaaaatgggccgagtcaatgagttttcaagatctctcactacgcagtcaatgatattctagaaataatacagtttaaacaaattagactagtgttaagcacttcaattggtgcagattaaccaacggatatgcagggtaacgaacccttgaaatttcaaaggacacatccgaagttgtctgctgtagtttgttcgtacagtttagaggtttcaaaccaataaggtatttcagcaccggattcttaaatttgttatataaaaaaaaagcaattttctaatcgttttagaaaacaaaaaggtgttttttatgccgcagcttattttgtgcagtatgttaatattcaataaatggccattttaaacctaacaattttttaattttaatatccgagattgatccaacttcgcggagaagcggaagcttctccctaaaagaaaatactgtattgaatgaaggccgaaaagcaccgaagaacttttcaatgaataccaaataatatatgtacatatatgtaatatatgttgtcaaaaatttaaaaaaggaaaaacgtgcaagctacagcagaacgaaaaaaaatttaagtgcaaagtaagctttaagccagaaaaaaaaaaaattacaataaaaaatttaattttagatggagtgagagataacattatagacgagtttctcgactaccagataccccttacaagatacggctttaatgagggatgcacatttagaatacggaaatcgtctgttttttaaccatgtcaataattctttcaaaaatattgcgtttacatttttctggtatctttcatcgaagcaatgccaacataaaaattaatttaactacacgaaataagctcagacactgaacactgatttttatgttgtgtgaatttttagatgcgtacaccatatgcatctcttaatatgttgttaatatgagacacattagacacatatctatctcgggccaggcataaccaattgtttgatttattgatttttcttaatttaattgtggttgtcttcgctgtcaaacttattcatttgcattaatgtataaagtatttaactagatgtattctttaaaaaaatcaattacaaacgtatgtacatacatatataaatgtatggttatttcttaccgactgatgaaagagattgaatgtcattttgttttacgactaggttactgcctgttgaattcggattttgatctaataatatatgggccgcggacggcagttgatggctctgtccttgagactgcatatttattcgtgtttgttcaacatgcattaaaatccaacgttgataacatgtgtctaaaatcaataagccacccttaagtaaagacactgtgatgttgtttacatgattaaacctttaagaaagagaatatcagtaaaatatcaatatgaattgcattaagttataaaagcaacctgatttaattattttcaaacatccactcagctgttaatacgatttacaagagaaaatcaaatatttacatactcaaatattgaacactgtgaacagcaacttaatagcttataccctattcttacggcggcaaaaaccatattaacataatatcaatgttataccaatgatataccacatataatttcaaatgaagagagaatggtattgtcgagtcaatcagataaccgttagtcagctcgtgaaaatgggaacacgaaattcattcatcatttttctgggatatcgttaaatactgggatataaaataagaacaaaattgtttcaaattgatcaaaagttcggtcttgaccggtttggaaggtgtaagaagggccgtggccgcgaattaatagaaattgtatacaaaaatcaaaaaatttcaaaacattttgaaattgttagcgttagagtggtcatggcaaaatgttttctggcaaattcatagaaatttaaaagaaaataaaaatatgaaagaataataaaacattttacataagtgtagacgtggcagttttgtccggtatgtgtgcgttggattgcacatggcaacatgggttaacaaacttgcgcggcgcctatgtctctagaatcacatatcacatacagtttgtcaagaaactgtttacacactgtaaaataagttgaatttttgactttaaagctaaaaataaagggttttttgcttaattaaacgcaattttttttataaaatataatcaaacaatatttattttacttataaatcaaaaaacaaattaaaaatattaaatatacaagaaaataaacaacaaattccaagtttacacgcttttaagactgtcaagaaactctctttattacagttgcggtaacaataatagcatcataagcacatttcgtgtttgtcccagcttttctctattttctgacactttctcattattttactcactaaacttaaatactacaatgattttcaatcgaaataaaaaaattagtaacagatctcatggatattttaaaaataatt

SEQ ID NO: 29012 - DNA, 3549 bp, DROSOPHILA
tcttgtaaatcgtattaacagctgagtggatgtttgaaaataattaaatcaggtttaatcatgtaaacaacatcacagtgtctttacttaagggtggcttattgattttagacacatgttatcaacgttggattttaatgcatgttgaacaaacacgaataaatatgcagtctcaaggacagagccatcaactgccgtccgcggcccatatattattagatcaaaatccgaattcaacaggcagtaacctagtcgtaaaacaaaatgacattcaatctctttcatcagtcggtttactcgagttggcccatagagaataccaagctgttgactatgaaagcgcggaaaagcattgcatgcaattatggcgtcaagacagtacaaatactggagttttgttgttgctgtcatctattcactttcagtgcagacgtcttgataagtcagcgcaattctcaacattggcaataaaacaaaaccctgtgctggcagaagcttatagtaatttaggaaatgtttttaaagagcgtggacagttacaagaagctttagacaactatcgcagagctgtacgtctaaaaccagattttattgatggatacattaatttggctgctgcattagttgctgctcgtgacatggagtctgccgttcaagcttatattacagcgttacaatataatcctgatctgtattgtgtgcgcagcgatctgggaaatcttcttaaggctctcggtcgtttggaagaagccaaggcttgttacctaaaggcaattgaaacatgtcctggctttgcagttgcatggagtaacctaggatgtgtgtttaacgctcagggagaaatttggttggctatacatcactttgaaaaagctgtgactcttgatcccaattttttggatgcatacataaatttgggaaacgttcttaaggaggcacgaatatttgatagagctgtggccgcctatttacgtgcattaaatctatctccgaataatgctgtagttcatggcaatttggcatgcgtttactatgaacaaggtcttattgatttagctatcgatacatataggagggcaatagaactgcaaccaaatttccccgatgcgtactgcaatcttgcaaacgctctcaaagaaaaggggcaggttaaagaagctgaggactgctataacactgcactaagactatgttcaaatcatgcagattcccttaataatttagctaacataaagagagagcaggggtatattgaagaagctacgcgactttatttaaaagctttggaagttttccccgattttgctgctgctcattcaaatttggcatctgttttgcaacagcaaggcaaattaaaggaagcgttaatgcattataaggaagctattagaattcaacccacatttgctgatgcatattcaaacatggggaatactcttaaagaattgcaagatgtcagcggggcattgcaatgctacacgagagcaattcaaattaacccagcatttgctgatgcgcatagtaatttggcaagcatacacaaagattccggaaatattcctgaagcgattcagtcttaccgaacggctctaaagttaaaacctgattttcctgatgcatactgcaatttggctcattgcttgcaaattgtttgtgattggactgactacgatattcgcatgaaaaaactggttagcattgtcactgagcagcttgaaaaaaaccgtttaccatccgtgcatccacaccactcgatgctttatccgttgacacatgattgtcggaaagcaattgcagcgcgacacgctaatttgtgtttagaaaaagttcacgtgcttcataaaaaaccttataatttcttaaagaagttgcctacaaaaggaaggcttcgaataggttatcttagctcggacttcgggaatcatcctacctcgcatttaatgcaatctgtgccaggtcttcatgatcgttcaaaagtggaaatcttttgctatgccttaagtccagatgatggtacaacatttcgacacaaaatcagtcgagagtctgaaaactttgtggatctttctcagatcccttgtaatggcaaggcagcggacaagatatttaatgacggtatacatattttggttaatatgaatggctacacaaagggtgcaagaaatgaaatatttgctcttcgccctgctcctattcaagtaatgtggttaggctatccaggtactagtggggctagttttatggattacattattacggattctgtaactagtccattagaattggcttaccaatatagtgaaaaattgtcatatatgccgcacacatattttataggtgatcataagcaaatgtttccacatttaaaggaacgaataattgtctgtgacaaacaacaatcttccgttgttgacaatgtaacggttataaatgcaacagatttatctccccttgttgaaaacacagatgtaaaggagataaaagaagttgttaacgcacaaaaaccagtcgagataactcataaagttgcggagttaccaaatacaacacaaatagtatcaatgatagccactggtcaagtgcaaacatctttaaatggcgttgtagttcaaaacggattggccactacccaaactaacaacaaggccgctactggtgaagaggtaccacaaaatattgtaataactactcgacgtcaatatatgttaccagatgacgctgttgtgtattgcaattttaatcagctatacaaaatcgatccacaaaccctcgagtcatgggtagaaattttaaaaaatgtgcctaagtcagttttgtggttattaaggtttccagcagttggtgagcaaaatattaaaaaaaccgtcagtgactttggaatatctcctgatagagtaatattttccaatgttgcggcaaaagaagagcacgtacgacggggtcaattagctgatatatgtcttgatactcctttatgcaatgggcatacaacatctatggacgttttgtggacgggtacccctgtcgtaactttgccaggagagacgttagcctcacgagtggctgcctctcagctggctacccttggatgtccagagttaatagcgcgtacaagagaagaatatcaaaatattgctatacgcctgggaacaaaaaaagaatatttgaaagccttacgggcaaaagtatggaaagcccgcgtagagagtcctctctttgattgctcacagtatgccaaaggattagaaaaattgtttctacgaatgtgggaaaaatacgaaaatggagaacttccggaccacatttcagcagtataaaaaacgtttataatgtcaattgcgatttggacatgggaatcaagagatattcatataattttaatataaaaagcaacattttaagtagctcgtatgtaacacatatgactaatacttctatgtataaagcaaaactgcataccctatttcgtttaaaaattattaataagatgttactttttatgaataaagttatacgatatataataagaaggacatataaaaatataaa

SEQ ID NO: 29013 - protein, 1059 aa, DROSOPHILA; identical to SEQ ID NO: 4782

SEQ ID NO: 29014 - DNA, 24200 bp, DROSOPHILA
taaaaggcgaagccctcgcagtagcgagtcagttagattcaaacacccgaattgaactcattaaatgtacgcacaagtttatagtgtgaacaattgttctatgtgtggactgcagagccgtgggtttaatgagaagggtgcgtttgtacatacatgcgatttttcagctctttgtagacaataaaaccatgctagttcgctgtgttgtttgctgtaaaaaattatagaatgaaaaaaattcaaaaattgagtgagcctgaaaggattgggcggtttgtggtcgttaaagtggaagtggaaaaacgcttttaggcaaattgatagaaatttacaaaactcataaaaatatgacaaaatatcaaaacattttcaaaagtgtgagagagacagttttacgcggtttacgggcgttagagtgcggcgtggcaacatgcatcaacaaaatggcgctgctttattgtcgtttaatctgttcctgcgatctcgacgttcatacggacagacgggcatggctagatcgactcggctgttgatcctgttccagaatatatatatatgttcactattcacgttattgtctgagcaacgttttatggcggttgagcgatgcatgtctgttctgcgcaatgatcgaaaactaactgactcaatctcttttcacaaaatcagaattatgcgtagttcttaactttacacgtattaccaacaaattttggagaaccactccagtccacatacatcaatactaatgcacaccgcatttttctgtacgcttccgttatttctggagaccccctcttaaaagagactatgttcggcagaaactctaacggtcctatgccgcgcatcaaaagaatagaattcatgtgttccaactttgtcatcatacctcattatcttcttgtcatatcagctatatctatacgactattcaacattttttttaatttttcttttatattctgaaataaatttgtcagtaacaatattccgtgccatatttatatttttatatgtccttcttattatatatcgtataactttattcataaaaagtaacatcttattaataatttttaaacgaaatagggtatgcagttttgctttatacatagaagtattagtcatatgtgttacatacgagctacttaaaatgttgctttttatattaaaattatatgaatatctcttgattcccatgtccaaatcgcaattgacattataaacgttttttatactgctgaaatgtggtccggaagttctccattttcgtatttttcccacattcgtagaaacaatttttctaatcctttggcatactgtgagcaatcaaagagaggactctctacgcgggctttccatacttttgcccgtaaggctttcaaatattctttttttgttcccaggcgtatagcaatattttgatattcttctcttgtacgcgctattaactctggacatccaagggtagccagctgagaggcagccactctgaaacgaaaagaaatgcattcaaataatatacgtttatatttaaaccaaaatttggaatagcttaagaaaacataatgaaataggtgtctttttgtgttcttctttattctttactgttgtaatttaatttgattaggtaaattttattgttttatggttttaattaattgcatgtgcaaaatgccttgccacataattctatacaaacatttgggtttcgcttccatttccttaggtatattgaaaaatgttttaaaaattatatattactaaacacatatgtttattttatatctttaaaacggtataataatgtataattttgatttcttaatacaaatttcggtgttttattgtgcaattaatagaaacatttgtgggcagttatactatgcaaaataaatacaaataatacacaaaaaaaacacagaacaatgaaatttaaactattgtgactaagaatgaatttgcaattttcaaaagcaaactttagttgtgtaggtcactatttatattttagtaggtgcgaacaacataataatgcggtttaagcaaccagtgaaatattaataatctttcgacaaagatcgatagaactttacaagagtaatacaaatatgaaaagattttgaaaaagtgtgggcgtgcaaatttttggcagtttgtaggcgttgaaaaaaattaaaagcgtcgaataaaatttacaaaactaataaaaatatcaaaacatctctagaatctgaatgggaaatctcaacctctagttcctgagatcttgacgttcatacggacggacagacagacggctcggctattgatcctgatcaagaatattatacttcatatggtcggaaacgcttccctctacctttcacataattctcaaagagcctttttacgagtaacgggtattaaaatgataggtataggggtattggggtgatagaaaatcttttgtagagaattccatgaacataccgtgaggctaacgtctctcctggcaaagttacgacaggggtacccgtccacaaaacgtccatagatgttgtatgcccattgcataaaggagtatcaagacatatatcagctaattgaccccgtcgtacgtgctcttcttttgccgcaacattggaaaatattactctatcaggagatattcctagaaataagatatgttttatttttatatcattaattgaaaaaaattatatttaccaaagtcactgacggtttttttaatattttgctcaccaactgctggaaaccttaataaccacaaaactgacttaggcacattttttaaaatttctacccatgactcgagggtttgtggatcgattttgtatagctgattaaaattgcaatacacaacagcgtcatctggtaacatatattgacgtcgagtagttattacaatattttgtggtacctcttcaccagtagcggccttgttgttagtttgggtagtggccaatccgttttgaactacaacgccatttaaagatgtttgcacttgaccagtggctatcattgatactatttgtgttgtatttggtaactccgcaactttatgagttatctcgactggtttttgtgcgttaacaacttcttttatctcctttacatctgtgttttcaacaaggggagataaatctgttgcatttataaccgttacattgtcaacaacggaagattgttgtttgtcacagacaattattcgttcctttaaatgtggaaacatttgcttatgatcacctataaaatatgtgtgcggcatatatgacaatttttcactatattggtaagccaattctaatggactagttacagaatccgtaataatgtaatccataaaactagccccactagtacctggatagcctaaccacattacttgaataggagcagggcgaagagcaaatatttcatttcttgcaccctttgtgtagccattcatattaaccaaaatatgtataccgtcattaaatatcttgtccgctgccttgccattacaagggatctgagaaagatccacaaagttttcagactctcgactgattttgtgtcgaaatgttgtaccatcatctggacttaaggcatagcaaaagatttccacttttgaacgatcatgaagacctggcacagattgcattaaatgcgaggtaggatgattcccgaagtccgagctaagataacctattcgaagccttccttttgtaggcaacttctttaagaaattataaggttttttatgaagcacgtgaactttttctaaacacaaattagcgtgtcgcgctgcaattgctttccgacaatcatgtgtcaacggataaagcatcgagtggtgtggatgcacggatggtaaacggtttttttcaagctgctcagtgacaatgctaaccagttttttcatgcgaatatcgtagtcagtccaatcacaaacaatttgcaagcaatgagccaaattgcagtatgcatcaggaaaatcaggttttaactttagagccgttcggtaagactgaatcgcttcaggaatatttccggaatctttgtgtatgcttgccaaattactatgcgcatcagcaaatgctgggttaatttgaattgctctcgtgtagcattgcaatgccccgctgacatcttgcaattctttaagagtattccccatgtttgaatatgcatcagcaaatgtgggttgaattctaatagcttccttataatgcattaacgcttcctttaatttgccttgctgttgcaaaacagatgccaaatttgaatgagcagcagcaaaatcggggaaaacttccaaagcttttaaataaagtcgcgtagcttcttcaatatacccctgctctctctttatgttagctaaattattaagggaatctgcatgatttgaacatagtcttagtgcagtgttatagcagtcctcagcttctttaacctataaagattacttagttagtgcacaataaaaacataaataatacaaaataataaaacatacctgccccttttctttgagagcgtttgcaagattgcagtacgcatcggggaaatttggttgcagttctattgccctcctatatgtatcgatagctaaatcaataagaccttgttcatagtaaacgcatgccaaattgccatgaactacagcattattcggagatagatttaatgcacgtaaataggcggccacagctctaaaaagtattaaatattttaaaatgtgtgaagggttagtttcaaaaataagttcttaaaaatgttttaaaaatgtatagtaattatactcgattgccaataataatatgctcatataaatttaaacgtaccttttccataaaacctttaactggaaaataattgaaaaggtagttctgacgttgcttgtacatttcaacttatttgtatatttttcatccgaacagcatattttaattactgtataaaccatcacggattgatactccatttaagtagaaaacttatttcgattagttagtattaaatgtttgcaatacaaaaaatgtatacaaattgtctgccgacaaagaaaatatttatattaacatatataagaacacgcgtccaatattattttcgtttaatattcttttgaaaaaaatatgcatgtgtatatacaacacacataagcacggatacaacgaaatagatttatgtgacgtaaataaacgcaaatgttttcacactgtttatcaactgaataggttaggttaaatagctttcatcttcgaaaacgaaaattaaaagtaaaatcatattcaaatttttaattcgaacacttttcaaggccagatttccatgtttttatcttgtccgatttttatataaatatattttgaaattcttaaatattataataaaaaataacgttatagtccaatttcccaactacaatatacccgtcaggctgtaaaagtttttagcagttggacaatattctgaataatacttgcgttcctttagtttacgaccgttcatccgtccgatatatcgggaactataaattctgaagagttcaaattaaccatgccgattctaaagacttcattttttcattctatcatttatctccgcaatttttttgatatgccagaaacatttttggcccgtccactgtaacatccaaagggctcccaaaactttcgtgtcgaaaactctcactatctttgtaaggggtaccgaaaagtatgtaacaggcaaaaggtagggttcccgatcatataaaatatataaagtcttgatcaggatcaatagccgagccgtctgtctgtccgtccgtatgaacgtcaagatctcaggaactagaggttgagatttaccattcagattctagagatgttttgatatttttattagtcttgtaataataataatcttgtaataacccgttactcgtagagtataagggtatactagattcgttaaaaagtctgtaacaggcagaggggagcgtttctgaccatataaagtatttatattcttgatcaggatcaatagccgagtcgatctggccatgtcggtctgtccgtatgaacgtcgagacctcaggaaatataaaagctagaaggttgagattcaccacacagagcgtgccaaaaaattgtttggcaaatcgatagaaatgaaatagaaagactagtaaaattataaaaaacaagagagaatgctatggtcgagttctccgactatcagataccagtttctcagctagtgtgaaggcgaaggcaaaatttcataatttttctgggatatcggtagatattggggaataaaatgaaaaaaaaaaaattaaaaattgttccaaaatgtgggtgtgaacggttcggtggctttcgggcgttatagtgggcgtggcaaaaagttttttttggcaaatcgatagaaattataaaaaaaaatataacattttgcaaaagtgcttaagggcgttagagtgggcttggctttttttttcaaattgatagctatttacaagactaatatacaaatatgaaaaaatataatatatcgtttctttttgcctgttacatacttttcaacgaatctttaactctacgagtaacgggtataaaaagaggcatgaatatactgacagcatttataggctggtagaccattatatcaataaatattatcaagtcaagtaaatcaagtgagtttccctcttcgataaaacgtttcgctgtcaaaaatatattggttaggaaaaagaaaagtgaaagtctgctcttagggaaagtggtcattggtaggggtaaggcattcggcgagctcgattagaccagtgtttagctagcaaatttctaatcctttctttatgctgaaactatccttttctgaatatactatttgtagctacgagctacagattctcttatctttcaccaacttattcccttacacattacacctatttttcggttccttaaaaataaaaaaatctataagctctaaatcatcttgcggcccattgtccagcacagggttcagttatgttcctccaactttggccgcagcgaagaagaaccaaatctcgaatgcctaatatagaggcaaatatccaatatacccaatcatattctctagactcgtaattttaggtaatttacttaattgccacattgatataacatgataacatatgaatttttcacaatcctttaagtttttatgaggaattaggcgtataatagatgtttcttttggttaaatacgaaagtgtttactgcggctggcaaaacaatattatttgaaaaaaaaattcattttttccaaacttaagggaccagttccttgaaactcatacagatttttttcgtaaattgtactctttcaatgattttgggccccttttaatctaaattaataaagatctcatttgtgacacatttaataatacgtttttttttgcattttactttcgtgcttcccattttttatttcagcagcattaataaaagcattttgaaataaaacaaaagtaattagttcaacaattgcatagagatagcgagttacccgaatatcagttactcacctaaagccaatggaacaaacatttcataaattgtattggatatcattgatatttggaaaagaaatttgaaaaaatttaaaaattgttcaaagctgtgggccgatttgaaggtgcaaggaggggcgtggccaaagtgtttttggcataccaactgaaattggcaagacaaggaacaacgtatgggtcaacaagcatgcgctgcgtttatgcctctatgcttaatctcatgagatctcgacgttcatacagacggacatggccaaatctactcggacattgatcctgattaatgtcaatctatatatgtgctttatatggtgggtttcaacaacattcaacagcgtcttggacaacctcacctgcgattttcgagcacgcatcaccgtcgtgggactttaacgtgtgggccgcgctgtgctgttgtcaatgcacccgaaggagacattcaacaaatgtttaagcgagggaaagattcccgacagattgaagcaccagacaccactaccccatctgccaggctgtccatctggctgctggacacgattggcacggtcttcgataagatgatcgcgccgagtctcgaagaaagtcccctccaaaccattacggattccggaaaggcttgtcgacgctggacgcgatcaccacagcacggatgtcggacgttggtcgtaagcagctacttcagcaatcgggtgctcgtccttgactcgacacagagttcggataacggccagagtgccacaaggctctgtccttggaccgctgttcgggagcaccatgtacaatggtgctctaaagcttgctcttccggagagcaccgagatcgtggcgctgacagtggtcacaattgagttttcggccgccgccgaagaatcagcaaacacagcggtcaaggctgtcgaagcattgctagctgtggccggcgtggagttgtggagttgcctctagtctcgagcaggaagctcgtgaaagcagcacgcatcaaggttgggttggttgacattacagtgacgtcgcaacgctcgataaaagaactcggagtcattctcgacacgcgcctttcgttcagagaacacttcgagtacgcccacaaacaggccagcgctactgctgggtctcagtcgtgaattcttctaaacataagaggaccaaagtaaaacactcggaagttgttgacgggcgttgtaacagcctatgcagcttcagtatgggccgaagcttttgcgaccaagtcgtacacgccaccaaccgactatcagcggtgaggcggcatgtgcccttcgcacaatatcggacgatgccgccatggtcatcgctagcctggttcctcttggagaactagttcgggaagccaaggagcttcatccacaaagaacagcgccccaaaacgcaagatcagaaacaaaatagtacgccagaagtcgaagcctagccaactgacaaaccgggtgggaaaacttttcccgaggacgctggacccacggctgcttttggggctaccttaagcgctacgggtatggcacatacgacggctgtacggactgcggcgaagggatagtacagaatgcctatcacgtcatttttaagtatcatggttttcaccacgagcggctagcgctggaggagcttaactcccgaatttttggaacccctagtggtggataccacgaggacatgtaaggcagcttctaaatacgcagcgttcttcatgaagacaggaccgctagaatcgggtcccttattcggtttccacatctccacagttacgaagttatattatgtatgttaataaaaaataaaaacaagaggaaatgctatagtcgagttccccgactatcgactatcagataccccttactcagctagtgtgaatgcgaaatttcataatttttctgggatatcgatattgggtaaacaaatgagaaaatatgtaaacatttttcaaaagtgtgagcgtggccggtttggtggctttagggtggagtaaaaagttatttggcaaatcgatagaaatttacacgactaataacgactgaataattgatcctgatcaagaatatatacacattatatagtcggaaacgctttcttctgtatgttacatacttttctatgaatatagtagaacgatcaaagtcaagatgtagagcgacaagagatctttaatctttaaaaagccacacctaagtattcaaagatcagcaatacagcgtaaaataaaatccttggtgttaccatacaatactctgccgtgatccttaggttatatcactggcataatatacatttagtgggtaaaacctaaatgtaagaaacggtcttacctatcaaatattcgtgcctccttaagaacgtttcccaaatttatgtatgcatccaaaaaattgggatcaagagtcacagctttttcaaagtgatgtatagccaaccaaatttctccctgagcgttaaacacacatcctaggttactccatgcaactgcaaagccaggacatgtttcaattgcctttaggtaacaagcctaaaaatataatatgagaaataatgttatttattttatgattattagaatattgtttgtttgggcttgtaactaatttaatgtattttgctctatacataccttggcttcttccaaacgaccgagagccttaagaagatttcccagatcgctgcgcacacaatacagatcctacaaatgtgtacaataaagcttatatttgtatagatatttaaataaaaccttacaggattatattgtaacgctgtaatataagcttgaacggcagactccatgtcacgagcagcaactaatgcagcagccaaattaatgtatccatcaataaaatctggttttagacgtacagctctgcgatagttgtctaaagcttcttgtaactgtccacgctctttaaaaacatttcctaaattactaaaaaaaagatttttgtaaattacttgtcggtggaaaataatgttctatgattttaattttttctcattttattctgcaatatctatcgatatcaaagaaaacttaataaatttcgcgtccacatttccactagctttccatgtgttttatgtttctctttaaaaaagttccaaacagcaaactgtggtaacgattattggtcgcaatggctgatttttcttaattttttcgtaatattgaacttgtcgccatgttaataagaggctgatagatgattttcaagcggagatgtctacttccgttagattagatggtgaaaatgtgtccacagcgttggtcggtgcattcagcaacgacttcgttgtgtgtaggataattgtaggaatccttcccgacttcattgttaattgagaaggggggtttaacaaaaggggtttatactttgaacttaacattataaatattcaagtcgttttatctactgccacaaatgcaatatgcttacttacttagagcgatgtaaaaacgaaacattcaaattaatgatagcattcatagactcatttgaaaaatatactaaccaagattccattgcctcatttcggtgctaataaatatcaaaaaacttagatatcttatatttccaagtccctgctttgggtaactttttttgtgtgatcagattcggaagtcgagcattaaacattaactttcaaatattgattgactttgcggtttatattttattgtgtgcattttattccactttcgtgtattatttcgacactgtctcttaatttgatcttccattctcggcattagctttggagccgacttaagaaccctttaccacatcgttgctggacaaggcagcaactttgttcaatgctttcgaggcggcggcccatgggctaaacggcttgagtatttacatattcagctcctcatgagcaattcattccgacagtataggagttctaaaggttcaacaaatcacgctcgctgaacgcgaccgtgagaagacatcgttctcagtgaacggagggaagtatgagttccgaaaacttccattagattgattagattgatagattaaattctaaagagcctatatgatgcaaacatgaggatatcggcagaaaattcgcgttttttttaaagggttactagggttcatcgtcatcaacaatggtgaggcgactttacatcgacgaacatctttaccgacccctcacatttgcggtatcggaatacaatccgaacgccaagataaagagatggaaaacacgcatcgatgtcctgcacgtgaattttctacaagcccgtctacaagcatcgctgccgatgccatctcgagacaacaactcaaatttgttagagaccaggaaccagagtcgtgcgcggccaccgtactgtgaactgcatccaaaaccagatcattttagaagaggcgcgatccgcttgaaaacatttatactgttttgaaataagaggcggtactcaataaacttcccatgcaaacaaactttgcttgaggaactcgccaatatctttattgctaaaagtataaatgcattccactgtgaccttcacacggcggcactaatcccggacaacgtggttcgaaaatttccagccacaaaattttggcattgtaaaaataccgacatcttcgcggtcgaggaaagaaaataaattctcaccgctgagcacaacagagctcacaggtcggctcaggaaaacgttaagcaggttatctcggagaaatactttccaaacacgaccaagttggcgagcgaaatagcagccaattgcaaaacttgcgccaaatcgaagtatgacagacatccgaggaaaaaggagctcggtgaaacgccaatcccgactcatgtaggaaaaatattgcatatcgatattttctcaacgaataaaaagtactttctcacctgtattgacaagttttctaaattcgctatgatacagccggttccgtctagaaccatagaggatctaaaagctcccctgctacaacttctaaatgttttttccaaagcaaaaaccatctactgcgacaataaaccgtcattgaaaccgcacacaaatgaagccatgctggaaaaccatttcggcgtcagcatttcgaatggaccacccctccatagcgtctccaacggacaagagaaacgcttccatagcacgttgatcgaacttgctagatgcctaaaaatagagaaaggcataagttacacagaagagtttatcttgctggccactgccagatataacaaatctatccattccgtcattaacaagaaaacggacgaggttgtgcgggcagatacgcacgatccacaaaataacgttcatgttagtccaaacgtagtcaaaaagagggcaccgggagtatctagataacctatccttaatatatatcacaatgaagcacgaaatcttgagtctcaagaaattcgaggaaatgactactaagtaagccaaatggcacttattgcggaagaaatttggtgcgctcttgtcttcatcggcataacttcccagagagccactagagccaaaagattcgcggctcaactaaaggaagtgattgcccacatagggtcgaccgagggcggacttaatcatgagggaggagtagttaactaagttaaccggaccgatcgtccgtacatcagcaccgttcaaattcctgaccaagcccggaagttctcagatagccatcaaagctctgcatagcttttaagtcagttccttcttgacattaaaaaagagcatcactcaatttcaaagaatactccggcaacattttttattgtaccaattgactgagtccctaggccagcaatttagaaggacagttaccctttcaacataatcttcctatctcaacataggagcatcggctacccgaccacataccagtgactgcagcgagggatcctcccctgtagtactagtacatttaatatatttatatattcttgatcaggatcaatagccgagtcgatctggccatgtccgtttgtccgtatgaacgtcgagttcccaggaactgtaaaagctagaagtttgcacttcagcacacagattttaaaggcatagacgcagcgcatgttgctacgcccactctaaagcccaaacttgaaattaagagaaaacagagaaggtatatagaagtatagagaagttatataaaagtttattccttttatgttttcaaaaattcgaaatgtatgcacccaatattattgtacgaaaaagtattcccatctggtaccaccggtatggtagtttttggtaagttgacaacactaaaagttggctttactgctccgttttaactatgtgctcgatatttgtcatcatactaaaggcatccaacgagtacattttatgccagctttcataaaatcagactaaagttttaagtcgttggaactgggcgtgtgaactatgttattcgtttataaaataacaacttctatgattctttttgtgaaaaagtacttacctataagcttctgccagcacagggttttgttttattgccaatgttgagaattgcgctgacttatcaagacgtctgcactgaaagtgaatagatgacagcaacaacaaaactccagtatttgtactgtcttgacgccataattgcatgcaatgcttttccgcgctttcatagtcaacagcttggtattctctatgggccaactcgagtaaacctatattaaaatataaatttaagcattatagtttttgtactacagtacgtttatatatattcctatgtatttatactcgttactcgtatagtaaaaggtatagtaaaagggtatactatattcgttaaaaagtatatagcaggcagaagaaagcgtttccgaggaccgagtggatgccaggtccgtctgtccgtatgagcgtcgagaagctagaagcattcagcaagtttgttggaccatgttgccacgcccactataaaactcgaaagccgctcaaaactgccacgcccattttttgtaaccatttctctaattttttttttaaattttattagttttgtgaatttttatagatttgccaaacatctctttgccacgccctaagccgccgaaccggtcacgcccacactttggaacaatttgtaaattttttcatcaagaaaaattttaaaatttcgcgtccgcattcacactagctgagtaacggctatctgatagtcatagaacttgactacagcattctctcttgtttttttctatgctttgggcaatttttttttccaaactcatctgagcagttccaatctccggagagggcagagaagtaatagctagttaatattggcttatcgttttctgggtttgcaaaggcataaacttgtttactgggtttagtacgcagaaacttcttatatgggctcatattttgtatgagggggttggatggctggggtaaaggatttgaaggcatcttgtttcctgcttgtcctttcttattttcttaattttaacctaaatattgcccatttgcgtgtatagtctataacgatttgtaacgtaactatttgtatattttcgtatgctcaattatacctgttactcgtagagtaaaagggtatatttggttcgttgagaagtatgtaaaaggcagcaggaagagttcccgaatatatatacattttgatcacgatcaaaagacgagtcgatctgattattattattcgagttgtggtaagagtattaaaaccttctaaagatatcacataccgtccgtaggtggcatgtaagattcattattcctagcgcaattctgcctacgtactaaaacaaaaatctcctttcagtacttgcacgctcacgattggtccaagtacagatccttggggaacacctgccgaagcctcgatatctatttggcccagcttccttatcgtaccataggacacggtacccaaagttgctgacaacttctatcctcaggtaccatacagtttatggctccgaggattacgccccatctggcggtgttgaaggcgttctttacgtccagagtcactattgcgtagtattcctccctgcctcctagccatctatcaccagcaagagcggtcttgtcgatgttactcacggccaaaggagtgtccaggatactctttcccttccgaaagccatattgctgacttccttcgtcactgagagcatcgacggcctctattcgagtatacaagatatcttcggacagttttccaactatatttagtaggcatagagggcgggagctggttgcagcatatgctgatcccttgcatttgtgcagcagaactattttctggcttttccaccttattgaaaagattccgtccaaaagacattgctgtaaggtggccctgaagatgtcaggtctaccgaacgccaatgctttaacaactgcaccaggaattccatttagtccagcggctttattgggtttgatacgcttgtctacggttttttatacgacagcgatttggcagccgccatgccacgcttgaactctatgcgtttccttctgaaagccaccatgagctccgcgtggtgggtactgcctctggctcgtttcgccgttctcctagccctgaagcaatcagaccgtagttggcttagggtggcactccaccagtacacgtgtggtttgcgccgtacctttttcttccttctcatggttgcttcgcaagttttaccaagcatattcatgaggtcagccgccgaactctctgcatccctatttgggattaccagggaattgatttgataagccagcattttcctcatcgatcttcctggtatcccatgcttgatcggcgtgccctccggagagactaaaggaaatcatagcgtggtcgcacagcgttaccagcaatgatccttgggcttcgccctctcgcatggcccacaagcacctccacaaactcctcgaactggtcgggggcgtcgctaggcggagcatagcagcagtacatatacacgtgttttaccttcgcatatgcaattgcccgcataggtgatgcagccagttcctgaacgtggggagagctgcaacacttgatagctgctttacctgactcgtctaggatcttggagtattgtccccagtgacgtaaggttcgcttaggagcatgatgtttacatcgcgttccaccgcgattgagcgaccatgcagctgtggagctcctcttcttaggcttcaccttggtccactctgcagtcgtgctagaattctgggagacagattcatagctgcctggcttggactcgtttgctctggatgtcgcctttccttctcccttgctaccagtcgcttggtagttcggcttgggcgcctgaactttgggaacttgctccttgggcacctgcgcattgtgagaagccttttttgtaggcttttctacctatgtctgggtagcactgctcgtcaagcggtgctcgctagtggccccttcatacaactctatcgccctgttgttaagggctgagagtccttagtctctcttgtgacgtgcctttgagtttcaaatgcggatagcaggatgtttatcttgccagttatcctggtgagtatgcacttcaggttctggctctggagagccgtggtcaggtccgaagaccatcccgccttttgcgatggcatggtagtgtagtccatcgtcttctggcttgccgcgatagtagatgctgtaggagccaagttctccacctgtacagccgcaatgcactccctagttaacctgaggtaactagttagcctgcttgctcacccctcgcttccgccggaaccgagattccgtctccctgagtcgggttcccgacgggtttcccttgtttttctttatatatttcttgttttactgaattattcttttgtaaatttgctatgtaccaatctttttaaatgtgataaccctgtaaatttgtttttagatattgtttaaattaaaaatgcttcatacactgcgggtaaccggattagcgccccctgcgccgtttcttaaatctatcgacgttattgttttttgttcactgatattccctctctctttgaggataaaagaagaacagctatctttttaattctgctttgttttcctttcggcgaaaaattgggcacgtatattgcatcatgagattagcgcccccaatgcagttttgaatattttccataatttgaaaggtgagacaacaaaattatttatgctgttaaattgaaaagtttgctttcattttgcgaaaaaagagaagaaaaatctgaaatcatagctttctatcatagctttcttttcgtaaaattgcagaaaaaaagcgcatacatcgcaaaactatagccaattttattaaaaacaattaaacttatagaaaacactataaaggtggcaataacagtgtctttaacgcggcagatcgcaggtccacatgtcaaataccaattcccacaactgctccggccaaattcgagaaaaaaattagggtgattaagaaagctaaacatttaaaacacgaaaaaccgaaaaaatatagaaagttgcgaaaaaaatcacgactaagttttgccggagctcatatgacctagtctaacgagtggcattatgttgtactctgggacgagaaacaaagaaggatcaaataattattaatttcctttaaaaatattctaatttaaatatttaagtgctaatcaactaattttttttgaactgaatcgaaaaacttaaattattgtagggggcgctatcctgatgagccaattttcacttacccatacccattatggattgtctttcttttttatttaaataaaaatctaaaaacaacaaattttacatttatagaattgttcaacttttaagggaaacaaattttcaaagctttcgcttgaacagttttcttaatatctcacatgaaaaatttttgctcaaggagcactaacctggtgacgcacaggaatttagattattaggaggatttagatcttcaatgcacgtctcgataagatgaaatacagtttaagatcctacgtttttttacaaagtttggattttgattttttaagcctgtacctagttactaggtaactaattttaaaggatggacaaacgataaaaactaatttgcaaggatgggaaaacgatagacactaattttaaaggatggtcaaacgattaaaactaattttaaagaaataaattatttttaacagtgggcaaacgaaatatttatttctaagaggtgggcttacgaaataagttatattcaagcgaggcaaacgaaaaaaaaaatttaaagttttttaaaggcggacaaacgacaaaaacaaatattggttgggcaaatgtttttttataatatttggtaaaaaaatttaattagaaaaaattgaaaaggtcaaatttttgattttttaacatttttgattttgatgttgagctcttatgtacacataaactaacggagaacctaatttggtgacggccaaaattgctctctgtccgctcgcttacgatgagagcgtaagcaatctgaaaatagaatttgcttgtttgtgagagttaaaacaagagacgagaacgcgtatatgtgtgcgtgttgtgctagaagacgattttcgggccgaaatcaattctgatcaaagaaacgaatttacatatttggggagttttggccaatttcgtagcaatatgatgaaattgcgcgctgtttaaaaatatcaaattggaataaaacaaaaaaaactgcaactaaccaactgaatctaatgtgcattttaaataatataaatcgatcatttacataaatcatattaagtcgaaggacttaataaatatactaaataattaaggcaaatgcaaaggaagtatgataactactgtaatttaaaacataaattttccaaaaagaagacattaaattgcttacacaagcactcaacaatgccttattaatttttcacacgtcgcaagctgaatactctaatgacaaatattctaatatagtcatttttgaaatttattttgtgacattatgattcggctataactatttctaagctatatttaaataataatgacgttaaggcaagcaaaacaagaattttccgcatgatgccaattgatcaaaaataatatagatatatagatcaaaaataatatatatataaaaataatatagatctataatatagatagataatatctatgaacttctaaggtgaagggcatattttgtcaaatttacaatgcatgagcatacagtgtgcacacatacagttgtctgctatcactgtatgcgtagaaaagagctcttttgctctcgaactaaaattcgagagagcctggagccacctctacactatggggcatttggcctgtttttttttacaaaaattaatacctcctaaactattggagatatttggatgaatttttttttatgcggttacacatgcctccaggaatattttgaaaaagtggccggtgccccaactcccgccccaattttttttttttttaatatattatattataattttttttaataatatatttttaaagtttatttttaatttcaatattgtataattcataaccgtcttcctcttcacaatcggcagagtctgaagaatttttatcaggttcaaattcgcaagctaacatttgaatgacttctggtggaagagatagtcgcttatgttttcgcctctttaaatttattgatgatattatgggatccgtagtatccattgctctgtaaaagacatctgcgaagctactaatagtttttgctttggctgggttcaacaaaagaattttaagtatggctgcaagatcccgcaggcagcacttccgtacagcttgaaccaaaagacattcgttgtgattctgcgcccttacgagttcatctgcttgctgtcttcggccactcaaattttttaaataatatgacgttttcgggagtccagctaatttcctttcctttttatttttctcctttaccttcaggactaggtgttcttctaaccaatttgaaaaactttcaaaaattcatttatttttcgattgcattttctccaatttcgcaaaagattgactgaaatcattcgttattaatattattcggttaatcgttcattaaagtctagcttgctatcagaaatatgcccactgataaaagtgcaaatagaattttccttttgacgaacaaccttttgcttgcgccacacttccagcagggcagcattggaaatcgagatattgctccctaaaaaatgaaatttctcaagaaaccgcaaaaaacgcacatagagactacctgatatgagttagaaattgaacacactacaacatggatataaacacttactgaacaaatttgaacaaattgttgtagctctattcaaagtttaaaattttttcaaacaactacatgttgacaccacttgctaaatgtacaaattgttagaaataggcgcacacaataaacaatatattaataacaacacataataaaaacctaaagattgattatctatttcaaattatactctccttcttcttctttttaaattttaacactttgaaagttaagctaaattttgcgcgcaaagcagccacgtgatatatgctcgcaacagccgactttaacagctgttattataacggtgcattgtaaaattaacttttgcgggctgtatcataacagtttaacgtatttccaatgtattaatactaaaatacttcaaatttgcatacttgtgaaaaacacattattgtaaaaaaaacaggccaaatgccccatagtgctctagagccacatcgaatggcgttacgcatcttgttattctggtgtctttggccgtaccctttggtcgagttccgcaacagatttttaaatcaataaaacatagcaaggcaaataataaaatgaaaacaaaacttatttttaaacttccttcttcacactgaatattatttcgtgcaattatcagaggaagtaatctgtataagcttcatactttagagaaggcaactagatactatgctcaagagataattcctcaggtacagcaaggaaagatgattgagacacacactgagaactgcagacacatgcatatgtatgcagattgaaatacaggtatagatcatacacatccagattcaggactaccctaaaatgggccgagtcaatgagttttcaagatctctcactacgcagtcaatgatattctagaaataatacagtttaaacaaattagactagtgttaagcacttcaattggtgcagattaaccaacggatatgcagggtaacgaacccttgaaatttcaaaggacacatccgaagttgtctgctgtagtttgttcgtacagtttagaggtttcaaaccaataaggtatttcagcaccggattcttaaatttgttatataaaaaaaaagcaattttctaatcgttttagaaaacaaaaaggtgttttttatgccgcagcttattttgtgcagtatgttaatattcaataaatggccattttaaacctaacaattttttaattttaatatccgagattgatccaacttcgcggagaagcggaagcttctccctaaaagaaaatactgtattgaatgaaggccgaaaagcaccgaagaacttttcaatgaataccaaataatatatgtacatatatgtaatatatgttgtcaaaaatttaaaaaaggaaaaacgtgcaagctacagcagaacgaaaaaaaatttaagtgcaaagtaagctttaagccagaaaaaaaaaaaattacaataaaaaatttaattttagatggagtgagagataacattatagacgagtttctcgactaccagataccccttacaagatacggctttaatgagggatgcacatttagaatacggaaatcgtctgttttttaaccatgtcaataattctttcaaaaatattgcgtttacatttttctggtatctttcatcgaagcaatgccaacataaaaattaatttaactacacgaaataagctcagacactgaacactgatttttatgttgtgtgaatttttagatgcgtacaccatatgcatctcttaatatgttgttaatatgagacacattagacacatatctatctcgggccaggcataaccaattgtttgatttattgatttttcttaatttaattgtggttgtcttcgctgtcaaacttattcatttgcattaatgtataaagtatttaactagatgtattctttaaaaaaatcaattacaaacgtatgtacatacatatataaatgtatggttatttcttaccgactgatgaaagagattgaatgtcattttgttttacgactaggttactgcctgttgaattcggattttgatctaataatatatgggccgcggacggcagttgatggctctgtccttgagactgcatatttattcgtgtttgttcaacatgcattaaaatccaacgttgataacatgtgtctaaaatcaataagccacccttaagtaaagacactgtgatgttgtttacatgattaaacctttaagaaagagaatatcagtaaaatatcaatatgaattgcattaagttataaaagcaacctgatttaattattttcaaacatccactcagctgttaatacgatttacaagagaaaatcaaatatttacatactcaaatattgaacactgtgaacagcaacttaatagcttataccctattcttacggcggcaaaaaccatattaacataatatcaatgttataccaatgatataccacatataatttcaaatgaagagagaatggtattgtcgagtcaatcagataaccgttagtcagctcgtgaaaatgggaacacgaaattcattcatcatttttctgggatatcgttaaatactgggatataaaataagaacaaaattgtttcaaattgatcaaaagttcggtcttgaccggtttggaaggtgtaagaagggccgtggccgcgaattaatagaaattgtatacaaaaatcaaaaaatttcaaaacattttgaaattgttagcgttagagtggtcatggcaaaatgttttctggcaaattcatagaaatttaaaagaaaataaaaatatgaaagaataataaaacattttacataagtgtagacgtggcagttttgtccggtatgtgtgcgttggattgcacatggcaacatgggttaacaaacttgcgcggcgcctatgtctctagaatcacatatcacatacagtttgtcaagaaactgtttacacactgtaaaataagttgaatttttgactttaaagctaaaaataaagggttttttgcttaattaaacgcaattttttttataaaatataatcaaacaatatttattttacttataaatcaaaaaacaaattaaaaatattaaatatacaagaaaataaacaacaaattccaagtttacacgcttttaagactgtcaagaaactctctttattacagttgcggtaacaataatagcatcataagcacatttcgtgtttgtcccagcttttctctattttctgacactttctcattattttactcactaaacttaaatactacaatgattttcaatcgaaataaaaaaattagtaacagatctcatggatattttaaaa

SEQ ID NO: 29015 - DNA, 3604 bp, DROSOPHILA
aaatcgtattaacagctgagtggatgtttgaaaataattaaatcaggttgcttttataacttaatgcaattcatattgatattttactgatattctctttcttaaaggtttaatcatgtaaacaacatcacagtgtctttacttaagggtggcttattgattttagacacatgttatcaacgttggattttaatgcatgttgaacaaacacgaataaatatgcagtctcaaggacagagccatcaactgccgtccgcggcccatatattattagatcaaaatccgaattcaacaggcagtaacctagtcgtaaaacaaaatgacattcaatctctttcatcagtcggtttactcgagttggcccatagagaataccaagctgttgactatgaaagcgcggaaaagcattgcatgcaattatggcgtcaagacagtacaaatactggagttttgttgttgctgtcatctattcactttcagtgcagacgtcttgataagtcagcgcaattctcaacattggcaataaaacaaaaccctgtgctggcagaagcttatagtaatttaggaaatgtttttaaagagcgtggacagttacaagaagctttagacaactatcgcagagctgtacgtctaaaaccagattttattgatggatacattaatttggctgctgcattagttgctgctcgtgacatggagtctgccgttcaagcttatattacagcgttacaatataatcctgatctgtattgtgtgcgcagcgatctgggaaatcttcttaaggctctcggtcgtttggaagaagccaaggcttgttacctaaaggcaattgaaacatgtcctggctttgcagttgcatggagtaacctaggatgtgtgtttaacgctcagggagaaatttggttggctatacatcactttgaaaaagctgtgactcttgatcccaattttttggatgcatacataaatttgggaaacgttcttaaggaggcacgaatatttgatagagctgtggccgcctatttacgtgcattaaatctatctccgaataatgctgtagttcatggcaatttggcatgcgtttactatgaacaaggtcttattgatttagctatcgatacatataggagggcaatagaactgcaaccaaatttccccgatgcgtactgcaatcttgcaaacgctctcaaagaaaaggggcaggttaaagaagctgaggactgctataacactgcactaagactatgttcaaatcatgcagattcccttaataatttagctaacataaagagagagcaggggtatattgaagaagctacgcgactttatttaaaagctttggaagttttccccgattttgctgctgctcattcaaatttggcatctgttttgcaacagcaaggcaaattaaaggaagcgttaatgcattataaggaagctattagaattcaacccacatttgctgatgcatattcaaacatggggaatactcttaaagaattgcaagatgtcagcggggcattgcaatgctacacgagagcaattcaaattaacccagcatttgctgatgcgcatagtaatttggcaagcatacacaaagattccggaaatattcctgaagcgattcagtcttaccgaacggctctaaagttaaaacctgattttcctgatgcatactgcaatttggctcattgcttgcaaattgtttgtgattggactgactacgatattcgcatgaaaaaactggttagcattgtcactgagcagcttgaaaaaaaccgtttaccatccgtgcatccacaccactcgatgctttatccgttgacacatgattgtcggaaagcaattgcagcgcgacacgctaatttgtgtttagaaaaagttcacgtgcttcataaaaaaccttataatttcttaaagaagttgcctacaaaaggaaggcttcgaataggttatcttagctcggacttcgggaatcatcctacctcgcatttaatgcaatctgtgccaggtcttcatgatcgttcaaaagtggaaatcttttgctatgccttaagtccagatgatggtacaacatttcgacacaaaatcagtcgagagtctgaaaactttgtggatctttctcagatcccttgtaatggcaaggcagcggacaagatatttaatgacggtatacatattttggttaatatgaatggctacacaaagggtgcaagaaatgaaatatttgctcttcgccctgctcctattcaagtaatgtggttaggctatccaggtactagtggggctagttttatggattacattattacggattctgtaactagtccattagaattggcttaccaatatagtgaaaaattgtcatatatgccgcacacatattttataggtgatcataagcaaatgtttccacatttaaaggaacgaataattgtctgtgacaaacaacaatcttccgttgttgacaatgtaacggttataaatgcaacagatttatctccccttgttgaaaacacagatgtaaaggagataaaagaagttgttaacgcacaaaaaccagtcgagataactcataaagttgcggagttaccaaatacaacacaaatagtatcaatgatagccactggtcaagtgcaaacatctttaaatggcgttgtagttcaaaacggattggccactacccaaactaacaacaaggccgctactggtgaagaggtaccacaaaatattgtaataactactcgacgtcaatatatgttaccagatgacgctgttgtgtattgcaattttaatcagctatacaaaatcgatccacaaaccctcgagtcatgggtagaaattttaaaaaatgtgcctaagtcagttttgtggttattaaggtttccagcagttggtgagcaaaatattaaaaaaaccgtcagtgactttggaatatctcctgatagagtaatattttccaatgttgcggcaaaagaagagcacgtacgacggggtcaattagctgatatatgtcttgatactcctttatgcaatgggcatacaacatctatggacgttttgtggacgggtacccctgtcgtaactttgccaggagagacgttagcctcacgagtggctgcctctcagctggctacccttggatgtccagagttaatagcgcgtacaagagaagaatatcaaaatattgctatacgcctgggaacaaaaaaagaatatttgaaagccttacgggcaaaagtatggaaagcccgcgtagagagtcctctctttgattgctcacagtatgccaaaggattagaaaaattgtttctacgaatgtgggaaaaatacgaaaatggagaacttccggaccacatttcagcagtataaaaaacgtttataatgtcaattgcgatttggacatgggaatcaagagatattcatataattttaatataaaaagcaacattttaagtagctcgtatgtaacacatatgactaatacttctatgtataaagcaaaactgcataccctatttcgtttaaaaattattaataagatgttactttttatgaataaagttatacgatatataataagaaggacatataaaaatataaa

SEQ ID NO: 29016 - protein, 1059 aa, DROSOPHILA; identical to SEQ ID NO: 4782

SEQ ID NO: 29017 - DNA, 12909 bp, DROSOPHILA
gattttgaacgatatgtttaataatagccgacatgtaaaaaagattttgtcaaaacttatacatgagaaatgttgtgtaaatttttgagaaattaattgaaaaatggtaacattaaggacagttgttgaaattaggtacaatattaccatttgtaagcgtatgtaaaacgagcggtagaataacagtatattatcgtatcatacgttgaacgaactgagaggcagttcagtcgcgtaaagtcaaagccaagaatgtagaaggaagcacattgccgcgcggagtcgcaataaacaatcggatgtcatcaaaaaaagtgcaacctgcaaaaacaatatatggcagttaagcatctaattattctttattattctttgaacgagccgtattcggtaaggagaacccggttttcaattaataacgccgagtaaaataaactgttttagttattttatatttatatttttttatttacccgttattcagctaatgccagcttttggcataaatattaataaaatgaaaaattgtttggcagtttaggcgtaatgcgacagtaggtaaaatgtgcctgtcataccgtaaaaacaagcgagacagataattgtttttatgaattattacagttttttggtttgggtaaaccaaaaatttgcaattgtaaacttatcaagttacttttacgcatggggtcaatcagatacctttaatttaaaaaattgtaatatggtgataaaatgaataacttcatttaaaaagattttaaaatttgtttaatttacattatgttgtgctaaatcttgaaacggcttgacttagaaagtctttaccaaacttcggtctttgaagttaaattaaattatataatttcgaagaaattattagtcttttccaaaatcccactcattccgcacatgacaaaaatcgttacatgtcacaacactgttgatgtacggtataagtggatatacaaacaaatgaatgttttgtgcatcaaaggttcctgagtgatattttgctttatgtgttgttttattttaatcatagcaaatcgacaagataaaagtaatgtaagtttcacaggaactgataaatgaaattcacacatatctaacgtgggaattgatcaattaattataaatatggaatgtaagaacatatgtatgttcatatttataaacgttaatcagataaaaatttgagatatgtgataaaaataattatatgtgaaaacttatctgtacatattgaacttcatgtattcaatctccttggattgaatttgtatgagcgtacaaaaacactataagaatattaattaggagtgaatctgatatcaccaaaaatacatacatacgtaattgcatacaatcttaaagatttgttggagaatatattatagggaaggaagcgtttccctaatgcataaagtatttaagcatatgtatataaataactatattattgatcaggattactagacaagtcgatctggccatgggcttgcttcagttatatgattttcgaattttttttttatgaatagttcgtcggtgctgtagcaacttttcatttattttctattaactttaacagtaaagttgaatcaatacgaaattttggttagtataaaaattacatttaaaccaagactgcatcactacttttcttttaaaaggtaatatgcaggcttaactcaatgaaggcggcgcaagccgcttttacactagcatattgttaattcacacaatgtaaagtttactttaacttacttcactacatcctttagtcattcagactatacgctatttgttatactcgttatacccgtagagtaacagggttcctagatccgttgaaaactatgtagcaggaggaaggaagcgtttccgactatataaagtatatacaaacatatgtaaatacatatattcttgatcgagacaatctgaccatgtccgtctgtccatatcagcatcaagatcagccaaaatgttgagattcagcatacagattctaaaaacatagacgcagcgcaagtttgtgacccatgttgccacgcaaactctaacgcccacacaccacacaaaactgtcaagcccacacttttaaaaaatgtgttgatattttttcacattttttttagtcttgtaaatttctatcgatttacaaaaaaaaaatttctaacgcccttaaaccgccaaaaactgccacgcccacatttttgaacaaatttctggatatttttcaataatttaattagtcttgtaaatttgtatcgatatgccaaaaaactttttgccacgcctaatctaacgccctaaaacttccccaaactgtcacgcccacactttaaaaaaatgtttagattttttttcatttttgtttgtcttgccaattttttatcggtataccaaaaacaccgtaaccacgcctccccttttaccaacaaaacggtcacgcccacacttttaaaccatttttaaatcctttttattttatctttatctatcgatatcccaaaaaatgtatgcaattttacgttcgactacagcattctgttttgtttttctctcgattttttggtgctggctctagagatggctccaggctctctcgaatgtttgtttaagagccagagtgcggaaagatatacagccagctgccctcttcggctgtcactgtatgcgtaagaataaaggagacaatgattgttgggtgcttatgttcgcacttcgtgtctcaagaaatcatttttgcaataaacagtcaacgtatttttatatattgtatatacagtttgtcaagaaactgtttacacactgtgaaataagttgaatttttgaccttaaaggtaaaaatgttcaaacgctatttttttatgaaatatatttttgttttacttataaatcaaaaaacaaattataaatattaaatataaagaaaagaattttgagactgtcaagaaactctacgttttctttatgtgtttaatgtatgtatgtatgtttttattattatttagaaatttattttttgaaatgtaattttttttttaaatatttcacattgcaactttaaaaattgatgtcgcaaaagatgtcgtcagtcccgttttacatattattaattataaacacaaattaagatatgaaacatttatatgaaacactttaaaaatctaatagtcaaggcatacatgtttaaatattatttgagtagatcattttgcaacgaaattgcccgaaactctaaatatgttatatcggatcttagatcaaaattgatttctgcccgaaaatcgtcttctagcacaagtacgcacacatacaaacattctccaaagacgctagttattctagtgtctttgctttctcgtttattcttttagcacacacaagcaagtgtattatttttttcgattttataccgctctcaattttactcaagcggagagagagcaattttgaccgtcaacaaaaaagtggctgcatagtgcaaaaccaatgaatggccgttacgcatcttgtaattctattgtctttgctttaactcggtctgtgaaatcaaaacaataaggaattcaataagacaactagctgtacaagctttaggaatgatacgaataaaagtggttggcacgctttaaatagcttttatgtcgaaatttttttttttcgattttccttttacttgaaatcgatcgatacgctaactaagttttgaaatatcttcttgcctcgcatctaaatatcggattcctggttgtcttgataatctgtgattgttctgattattatatgattaatataatactatatatatatatatatatatatatatacagtattgctagtatgttttcacattagtaaaaaaatatatcttcataatgtactaccataagtaataaatattcaaatttgcttatattcgattcttaagtttgaaagcattggaaaaacagtttatataaaacacgaaaagagacagaaaagaatcgcgtggcgtttttgtttcgcatgctatattaagtcgtaaagatcgataaagttttcttgtgtattataaattttgtggctgttttcaaattatggtttgtattttgcaagtaagtaacaatatattaattaaatcaatacatatttcgtgaaaaatatttcgatttttcttcgttattttttctttgtcttgccattttttatcagtataccaatatactgcggccacgcaccccctttcacttacaaaacgcccaaaacagtcccgaccacacttttaaacaatttacaaaatgtttctcattttattccccaatatcttttgatatccgagaaaatgatgaaatttcgcgttgcattcgcactagctgagtaatagggatagtcgggaaactcgactatagcgttctgtcctgttttttcatcggttcaacagaagtaatcaaacgaaacacgatttacctaatcattttaccaatattgtatgttttaataaacttataaattctacctaataacattatattttatctatttcttgcagtatttaaccccccccccccctaacacaaaaattactggggcaaaattttatacataatataaaataaataaattacaaaactcaaagttttttttatttatttcttgggatcacctcctgctgtttagttcgatacgttctacatataaccgttaattttgaagaacacttttagctgtgttaccggtaaaaggtgaggtgccaaataatcgaaagctattaattaataaaaagaaatctgcaaatgttcaaataaaataaaaaatgtgtacaataatacaataatattttcaagagagggtgctgtagtcgagttccccgactatcagatacccgttactcagctagtgtgcatgcgaactcgaaatttcatcatttttctgggatatcgatagatattagtaaataaaatgcgtaaaaaattaaaaattgttcaaaagtgtgagcgtgaccggttttatgacattagagtgggcgtgccaaacaaacttgcgctacgcctttgtttctagaatctgtatgctgaatttcaaccttctatcttttatagttcctgagatctcgacgttcatacgaacagacggacatggccagatcgactcggctattgatcctgatcaaaaatatatatactttgtgtggtcaaaacgctttcttcagcttgttacatacttttcaaagagtataacatacccttttactctacgagcaacgggtattaaaaaaaatgaatttataataattataaattcgtcatatatactatacgtagaaaaactaaaatattttaaactaatatcgacctatcatttgttttcacggtatatttaaaatttttttaaataagttaattttttatttttttgcatttaattaactgtgtatctatttatatttgaatatcctttaattataggcaaacataaacaaataacggtgatagagttagtctaataactaaaaatatacgcagctaaaactgttttttggtttcttttctctattttaatttgttttctaagtaccttcaatctatttagaaagttacactcacattaaaattcacttacattcatttcaaatttttagggcgtaaaattgggcgtggcgaaaggtttttttgcaaaacgataaaaatttacaggactaaaaaaatgtaaaagaaaatatctacaaatttttcaaacgtttgagagtgaccgttttgtgctgtttctgggcgtaagactgaacgtgtccaaaacgtttttgttatacctatagaaattttcaaaacaagtaattgaaaaaaaaaaacaatttccgaatgtgtgggggtgccttgggtgtttgggtgttttaggtgttgaagggggcttggaaactgtctgaaacaaacttgtgccgcgttggtgacttcatgcatcttgtaagccatttttggggttcaatttttttgatttacggatttaaaagttgatccaagttctacgaaaattccgaggcaccgaaaaaatgtagcaaatacatagttccgccaaacaagttttaataactccgatggagatttaagctgaactttccaaaatagccacgaagttaaagaatgggacaaagacttattcccatagaccgagcagtttttaaagaccgatggcatgttcaaaagggctattggaagtgttgaatgaatcagattattcttctggagctggcgatgcgaaaagtctaatctaaacccgtgtagtatacttttagggttcgattatatgtacatataggtcgattataatgatttgaccacttgcactacagttattattacgtttttaatgtataggttaattacgataagctttggccaacactaaaagtgagtagcagggtgcgagtcataatacaaatcttgtcagccacgggcccaggccaattttttttaagtctatcttactgaaatggttagaagccgatttaaagaaagtcctacggcagctttatttgtttaaaacgctaatttttccactaggcttaccataggggtatttaaaattctattcaaagggttagcagatggagcattaacgtcacaagtcctgttccttgttatagaaaccttaaataaattgttttgcttataaatgacaaaaggacacgatataggaaacatatatcttttttattcgtttccgatgttattgccttggaaatgcatactttattgtagattgctacatataaaatgtgcaatgtgttctataatctgcatgttgcatccatagatctagacgtcattcgattcttggaacaacataagtgccaacacaatcagtttatcatacacgctagaagtcctcgaaattgcagtattaattaaataacttaaaatatctaatttaagataatcacttaccagatttgcaaaaacgaaaattgagtattgagaattttcagtatttaacaaaaattgtgccgtgtattccgcccaaaagaaatcttttatgattaatgccataagcaccctgttttgttggctcgcttttgtaataccgtttgcaagcctacttatattgtgatcggacaacccgtgtgttatcttaaataacaaattttttatttcgttgaaaatagttgtttgtttcgtttatattttaaatactttctacatatttctgtgcataatgaacataacgatttcacaactaagcaagaaaagaaattaacttcactcggtgacgccattttgtccaatttttatatactgctttataaatggaatttggtaaaaaaaggtaaattttgttcaagtttatggccaatttaagaattaaatgctccacatacttttttgtgttttgacaaaagtttaaaatatgtaaatatgtacaaaatgttttataatattaaccagtttatctgtattattgtttaaaggtaatgtaaagtacatggaatgtagaagtgtcttcaacgcgaatgcacatatgcatatacatgtctatgtatgtatgtatatgtatatttatatgtttttatatgtacgtatgtatgctcttttatgtgtatacataacgtgtttcatttcaaggtaacacaaaatcgttaattttctttcttttaaggtataagggtggtcggacaccttctattaggtccagtgaaaggcgtcgtcctcaaagtgtttcatctatatccacactatccccgagagttgttttgtccagattggagccgagggagtttgaacgtcttcgactatcctacaaaattgcaatcgaccaaagaagatccagaagctgccgtggcatgaacatgggtcaaaaaattagtggcggagtcaaaacagttagtcgcaatgattcacagtctacatttaaaccaataataccaagagagttgcaagctgatttcgttaaaccagcgcgaatcgatatattacttgatatgccgccagcatctcgagatcttcaattgaagcattcatggaactccgaagatcggtctcttaacatttttgtaaaagaggacgacaagttgacatttcataggcacccagtggctcaaagtactgactgtattcgcggaaaagtcggacttacaaagggattgcatatttgggaaatttattggccaacaaggcaaagaggaacccacgctgttgttggcgtatgcactgcagatgcacctttacattcagttggctaccaaagtttagttggatcaactgaacaaagttggggctgggacttaggaagaaataaattataccatgactcaaaaaactgcgctggagtgacatatccagcaattcttaaaaacgacgaagcttttttagttccagataagttcttagtagcgttagatatggacgaaggaacactaagcttcattgttgatcagcagtacctcggtattgcgtttagaggactgcgagggaaaaaactatatccaattgtttcggcggtctggggacactgtgaaataacaatgcgttacattggtggattagatcgtgagtaaacttgatatattaaatatatataagatataccagattcgatgaaaagtacgagtacggggcaggtagaagaaagcgtttccaaactcacaaaatacattcatttattgttaatcagggtctcaggaactatgcgagctaaaaagttgagactaggtaggcagatttaactagggtgtgcaagttcgaaaaatgtttttctgattgggttgagtacgtctcttaaatatttaaactaaatttgtttagccttgcagagggagcaacttagggattgagatttaatgtacatttcagtattatatatatgcatatatatattatataaatatatatattaatttgtttatatacatttaaatatataaaaatatacatttatgtatagatatatatatgtattaatatatatacatgtattaatatattaatatattatatatacataagtatcaacagctgagtcaactcgtccgcctgtttttacctaaacctattcactcacatatctcacttttgacaaaaatattttcagtttttatttgatcgtatatcaaaatattacacaaatgagaattctacagtcgagttgtccgagttttttagtatatcgatagatattggggaatgaatggaaaaaaaatttaaaattctttataaatgtggtcgtgatcggttggcggatttaggtcgttagagtgggcgtggcaaatggatagaaattcacacacctaagaaaagtattaaaaaaatatcaaaacattttcctaaagtgtgggcgcggctaaaaatttttgccaaatcgatagaaatttacaagactatgcacatacattttttaaatttaagttctcacttttaaaatatatttctgtattccctcaactaagatgtaccgtatagagtgcagtcaagtttgatttcgatcgaccaacgtgcaaattattgttcgacgtaaaaaggggtttggaatatcatacttgcttctgctataaaactgcacaagtgagtaggtcgattttgcaaggtttttttgcaagaccaatattaaaagatgaattgtgcttagtgtaagaaaagtaatatcggatagtttcaaagccaatggacgtaaacatgcatagtagtagtatttatttttatacccgttacttgtagagtaaaagggtatactacatttcttgaccatataaattatacgtattataaaagctagaaggttgagtttgagcatacagattctagagacaaatacgcagcgcaactaatgtaattttctatagatgtgccaaaaaactttttatacacacatatttgaaatttgttttctcattttactgcctaatatctatcgatatcccagaaaaaccgatgaaatttctcgttcccattctcacactagcttaaaaacgggtatctgatagtcggggaactctactatagcattctctcttgtttttatcgatttattgtttgtgttgccattttttattcgtataccaaaaacactgtagcctctcccctcctttcacctacaaaacgcccaaaccggtcacgcccagttcggtcaagaccgtgttgtttagtagtagaataacctcgttatcttatttagcgtgcgtttgggatagtccgtgttcggacctccttgaggaaacaagatttttccaggaaattctgagtgtcttacgatatgtttctatacagagttgaaagacgacatttctgtacttgctttgaagatgggagatatagcatttgttcttaagttcggtggaatagcgtgcgcatccacaagtatggatgagagggctacatacacatataaatattcaagtagtcttccagaacttcggttttaattgccagcgcttcccaaattgtgtcatgtttcaagagtcaacctatcgcaatttccattacttaagatataaattaaaccatgtaggttattataataaaagggttatttattgagcaaactttttcttgtttttggtttcgaacgtactaacttatagagttaacatatttatcccgcgaagtcttccgttgagggcagagatcctggcagagcgctttctcagcgcctcgtgccattttgtgcgagttggagcttcgtgactcatggctgaccgtttcatattgattttgccgatgcggaatgcgttgctcggctgaccggatactgtcgatgttactgttgacggttcctcatccggtttcgggtagcattgtacccctctgacttgcttttggaggttgtgaatgttgtgaatgatgttacttttcgtatgagcgctgtggcgttaacatgaagtttatagcaccttagagtctgcaatcgtgatttgtggtttccctttaaagttcacattttgggtaagtgtgactccaactccaaggtgtaggcagagtaggcatgcagattccagaaacctagacgcagcggaactgatattaactgatgttgccacgtatacaagccgaccttttcttatttgtcttataatttactattgagttctcaaaaacgttttgccacgcccactctaatgcccacatatcgccgaaaactgtcacacccacacttttgaaaaatattttaatttttcttcgttttattggttgtcttaccaatttctatcggtttctacatacgcccagaaggctcacgcccacgtttttgaactatttttaatttttttctcattttatgccccaatgtcagaaaactgttaaactttcacattcggctttccattagctgagtaatgggtatctgatagtcggggcactcgactatagcactctcttaagttttaaataaattgtggattacatgattacattgcgaaaagtacattaattatttagagttcgcatgacacttattaaaaaattatatatatttttacaaaaaaacaaacaatttcttacttgtatcttttaagccgaacccttgcccctaatggatctttgccgaagaacaattcgtcaaaaaattggtcgcacaaacttggaggagcacattcaacagcttcaacttcctttatcaatgaaaacatatttattgtataaaaaccgtagataatagttttgttaagtagatggaggagcaatttcaatttttgctgcatgtgatgaaagcagcaaatactaattgtgttagattataatagtattagatcaatgtttgtctgtcctccaacaggaaaatcataggtatacaattcgtaataatactttacttaagctataaagattgattgtatattaagaagcattcaaataatagtatgtacacggaatgacatctcatcttgcaataaattggagaatcgagtttcttcatgtaacattatttaaaaactatactcacttcgtgttatataaaaagcatatttgtataaatattaaaacttaaaaagcgcagttttaattaaatgtatgtatgtataaataattctaacaatatttaacatgaaaagctctgaaagtaattggtttactttttataaatatatttcgggagaaaaacttgaaatattgaatatatttattaaaatttgtaagctgctttcaagttttaggcaaaaggcctgaggacatagaaaattctggaagtagcgcaaatcacaattacaatattgctctatagttgctgagtagtattcaataaaatgatattaaattgttacataaaagtatgtaacggccttaacatggaagtttcaatatatgtcttcttttaagagttcataaacagaaatatgtttatgcgttgtatattatttctaaacctaaagtaaagcatacaattcgaaggtacgtttctgatttgcgatttatattttttgcagactacaatacttgactttagggttcccggtaatttttttttacaattttatccgctccctacccttgcccaatcagagagatatctacatttttccacgtcgctaaacttgaagacggcagtgagtacgcagaccttcaatctgcattcctacttccaataggacttgctacagcagaatatgtaggtattttcaaaaatagcacggaacggtagaaagttattttacgaatttagtataacaaactgtgacttgcaaaaccaataaattcgtatctcttctctaattatacccatacccgctactcgtcgagtaaaggagtatactagattcgttgaaaagtatgtagtaacaggcagaaggaagtgtttccgactgtataaagtatatatatttgtgatcaggatcaatagccgagtcgatctagccatgtccgtattaacgtcgagatctcagcaactattctagctagaaggttaagattcagcattcagaatagaagacaaaga

SEQ ID NO: 29018 - DNA, 1376 bp, DROSOPHILA
cctgagtgatattttgctttatgtgttgttttattttaatcatagcaaatcgacaagataaaagtaatgtataagggtggtcggacaccttctattaggtccagtgaaaggcgtcgtcctcaaagtgtttcatctatatccacactatccccgagagttgttttgtccagattggagccgagggagtttgaacgtcttcgactatcctacaaaattgcaatcgaccaaagaagatccagaagctgccgtggcatgaacatgggtcaaaaaattagtggcggagtcaaaacagttagtcgcaatgattcacagtctacatttaaaccaataataccaagagagttgcaagctgatttcgttaaaccagcgcgaatcgatatattacttgatatgccgccagcatctcgagatcttcaattgaagcattcatggaactccgaagatcggtctcttaacatttttgtaaaagaggacgacaagttgacatttcataggcacccagtggctcaaagtactgactgtattcgcggaaaagtcggacttacaaagggattgcatatttgggaaatttattggccaacaaggcaaagaggaacccacgctgttgttggcgtatgcactgcagatgcacctttacattcagttggctaccaaagtttagttggatcaactgaacaaagttggggctgggacttaggaagaaataaattataccatgactcaaaaaactgcgctggagtgacatatccagcaattcttaaaaacgacgaagcttttttagttccagataagttcttagtagcgttagatatggacgaaggaacactaagcttcattgttgatcagcagtacctcggtattgcgtttagaggactgcgagggaaaaaactatatccaattgtttcggcggtctggggacactgtgaaataacaatgcgttacattggtggattagatcccgaacccttgcccctaatggatctttgccgaagaacaattcgtcaaaaaattggtcgcacaaacttggaggagcacattcaacagcttcaacttcctttatcaatgaaaacatatttattgtataaaaaccgtagataatagttttgttaagtagatggaggagcaatttcaatttttgctgcatgtgatgaaagcagcaaatactaattgtgttagattataatagtattagatcaatgtttgtctgtcctccaacaggaaaatcataggtatacaattcgtaataatactttacttaagctataaagattgattgtatattaagaagcattcaaataatagtatgtacacggaatgacatctcatcttgcaataaattggagaatcgagtttcttcatgtaacattatttaaaaa

SEQ ID NO: 29019 - protein, 281 aa, DROSOPHILA
MNMGQKISGGVKTVSRNDSQSTFKPIIPRELQADFVKPARIDILLDMPPASRDLQLKHSWNSEDRSLNIFVKEDDKLTFHRHPVAQSTDCIRGKVGLTKGLHIWEIYWPTRQRGTHAVVGVCTADAPLHSVGYQSLVGSTEQSWGWDLGRNKLYHDSKNCAGVTYPAILKNDEAFLVPDKFLVALDMDEGTLSFIVDQQYLGIAFRGLRGKKLYPIVSAVWGHCEITMRYIGGLDPEPLPLMDLCRRTIRQKIGRTNLEEHIQQLQLPLSMKTYLLYKNRR

SEQ ID NO: 29020 - DNA, 12202 bp, DROSOPHILA; identical to SEQ ID NO: 1396

SEQ ID NO: 29021 - DNA, 4027 bp, DROSOPHILA
aattgctgagtataagtgaatttaaaaaataaaaaataaagaaaaaagactgaaaatgatactctggtctttaccaagtatcaatagaaaatctacaagggattttgtggtcgtaaaagaaccactttaaaattaaaacgagacttccatagtagtagtcggctgtaaagtcttggattttaaactggacccacaaacacaaataatgctattgacattggtaaatccgcatcagagtgcgtacaacccaaatcaaaaataaaactgttcgaaaacgatcccaacaaaatgaaaatggttgggtgccacccaaatgacaaaaagcgccctcaagtctgcgttttacaaaaatcaagctccaattagcgagcaaaacagatctcaaattgtttcgagaatgtcattattaaggacaatactgcttattataatttcaattcactttaaattggcacatgcagatcaggttgttctattggatacaactcgagaagctacattagagtggaccaggtatccatatggacctcaagcccaaacaccagggtgggtggaggagtcatttaccgacttcgttaagggcattaactggaggagctatgtggtttgcgatgtggcatatcacaacgtcaataactggttgtggtcgccgtttatcgatcgtggatcagcaaaccgactttacattgaaattcagttcacaatacgcgattgttctttattcccaggaaacgccttgtcatgcaaggaaacatttagcttacttttttacgagtttgatgcggctactagagaacctccaccatggcaaacagacagctacaggctgattgctcgcatcgcggctggcgaggggcgcttcaatcagaactccgatgtagatattaacacagaggtgaagagtatagccgtcaacaaaaaaggcgtatattttgctttcagagatcagggcgcttgtattagcgttctggcagtaaaagtatattatattacgtgtcctgctgttaccgaaaactttgcacactttaacgaaacacctacgggaagagaaattactataattgagaaacaaaatggaacatgtgtcgataacgcagaaccgtatgagacgccaacttacttatgtaaaggtgatggaaaatggacaattcttactggtgggtgtcgttgcaaggctggctatgagccgaattacacaaataagacttgtacagaatgtccacttgggacatttaaatccccagaggttacaaaatgtactccgtgtcctcccaattcaaatgcttcaaaaactggttcacctttctgtaagtgtgcgtctggattctatagacatccaaatgatggtcgacatatgccgtgttatagtccaccagctgcgcctactaatctcacgttgttgtttgttgatcaaacaagtgcaataatatcttggagcgcaccggccaaaaatgaatcgttttcatctgaaactaattctaaaatatatcacagtgatattgtgtacaagatcaagtgtaatatatgcagcccaaatgtggtttacaatccctcaactgacacatttaacgaaacaaaaataacacttacaaatctggaaccggtaacgacatacactgtgcagatacacgcaataaatagcgtgtctcatattaacgaatttaaaaggcactccaacgagtcttccctggtggcagtcagtgacatagtattttcaaatacgtctttattaaatatacctttggatttaaacgaagtaaagactggtcaagctgaaatcgtttttacaactgagtcagttttgctctcgacagtttttaatttgcgtatattggctataactaataaagatgccgatctagaatgggataaacctgttcaaagtgattttccacttgaattttatgaagtgcgctggtttccaaaggtcgaattagatgctataaataaatcagctttgaacacaaaagaaacgaaggcacatatagtaggacttctagaaaatacggagtatggatttcaagttcgttgtaaaacgaataatggatttggctcttatagtaacatgatttacgcccaaactcttcaatccgttggttcagtatatgacgattctgtgcaaatacgatttattgctggagccatcgtgacgggagtattatttctagtcatttttataatagctacagtatatttcatgagatcgaagcatcaggatgatcttgataaaaaatcgacaaatcatttgccattaccacttgactacgccagcaacgaagtgacgacgcctttatttggaaatagcagaagctacgtagatccgcatacctatgaagatcctaatcaagctataagggaattcgctcgagaaatcgatgcaaactacattacaatagaagctattatcggaggtggagaatttggcgatgtatgtcgtggtcgattaaaaatacccccaaactttgtacaggacattgatgtggcaataaagactttaaaaccagggtcttcggaaaaagcgcgctgtgatttcttgacagaggcttctattatgggacagtttgatcatccaaacgttatttatctacagggagtagttactcggtctaatccagttatgattattactgagtacatggaaaatggcagcttagacacatttcttcgggtgaatgatggaaagtttcaaacattacagcttatagttatgcttcggggtatagccagcgggatgtcatatttaagtgatatgaattatgtacacagagacttggcggcacgtaatgttcttgtaaatgcccaattaatatgcaaaatcgcggacttcggattgtcacgtgaaattgaaaatgcaagtgatgcatacacaactcggggcggtaaaattcctgtacgttggactgcgccggaagccattgcttttagaaaatttacttcagcatcggatgtttggtcgtatggagtagttctatgggaggtcatgtcctatggggaacgtccatattggaactggtcaaatcaggacgtgataaagagtatagaaaagggctaccgtttaccagctccgatggattgtccagaagccctttatcagctaatgttggattgctggcaaaagcaacgtactcatcgccccacatttgcaagtatcgtttcaactcttgacaatttggcacgacaaccacagtcattattgacaacacgaccctcgccagaatcagacggtaatcatattttggatggacagcgcggtcaaaatattttcataagcactgacctttggttagagcacattaaaatgtctagatactgtcatcattttaaagaggctaatttaataaatgctcaacagatatccaggttaacagctcaacaactttcggacatgggaattactttagttggacatcaaaaaaagatcttacatcaagcccggcaactcgacactataatataaacaatttatttttacaaagtagtgtaaggtgtacatataatgaatacataatgtattatataaataatataatatatggtggaactttcttatttcgaatcaacatctgcatcataaaatcaagttatacaatattattcacatgcatttttatcttcttttgccaaaaaagatacagatttcgaattaggaaagttcgagtgtaattgacacgtgtgaaataccagaacacatacattttataagaattttataggttctcttaactagaacaatagaatatataataggaaaagtattgtttttacgttgtttaaaaattataccttatatatcaatgtgtaccaattatttattatacgaacaattttcaagcttattattataagagtttagaggcgctatgattgccttgctatattttacctttttttgttgtgatagaagtggaattaaagaactattcatctttattagattatatttcatggtttactttgcataaaatagtgaaaaactcaataaaattacactcgtacgtaaggtgcggtattccggcctaaatcataa

SEQ ID NO: 29022 - protein, 1047 aa, DROSOPHILA
MTKSALKSAFYKNQAPISEQNRSQIVSRMSLLRTILLIIISIHFKLAHADQVVLLDTTREATLEWTRYPYGPQAQTPGWVEESFTDFVKGINWRSYVVCDVAYHNVNNWLWSPFIDRGSANRLYIEIQFTIRDCSLFPGNALSCKETFSLLFYEFDAATREPPPWQTDSYRLIARIAAGEGRFNQNSDVDINTEVKSIAVNKKGVYFAFRDQGACISVLAVKVYYITCPAVTENFAHFNETPTGREITIIEKQNGTCVDNAEPYETPTYLCKGDGKWTILTGGCRCKAGYEPNYTNKTCTECPLGTFKSPEVTKCTPCPPNSNASKTGSPFCKCASGFYRHPNDGRHMPCYSPPAAPTNLTLLFVDQTSAIISWSAPAKNESFSSETNSKIYHSDIVYKIKCNICSPNVVYNPSTDTFNETKITLTNLEPVTTYTVQIHAINSVSHINEFKRHSNESSLVAVSDIVFSNTSLLNIPLDLNEVKTGQAEIVFTTESVLLSTVFNLRILAITNKDADLEWDKPVQSDFPLEFYEVRWFPKVELDAINKSALNTKETKAHIVGLLENTEYGFQVRCKTNNGFGSYSNMIYAQTLQSVGSVYDDSVQIRFIAGAIVTGVLFLVIFIIATVYFMRSKHQDDLDKKSTNHLPLPLDYASNEVTTPLFGNSRSYVDPHTYEDPNQAIREFAREIDANYITIEAIIGGGEFGDVCRGRLKIPPNFVQDIDVAIKTLKPGSSEKARCDFLTEASIMGQFDHPNVIYLQGVVTRSNPVMIITEYMENGSLDTFLRVNDGKFQTLQLIVMLRGIASGMSYLSDMNYVHRDLAARNVLVNAQLICKIADFGLSREIENASDAYTTRGGKIPVRWTAPEAIAFRKFTSASDVWSYGVVLWEVMSYGERPYWNWSNQDVIKSIEKGYRLPAPMDCPEALYQLMLDCWQKQRTHRPTFASIVSTLDNLARQPQSLLTTRPSPESDGNHILDGQRGQNIFISTDLWLEHIKMSRYCHHFKEANLINAQQISRLTAQQLSDMGITLVGHQKKILHQARQLDTII

SEQ ID NO: 29023 - DNA, 2545 bp, DROSOPHILA
cttccgcgtatcgatgacaaaggcatttacatcgaatttgcgacggcatccctgatagttcatgtacctaaccttaccgaagatagcccgctccttccagcccatgtcatggacgccgccaatggaccacatgcagcccacatagccgttggggtcgcgaccatccagactgtacttgtcgttcagcaggattgcgtactccaacgcatgctccggtgtcgctgtccattccagaatctttttggcccagtacatgcgcaaaaagccgtgcatctttccctcgcgtaccagctgcagttgcgccgagttccacaggtcgtcataagtgagagactaggaaaaaattataaaatcattttagtctcaaatcaaaagaaaaagaatccgtggtgaaccttttctagttcttctaagctgtagcagggatctcgcttgtccttgcgatgtgcatctagcgtttgatatgcccaagaacttagacctttaagactatcatagtgctcgttgtagaagcaaaagttatccgccttggccttggggtgggaattgttgcggtgaaaatgatagatgagccacagatgggaaaagtcctctagtccctccaaggagtgctccggattggtgaacacaccgtcgttcagttggatgataccccgcaggcgactgcccacaattgactgcctcggcacggcccgcttctctgggaatgctgtccggatcactcctatgggccgaaagtgtgcgtagtcctctcccaagcagtgcccaccattggtataattgctctaaggattgggtgcgaggtttgtatgtgtctttcagtgtgtgggagggtcaaacgcacctgaccttggcccgtctgctggtcctgcgtctgctgttggtgctggtgctcctgcttctcgccggcgaccttgtccttggcgcttttgttgttgttcgcacacccctcgcagcggaagtcctgcagcaggcgggttatcgtctcaatgtccttgcgctgcacatgctgcaggttgcgcacttgctgcctgcatcatggtcaaggcaaaatcggtgtgaacttgaactataccagtagcaaaaggacactcatggcaatttgcctgtctcaaacgcacctgagattgttgatctcgttccgcgcgatggtcaactgactcttcagatcatcctcgtgcattttcgctgccggcaacgcgcacttgactcccaaataatccgcaattgcagcgttctccgctgttattgaccaatatttacctcgattctcaatggttacatccagctagagttggccatcacttacgcacggcaccgcgacgttatcgattgtcgataggttcacctgtgcttagttacggccaactgccttaattccagttagatttagcttgcgctcaatagctttttttacaaacattttcttaagaaataacgttgtaagcctcaacaaaaattatataagataacgttactgagcagtaaaagttttgtcttcaatttacatatgtttgttaatatttttttttacaaatccctttgctctatgttgactaatttacaataattcacaaataaaaataggaataatttaaacattttgtaagcgtagcttaacactattttggctttttccaaatattcgatttcaatgataaacgatatatcccagcgcgcgtttctttttggtattttttaggttcattttcgggctgagaatgacaatctgaattttgcacagtaggttcgatttgaagcgacattttccctgctatatacaaatttgtaaattttaattgttcaaaaggtgtgttgcttgcggcagacttgagaactgaattttaaccggcgttgtctattgcagctatcgaagcacgaagaaagcatcatgtctcgcggaagttcagccggctttgacagacacatcacgatcttctctccggagggacgcctctaccaagtgggttagtatcctggcacttgcggctccattgtatccagtctgacattctcatttccccgccagagtacgccttcaaggctattgcccaggagaacatcaccacggtggcgctgaagagtggcgactgtgccgtggtggccacccaaaaaaaagtgaccgagaagaacatcgtgcctgaaacggtgacccacctgttccgcatcaccaaggacattggatgcgcaatgaccggacgcataggtatgaaccatagatactttaaattcttgtttatcccggcgtgattcgagtcaaattccagtcgagttagcacagagttatcccattgttgatatgtcccatgtaaccaagtagcgattcacttatgattgtgctaaaatcagaagaaatagcctgccagacattagggcaaaggcgtatagcgtggagccattttaaacgtagttttcacacggtgcttcaactagaaaagaggacatatcaacccaagagtgtcactaaatacttaaaattatttctctcccctagctgattcccgctcacaggtgcagaaggccagatacgaggccgccaacttcc

SEQ ID NO: 29024 - DNA, 1229 bp, DROSOPHILA
caaagggatttgtaaaaaaaaatattaacaaacatatgtaaattgaagacaaaacttttactgctcagtaacgttatcttatataatttttgttgaggcttacaacgttatttcttaagaaaatgtttgtaaaaaaagctattgagcgcaagctaaatctaactggaattaaggcagttggccgtaactaagcacaggtgaacctatcgacaatcgataacgtcgcggtgccgtgcgtaagtgatggccaactctagctggatgtaaccattgagaatcgaggtaaatattggtcaataacagcggagaacgctgcaattgcggattatttgggagtcaagtgcgcgttgccggcagcgaaaatgcacgaggatgatctgaagagtcagttgaccatcgcgcggaacgagatcaacaatctcaggcagcaagtgcgcaacctgcagcatgtgcagcgcaaggacattgagacgataacccgcctgctgcaggacttccgctgcgaggggtgtgcgaacaacaacaaaagcgccaaggacaaggtcgccggcgagaagcaggagcaccagcaccaacagcagacgcaggaccagcagacgggccaaggtcagagcaattataccaatggtgggcactgcttgggagaggactacgcacactttcggcccataggagtgatccggacagcattcccagagaagcgggccgtgccgaggcagtcaattgtgggcagtcgcctgcggggtatcatccaactgaacgacggtgtgttcaccaatccggagcactccttggagggactagaggacttttcccatctgtggctcatctatcattttcaccgcaacaattcccaccccaaggccaaggcggataacttttgcttctacaacgagcactatgatagtcttaaaggtctaagttcttgggcatatcaaacgctagatgcacatcgcaaggacaagcgagatccctgctacagcttagaagaactagaaaagtctctcacttatgacgacctgtggaactcggcgcaactgcagctggtacgcgagggaaagatgcacggctttttgcgcatgtactgggccaaaaagattctggaatggacagcgacaccggagcatgcgttggagtacgcaatcctgctgaacgacaagtacagtctggatggtcgcgaccccaacggctatgtgggctgcatggatgccgtcgcaaattcgatgtaa

SEQ ID NO: 29025 - protein, 288 aa, DROSOPHILA
MHEDDLKSQLTIARNEINNLRQQVRNLQHVQRKDIETITRLLQDFRCEGCANNNKSAKDKVAGEKQEHQHQQQTQDQQTGQGQSNYTNGGHCLGEDYAHFRPIGVIRTAFPEKRAVPRQSIVGSRLRGIIQLNDGVFTNPEHSLEGLEDFSHLWLIYHFHRNNSHPKAKADNFCFYNEHYDSLKGLSSWAYQTLDAHRKDKRDPCYSLEELEKSLTYDDLWNSAQLQLVREGKMHGFLRMYWAKKILEWTATPEHALEYAILLNDKYSLDGRDPNGYVGCMDAVANSM

SEQ ID NO: 29026 - DNA, 15308 bp, DROSOPHILA
aatatatcccgttaacaccttagagcattaaaattaattttttaccccaatttcttccgataaaaaatcattttgaaaattgtcagtatcacttgaactagctgagcaacgggtatctgatagtcgggagagtcgactatagcgttgtctcttgcttttaacttatttcccttagaatgttttttaatataacaataacatttccgagaatttctaaggcaggctcaggtatttgtaataattttttggacttcgatttggccaaaatcttatgattgaaatgtttgctatcggaatcttaattaaacagtgaacagctggctaagctcttttcacatattttctggaagcgtccgcctcttcacagttttatttcccattttcgcaattattttctttactgcactttaaccatttatgtgataaaattaaaacgcataatttacaaagaaccctatcgccccccttaaattaatgattgaattcttctataatttataagttttttttactctcctatttcgttttactaactgtatggcaaacttcctgatagctttttgcgaccttattatcaaccctttgccaaatcgaaaattttgcttgtaaaatctgagttggggtcagaaatcaattttttttaaataactaaggggcagagtgatcttgtgatgatgtggcataaacatcaatagtccaatgagtaaactattttatcctaagtaaataagatctgctttgatataaaaaaggcacttcggccaaagtgcacattttacaaatcgaaaaaattttataaattcgaaaaccggaccaccgaccttgcgatttcaaatcgaaatcctaaaattcttagaattcgattaccggagcatgcgcgtataataaaatcctttataataatgcaacagcagcactggttgcgtaaatggaattttgatatggtaggaaaacgatataaaaagtttatacctatcgaactatttttggtaataagccgtctgaacattctatgtaaatacatataacactgtctatatatatcaattcttaataattggtcaacatcttagtaatatttatttctgttaactaagataaacttttcttgattcctgtcctttttattgtgcttttaaaatagtgataagctataaatacagtaaaaatatgaaacgaaatttattgtaggcttaaaggaatataaatatgcatttatatatcatatactaattgcgtgaattttacatacctaaaaaatctttttatttgtatgaaaactttttttttaatatttaggccattatattaaattatgacgcttggtgatgtacgagttgagaacaaaatacaaacaagaagtgaaacctgtgctatcaatggaatggctttagacaacaagaatggaatcataaaacaggtaatatttatgcgggttactactattctatgttgtcaaaaatacatttatggggttaaatttagtgatgtacgtatatgtatgtacatacattcgtatatgggcgtttccagtaaattaatactcattgccaaaataattggcagatgccatgtatgtatatgtatatgaatgtattaatttttacatttgtatagtatactcctatgcatattcacatactgagtaaacgaaaaataattatacccattaatcgtaccattttataatacatatgtatacaaatatttatgatttagataataagccgagtcgatctggacatgtccgtataatgagctgtaatctcgggaactagcattccaagcaagcatatttgattcttggaacgtacatacataagtacatacacctctatttcgtgcattttctattgaattttagatttcttatttgggacatcgatcagttttaaaactgtattttcttagtttgcatactagattcattgaaaagtatgtaagaggtacaaataagcgtttccggccatacatataaagaatatatattcttgatcagaataaatagccagagtcgatcttttcctgtccatccgtttgtccgtatgaacgtatcaatctcaggaactataaaatctggactgttgaggctaagcatgcagattccacagccgcatcgcaagtttgtttccaaaattgccacgccctctaacgcccacaaaccgggcaaaaactgtcaaccccacacttttataaaatattttgatatattttcatatatttattggttttgaaaatttctatcgatttgccaaaaaactttttgccacgcccactctaacgccctaaagccgccaaaccggaaatgcctgtcaatgaattgagttttgaagtagttcatctgatttattataatcaacatttggaaaaatctgtcacggaattgtcagaaatgttttctgcatcgcggagaacaatttataacgtaattaatcgcgtaattaattataacgtcagattggaatcaaactgtggaacaggacgtaaaagtaaaatttaagtctcagtctaataagtctaagatagcttaagtactttgtgcaaagaatttcttgacagtgtcaaatctacgcaaacttggattcagttgtttttctcgttcagtgacagaaaatataacttattttcattgtccaaacaatttcttgacaaactgtacatcgatatcccggaaaattatgaaaattatgaaattttcagtagttgagtaacgggtatctgatagtcgggaaactcgactatagcactttctcttgttattacctcgctaagtgtttccagtcggaagtcgaattattccggaacacaatgtttcataagtatttcttttgccggggatgatactctcatactcaggaagactgctattgagtgcttttaaagagtacacaaagaatattaataacaaaagtttaataaatattttcttttatattttatttaactacaagcctacatctacacaatatcatatataacagtgatgggaataaataatatagaaatgttaaacatataactattaatatactattaatattatgaagatgcagatatgaacatggaagccttccatttaattcttttaccaagctttactgttggaaaaggaaatttcttcgatgttctgtgaaaaaagaaagacgctgtaatacttatgtttttcctcgatacgttctcgaacttccgactgaatttatctttgatatccgaaatttttaaaggaaaaaagatatattaatttccatattagtgtactttattgacattaccaaatttcatccccatataaaaatcgaatgcaggtattgcattgaaaagtatgaattgaagtatgaaaagtattgaaaagtatgaaaagcatttgaaaataacaacagatatacctgttactcagctagtggaagtgagaacgcgaaatttcatattttttctgcgtggcaaaatgtttttttagttaatggctaaaaattttcaagactatttagattatgaaaaagatcaaaatatttttcaaaagggttttcgtgacaggtttgagaggtttgtgatcgttatagcaaaaataaagcaaaaattgtttcgccaaatgaatacaaatttacaagactaataaaaatatgaaaacatatctaaacatttttcagaagtgtgggcgtggcagttttagtcggtttgtggtcgttagagaggctgaatgttttttggcatatcgatagaaatttacacaaccaatacaaaaatcaaaaaacattttttttgaggtttttgggcgttagaattggcgtggcaaaaagttgtttggaaaatcgatagaaatgcttaatctcaacctactatctttaatagtacctgagatctcgacgttcatacggacggaaagacagacagggcttttgattctgataaaaaatatatatacttcatatagttggaaacactccattctgtttgttttatacttttgaacgaatcatctctttttctacgagtaacgggtgtaaaaagcagtcgaggctaatatgtatttcatttcgttaacctatatagatttcaaatatccgtttcctatacatacagctgcggttaaaataatagcactactgcaggtcgaaagttgatttcctaaaaaaaattattaaatgtcggcaaggcaagaaggagccttttaagccggtgacggaactgaagaacgagcttcagatagctgaaagcgtggaaactgttggcaaacgcttaggacaaaacaaccttaatgcgtgcagcccaagaaaagtcccgcttttgactgttaagcatatggcaaagcgaatcgaatatgccaagatttccaaggactggcctgtggagaagtggcacaacattttgtggtcagatgagaccaaaattgtcttgtttggtgggaaaggcttctggtcttatgttcggcgtccaccacgaactgaatataatcctcgcttcacctttaaggcggtaaagtacgggggatcgaacataatggtatgggcgtgcttttcatactatggagtaggtccgatccattagattcaaagcatcatggatcagcacatttacacagatatcctggaaaatgtgatgctgccatatgccagggatgaaatgccgttggtttggacatttcaacaggataacgactcaaaacacacgagcaagaaagcttgaaagtggttagagcagaaatcgacccgaggaacgaactggcctgctcagtcacccgacttgaatccaatcgaaaacctttgggcggacgtgaaaaaaaggtttctgaagccaaacccaataataacgatgatctttggggtctggtcaaggatccatggagcaaaattcctcaataacggcgccaggacttggtggactccatgcgaggacgatgcgcggctgtcattgccaacaaaggtcacgcaaccaaatattaagattctttaaacatagttcttaagatataatccatttgttgaattattttttttatttttttggttagttttagcaaactacgagaagcagtgctattattgttaccgcctgaatttgaaggttttttttgtttaaccaattatttttaaaatatccattaaatctgttactaatttttttatttcgattgaaaatcattttagtatttaagtttagtgagtaaaatgatgaaaaagtgtcagaaaatagagaaacgctgggacaaacacgaaatgtgcttatggtgctattattgttaccgcaactgtaaatctattctattctatctaaaatcctttcctaactgccaaatgatcatacaagatatgaatcagataaaattgtcttaccttaatatcacgatggacgacaccttgttcatgcacatacaatcaaccgcttcttgtatctgtcttgtcctggagcctggagccagctctagagccaccagcccgaaaaaaaccgtgtgcaagaaaatcgtatggcgttacggatcttgttattaaattcaacttgatttagaactaacttagtttttcattttaatgtgttaattagggcctaatactttgttgtatagcctttttagccagcacagccttacacctgcgtgagttcaccaggtcctggcaacgtttggggggaattttcaaccatgcatcctgcacaacttgccaaagctgagccttagatgtcctggagttcttcgacacatactgttttatgctcccccacatggtttcaatcgggtttaaatcgacgatggtgctggtcaccacggcattacctctattatattttggggaaaccaattcttagacgatttgcttgtgtgtttcggatcattattctgttgtccattttaagggcatgttccattgagcatatgacagaaagacatcactaagtatattttcatatgcgttttggtctataataccataagtcatatgttttggactcataccattgtaaaaaaaggcccataccaggactttaggtccactatgattgaaagtcttgagtgggtgttttgggtggtactccaaatagcactatttttgaccaatcagtccaaaggatatttctccatttggagactggccagtttaggtaggttttagcgaagcttaactgtgccttaatatgccttgggctaagtagtggaatcttttcttggactcctcgcactttaattttgatgcaatagttgtcttcgaattgtaacgtcactgattcccaagttcagctcagactttatgtgcctaagggatgcaaaaggattgactttgctgtaacgaactatgcgtccatcgtctatatccatggttttacgtatggtagcacggttttcgggattccattcttatttaatggcattggataccgttcaacatttggtacaacattcaagggttttttgaatgccctttcatgttattccttccttagcttaagaattaacaatcttttctgccctctacccactaaaatctatttttttttatttttattgcccatttaaaaatgcgaattaacttaaccaaacacacggctattcctatgaacagcctaaaagttgtgaattttcgcaagaatgtaaataaaaaaggataacatgaaaagctaacgggattttcttcctatctacacattccattttacaaaaataggtggaataaagagtcgatcccgaaaatggacatggaaatataccgttgtatttctagtttctcttgcatttaaaaaaattgtttgttttgttagttttcttgccaatattctgttcagcgatttgctgtttcaaaatgggaataatatttcagtatgtttttttttgctcttattaattattaattacattttcagaatgacgcaaccatttcgttcttacgtgctgctcgcagcggagacattaaaaaggtgatggattttttggactgtggagaaatatcagacataaatagctgcaatgcagtaagtatgtaattgataaatactaataaataaatattagccaccaagaattggatgtgttcgtggccaaaatcttattgagatatcagtccaaatgtaatgttcaagaaacgacaaaaacgacaaattttgcacttcaatgtaaacttactttcacggtttttcgtgaaccacataattttatcttaatcttgattttcaattctcaaggaatcacgtaaaaacgcgacacgtgaggatttattgtatttaactacgggccaccaatgtgtctcagcaacagatttttgcgtcgtatcattaaatttggaacaaagccgagtaaatttatattagttactatagttttttttttattttagaacggtcttaatgcacttcatttagctgcaaaggacggatatgtggacatatgctgcgagttgctaagaaggggcataaagatcgataatgccacaaaaaagggaaacacagccttgcacattgcgtctttggcggggcagcatgatgtcatcaatcagctaattttatataatgctaatgtgaacgtgcagtctcttaatggtttcaccccgctttatatggcagcacaagaaaaccacgacaattgttgtcgaaccctattggccaatggggcaaatccgtcattatctacagaagatggcttcacaccacttgcggtagcaatgcagcagggacacgacaaaattgtagctgtcttacttgaaaatgacgtgcgtgggaaggttcgcctaccagctcttcatattgctgcgaaaaaaaatgatgtaaatgcagctaagttattacttcaacatgatcccaatgctgacatcgtttccaaatcaggattcacccctttgcacatagcagctcattatgggaacgtggacattgccactttgcttttgaacaacaaagcagatgtaaactatgtagccaaacataacataactcccttacatgtggcatgtaaatggggaaagttatcactttgcactttattactgtgccgaggagcaaaaatagatgcggcgactcgtgatggtcttacaccacttcactgtgcgtctcgctccggtcatgtagaagttattaagcatttgttgcagcaaaacgcgccgatactgacaaaaacgaagaatggtctgtctgcgctccacatggctgcacagggtgagcacgacgaagcagctcatttattgttggacaacaaggctccagtagatgaagttactgtggattacttaacagctcttcacgttgctgctcactgtggtcatgttaaagtagctaagcttttacttgattacaaggcaaatccaaatgcccgcgcgctcaacggtttcactcctcttcatattgcgtgcaagaaaaatcgtattaagatggttgaactacttattaagcacggagctaacattggcgcaaccacggaatctggcttaacacctttacatgtagctagttttatgggtaggtacaaatattaaatttgttatgttatcctccagtcgattcttattaagttaatacgtttcctcaagtacattttttgataagcatttcgaacttttaatctcactttaataagttaatcataaggatttagtcatatagacttttcccttaaaataaaaaagctcaggaaaatgtgttaatagcatataggaatttttattaaaaaatataaaaataataatattggtaacaataataataataataaatggtagctaatactatactattataaaattttaaattgcgaaaaagggagaatatagggtattgggtataaaaattatataaaatttcaatctttcaggatgtataaatattgtaatatatttactacaacatgaggctagtgcggatttaccaacaatacgcggagaaacaccacttcacttggcagctcgtgctaatcaggtattgctttaagtatatagcataaaatatattaataaatttatttattttaggcggatattattcgaattttacttcgcagcgcaaaagtggatgctattgcccgtgaaggccaaacgccacttcatgtagcttctcgattaggaaatattaatataattatgttattactgcagcatggagcagagataaatgctcaatctaatgacaaatattcggcgctgcatattgctgcaaaagaaggacaagagaatatagtccaagtgttactggaaaatggtgcggaaaataatgctgttaccaaaaaagggtttactccactgcatttagcttgcaaatacggaaagcagaatgtggttcaaatattactacaaaatggagcttctattgattttcaggggaaaaatgatgtgaccccattacacgtggccacgcactacaataatccctcaatagtagaactccttttaaaaaatgggtcatcgccaaatttatgtgcccgaaatggtcaatgtgctattcacatagcttgcaaaaaaaattatctggaaattgcgatgcagctgttgcaacacggtgcagacgttaatattattagcaagagtggcttctctccgttacatttggcggctcaagggggaaacgttgatatggtccaactacttctagagtatggagttattagcgccgctgcaaaaaatggcctaacaccattacatgtggctgcccaggagggccatgttcttgtatcacagattttactggagcacggtgctaacatttcagagcgcactaggaatggttatactccccttcatatggctgcccattatggtcacctcgatcttgtcaagttttttattgagaacgacgctgacattgagatgtcttctaatatcgggtataccccgcttcatcaagccgctcagcaaggtcacattatgattattaatcttttattacgccataaagcgaatccaaatgctttaacaaaagtaagtattttattttattttatttcatcctaagaaagtcatatagaattattattaaagctattgtaatatttggaactttttttttaacatttccaagcctgttctaaaaaatggtcaaaaataatggtcataattaatagttttgtggtgatcgccgaaaagctacgcaactcccgtagtatttcgtttcgctgttgctaccgctctcactgtgaagaaagctttagagccatagctgcagaacgaaaaagaaagtgctatgctctgaccgtcgtttgtttgtttcacttgtttcacttcagaatgaaatcgccttgcatgcttttttgcaaagaaaacgtgagatgattattaatgattgtttacttagcattttaaaggtgaacgattcaatgaacgagtcagcgaaacaaccaataataaacacaaatataacacgaatccagaaaagagaaaaaattttccttacgaatctaaaagaaaaaaagccatacaaatcggacgccaggaagtcgagtcgttagagtccttatattagtcaacaactttgttttgtttatatagattgtgtcatatccatataaatatattgtatattatcgtgctttttcattacaaattcaatacaaatccttaatttaggacgggaacacagctctccacattgcaagtaaccttggatacgtaactgtaatggaatccctcaaaattgtcacttcaacatccgttattaattcaaatattggtgcgattgaagaaaaactcaaggtaatgactccagagcttatgcaagaaaccttactttccgattccgatgacgaatcttgtgatgatcttttggatcataaccattacaaatacatggcaactgatgatttaaaagccaactacggccaggatcagaagaacttcgatactacaaacaccgaccacgatcttactgatgtttcagtactaaataagaaaggtaaattttccttatctaacacggcactgataaaaatttagtacttaaagcactaattaatagcagacattagaataataagacgcataacggccatacattggttttgcactattcagacccttttttggtgacgtccgaaattgatctctccccgctcgcgtaaacttgcgtaaatttaaaaatagaatttgcttgcttgttaatgttaatatatttgcttgatagtgttaacgtgtgcgtgcttgtgctagaagattttcagaccgaaatcaatttggatccaagaaacgaagttacatacatattttgttgtaaaatgatctactaaaatattttttacaaataaatgccttgatattttttttaaagaagcgatttaaattaattaactaccgtttacataaatatgtttataactaataacaagtaaaatgtcactgacgacatagtttaaccctggactgtaaccagtatcttttacagactttaaattatgttcatcattattttaacttataaattaaataaagttgcaatctgtaattgatattataacttttgaaattgtaaattttaaaaaatatattccattaatttatgtataaaataaataaaattatgccacctgtttattgcaaaatttctttctggagacacgacataaggccatatgtaagcacctaagaatcgttaccttctctaatttttcacatgttgcaagctgaatactcgaatgactctaatgaatttgaccactatagtgcccacaaaccgcccaaaacgtcaacactttaggaaaatgttttgattttatcttcgtttaatttgtttggcttgccaatgcgttcgtattctctctagctcattaacggtcatataatagtcggggaactcgactatagcattctaccttgttttgatatataactaataacttattttattcattcaagaaatactacccaatgaaatgagctgtattgaattgactgaaatcgggcacaaacccgataacgttgttattgcccgatcccaagttcatttagggtaagcttttacctggaatttttagggataaacgcatataatctataccctttattaggtttctggtgtcgttcttggtagatgcacgtggcggatccatgcgcggatatcggcacaatggtgtgcgcattatcgtacctccaaaggcctgcgctgaaccaacacgaataacatgtcgatatgttaagccgcaaagggtagtcaaccctccgcctttaatggagggtgaagcacttgtgagtcgcattttggaaatgtcacctgttgacggaatgtttttaaggtaaactggggagttcttttgctaaactaataattaattattttgtcttgaagtccaataactttagaagttccacactatggcacccttagaaaaaacgagcgcgaaattattatactccggtccgacaatggagaaagttggcgtgagcataacttatataaagacataataggtgaagatataaaccaaacggaggaatttcattcggatcgcatcgttcggatcgttactcaaaatgttccgcacttttttgctgttgtttcgcgagttcgtcaggaagtgcacgttattggacctgatggtggaaccgttttctctacagcagtgccccaggtcaaagctatatttccgcctcatgctttaactaaaaaaattcgagtcggtcttcaggctcagtcagtagacctggttgaatgttctaaactgctcggtcaaggggtcgctgtctcacccgtagtaactgtggagccacgccgtcgaaaatttcacaaagctattacattaagcattccagctccaaaagcatgtacaaatagtatggttaatgcatgttatggcaatggaaattcaagttcgcctactcttcgacttttgtgttccattagtggtggtcaaacccgagcaacatgggaggatgttactggatcaacaccgttgtcatttgttagagacagtgtaacatttaccactactgtttctgcccggttttggctaatagattgccgtaatatcatagacgcaggacgaatggccacagaactttatagtcatttggccaaagttcctttttatgtcaagtttgtaatatttgcaaaacgaatttcccaaacggaagcaaaattttcagtattttgcatgactgatgataaagaggataagacccttgagcaacaagaatattttaaagaagttgccaaaagcagggatatcgaagtattgcaaaatcaaattgtatatcttgaattcgctggtaacattgttcccattttaaagaaaggcgaacagctgtataccaagtttcaacctttttgcgaaaaccggctttcctttagtgctcacattaaagatcaagaatttccacatggtcgcatctgctttatgacctacccgatggtaggaccagatgaagtgcccctgaagccgctttgtactctgaacatttcagtggattttaaaactataacaaaccatctcgaaagagataacctgcatagcttgaacgattgtataaatgcgcatggaaaattaaaccacaatgaaaatattgtatttggagtaaaggaacaacaggtgaagaaaattgatattactaaagcttgtataatgtcaagtgacatcaaactaattcatgaggctgatgtaatattagacgacatatgtagccacttaggaagtgactggcctttgcttgcaaatgtattgggtgtttcccaagccgatatcgatcttgttaaaacagaatttttgttaaacgacagcgtaaagcagagcatggcaatgttacagctatggctagaacatggaggcatattgacgggcaatgtactagctgaagccctctacaaaatcggccgctcagatatagtggagaaaagctttaaaaatgcagagtttggcactcatcaaccggaaaaagttttgccgactgccggaattgaaaaagatggcgattatgaacagtaatttacaaagtctacaggtccttagcaagatatttttaaaaacgcagatggtaagtttagtattgataaaatatatgtactgcaacgcaggtgtcactaaaaggagtaaattgatactaatgcaatacttaacatttgaccattacgttagaaagaagaacaaattataatacttgaaaaccaggtaattaaagtgtataacgacatgaaatcattaaaataatattattttgttttagagaaatgtcgatttacctgagtaatcgatgagtaatcgagcggtattcatcatgaaatagttgccgatatcttaaataatttacctaaagtcgatttattaagttttctaaaaatttaacattttcttgacaatcagaactattattcaatgtattactttgcaatttataataaaacaatattaacagtgttataatttagagtttaaaatcgtactaattaaataaattgttgaatcatttatagctttgaacttcatttaattaaggaggattaaagtggcttgaatttatagtcagatataccatcagaaatatgactgatgtttgcagtcatctgatgtgaacctttttgttccatcatttaaggttcacttaaaaaattacatcaaatacacgacattcttcttcatagaactaaattttcattatttgccacttcattacgtaaaagttttccttaaagttttctcaattaaagcaactgccggcaaggggtagattttaataagcttaaaggtcccacggtagggcaagctaaggaataaaaggaataaaacataagaatgtttcagaatatttctacccgttaccactacatttactacatcgaattcccctgacagatctaaatttattttacgtacgcaacatcgtgcgtcacacatcgagcagcaaaggatctgaaacagagggaggaggagtgtagagtgatattaacaaagaaaatgcagctcgacaaataacgagcgtcaaataggtattccaacgggcacaattgttcacatggaaattctaattctaattggcaaagttcatcagtcgggcattgactcccaaaataggggaaatagtaaaatattatcctagtcctctagtccgataaaaaaagaagtcgctaaggaagtccattgaagaaggacctacattttcaacctccaacgcagtccaggaatggctgcatgcagtcgaaaatggactgccaaatggaatgtggccattaactcctcgaagtcagcctgtgtaacttttaccctgcggcccggaacttgcacagatctgacttttgatggaaaccccgtcaacaatgtcacatcgcactgctacctaggagttcatctagatcggagactgacctggagggccccatcacgtcggtcaaattcaagtcactggcgaaactaaaaaagctcgact

SEQ ID NO: 29027 - DNA, 5058 bp, DROSOPHILA
tctgaacattctatgccattatattaaattatgacgcttggtgatgtacgagttgagaacaaaatacaaacaagaagtgaaacctgtgctatcaatggaatggctttagacaacaagaatggaatcataaaacagaatgacgcaaccatttcgttcttacgtgctgctcgcagcggagacattaaaaaggtgatggattttttggactgtggagaaatatcagacataaatagctgcaatgcaaacggtcttaatgcacttcatttagctgcaaaggacggatatgtggacatatgctgcgagttgctaagaaggggcataaagatcgataatgccacaaaaaagggaaacacagccttgcacattgcgtctttggcggggcagcatgatgtcatcaatcagctaattttatataatgctaatgtgaacgtgcagtctcttaatggtttcaccccgctttatatggcagcacaagaaaaccacgacaattgttgtcgaaccctattggccaatggggcaaatccgtcattatctacagaagatggcttcacaccacttgcggtagcaatgcagcagggacacgacaaaattgtagctgtcttacttgaaaatgacgtgcgtgggaaggttcgcctaccagctcttcatattgctgcgaaaaaaaatgatgtaaatgcagctaagttattacttcaacatgatcccaatgctgacatcgtttccaaatcaggattcacccctttgcacatagcagctcattatgggaacgtggacattgccactttgcttttgaacaacaaagcagatgtaaactatgtagccaaacataacataactcccttacatgtggcatgtaaatggggaaagttatcactttgcactttattactgtgccgaggagcaaaaatagatgcggcgactcgtgatggtcttacaccacttcactgtgcgtctcgctccggtcatgtagaagttattaagcatttgttgcagcaaaacgcgccgatactgacaaaaacgaagaatggtctgtctgcgctccacatggctgcacagggtgagcacgacgaagcagctcatttattgttggacaacaaggctccagtagatgaagttactgtggattacttaacagctcttcacgttgctgctcactgtggtcatgttaaagtagctaagcttttacttgattacaaggcaaatccaaatgcccgcgcgctcaacggtttcactcctcttcatattgcgtgcaagaaaaatcgtattaagatggttgaactacttattaagcacggagctaacattggcgcaaccacggaatctggcttaacacctttacatgtagctagttttatgggatgtataaatattgtaatatatttactacaacatgaggctagtgcggatttaccaacaatacgcggagaaacaccacttcacttggcagctcgtgctaatcaggcggatattattcgaattttacttcgcagcgcaaaagtggatgctattgcccgtgaaggccaaacgccacttcatgtagcttctcgattaggaaatattaatataattatgttattactgcagcatggagcagagataaatgctcaatctaatgacaaatattcggcgctgcatattgctgcaaaagaaggacaagagaatatagtccaagtgttactggaaaatggtgcggaaaataatgctgttaccaaaaaagggtttactccactgcatttagcttgcaaatacggaaagcagaatgtggttcaaatattactacaaaatggagcttctattgattttcaggggaaaaatgatgtgaccccattacacgtggccacgcactacaataatccctcaatagtagaactccttttaaaaaatgggtcatcgccaaatttatgtgcccgaaatggtcaatgtgctattcacatagcttgcaaaaaaaattatctggaaattgcgatgcagctgttgcaacacggtgcagacgttaatattattagcaagagtggcttctctccgttacatttggcggctcaagggggaaacgttgatatggtccaactacttctagagtatggagttattagcgccgctgcaaaaaatggcctaacaccattacatgtggctgcccaggagggccatgttcttgtatcacagattttactggagcacggtgctaacatttcagagcgcactaggaatggttatactccccttcatatggctgcccattatggtcacctcgatcttgtcaagttttttattgagaacgacgctgacattgagatgtcttctaatatcgggtataccccgcttcatcaagccgctcagcaaggtcacattatgattattaatcttttattacgccataaagcgaatccaaatgctttaacaaaagacgggaacacagctctccacattgcaagtaaccttggatacgtaactgtaatggaatccctcaaaattgtcacttcaacatccgttattaattcaaatattggtgcgattgaagaaaaactcaaggtaatgactccagagcttatgcaagaaaccttactttccgattccgatgacgaatcttgtgatgatcttttggatcataaccattacaaatacatggcaactgatgatttaaaagccaactacggccaggatcagaagaacttcgatactacaaacaccgaccacgatcttactgatgtttcagtactaaataagaaagaaatactacccaatgaaatgagctgtattgaattgactgaaatcgggcacaaacccgataacgttgttattgcccgatcccaagttcatttagggtttctggtgtcgttcttggtagatgcacgtggcggatccatgcgcggatatcggcacaatggtgtgcgcattatcgtacctccaaaggcctgcgctgaaccaacacgaataacatgtcgatatgttaagccgcaaagggtagtcaaccctccgcctttaatggagggtgaagcacttgtgagtcgcattttggaaatgtcacctgttgacggaatgtttttaagtccaataactttagaagttccacactatggcacccttagaaaaaacgagcgcgaaattattatactccggtccgacaatggagaaagttggcgtgagcataacttatataaagacataataggtgaagatataaaccaaacggaggaatttcattcggatcgcatcgttcggatcgttactcaaaatgttccgcacttttttgctgttgtttcgcgagttcgtcaggaagtgcacgttattggacctgatggtggaaccgttttctctacagcagtgccccaggtcaaagctatatttccgcctcatgctttaactaaaaaaattcgagtcggtcttcaggctcagtcagtagacctggttgaatgttctaaactgctcggtcaaggggtcgctgtctcacccgtagtaactgtggagccacgccgtcgaaaatttcacaaagctattacattaagcattccagctccaaaagcatgtacaaatagtatggttaatgcatgttatggcaatggaaattcaagttcgcctactcttcgacttttgtgttccattagtggtggtcaaacccgagcaacatgggaggatgttactggatcaacaccgttgtcatttgttagagacagtgtaacatttaccactactgtttctgcccggttttggctaatagattgccgtaatatcatagacgcaggacgaatggccacagaactttatagtcatttggccaaagttcctttttatgtcaagtttgtaatatttgcaaaacgaatttcccaaacggaagcaaaattttcagtattttgcatgactgatgataaagaggataagacccttgagcaacaagaatattttaaagaagttgccaaaagcagggatatcgaagtattgcaaaatcaaattgtatatcttgaattcgctggtaacattgttcccattttaaagaaaggcgaacagctgtataccaagtttcaacctttttgcgaaaaccggctttcctttagtgctcacattaaagatcaagaatttccacatggtcgcatctgctttatgacctacccgatggtaggaccagatgaagtgcccctgaagccgctttgtactctgaacatttcagtggattttaaaactataacaaaccatctcgaaagagataacctgcatagcttgaacgattgtataaatgcgcatggaaaattaaaccacaatgaaaatattgtatttggagtaaaggaacaacaggtgaagaaaattgatattactaaagcttgtataatgtcaagtgacatcaaactaattcatgaggctgatgtaatattagacgacatatgtagccacttaggaagtgactggcctttgcttgcaaatgtattgggtgtttcccaagccgatatcgatcttgttaaaacagaatttttgttaaacgacagcgtaaagcagagcatggcaatgttacagctatggctagaacatggaggcatattgacgggcaatgtactagctgaagccctctacaaaatcggccgctcagatatagtggagaaaagctttaaaaatgcagagtttggcactcatcaaccggaaaaagttttgccgactgccggaattgaaaaagatggcgattatgaacagtaatttacaaagtctacaggtccttagcaagatatttttaaaaacgcagatggtaagtttagtattgataaaatatatgtactgcaacgcaggtgtcactaaaaggagtaaattgatactaatgcaatacttaacatttgaccattacgttagaaagaagaacaaattataatacttgaaaaccagaaatgtcgatttacctgagtaatcgatgagtaatcgagcggtattcatcatgaaatagttgccgatatcttaaataatttacctaaagtcgatttattaagttttctaaaaatttaacattttcttgacaatcagaactattattcaatgtattactttgcaatttataataaaacaatattaacagtgttataa

SEQ ID NO: 29028 - protein, 1549 aa, DROSOPHILA; identical to SEQ ID NO: 1776

SEQ ID NO: 29029 - DNA, 2926 bp, DROSOPHILA
tacatcatttacatctcaatccatttctccatcagtatatggtatcacacttggatcgacgactgctacattggataggtcaaagtgaaatgtgtggatggcctttggaagctacaaaggctggaaatagtggtaggcgatgtgccaatttttggcgcatatggaaggttgcaagtattgatcaccggcggctacggtggatgtggctccaatttattctttggagtaaatttccggtttggtggataaaaaagttccaatcgactgacaaccaacagacaactaaaaaaatttggcgctcaacgatcttagccattgacaaatatgagactttctgattttttgagctatacattttgtaaatttttgtttctttaagcttaatggttttttcgtttgtttatcttagcctttatatattttcttagtaattaaacatgtatttattttgtatctatctctttgtatttgtatttttttgtatgtatctctgtttgccttttcgaaagccacatctaggcacttaacagtttagacctttaaaactcggtctgtacaaaatggatcattcttctagatcatacacttacctttaaggcataacccttaactcacttttgaaatcttttgaaaatgtatattcttttgaacaaaaaggttggcactcgagagcaatagcaatacgtataagcaatcgaaaaaaacgaaaatcataaaaaatcctaacattattacagttcacatatgaaatcaatttaggtttgtgcacttacagttttttaagaaaatggctttggccagtttttaggcaggaaggtaaaaaatttgttcagtggatcggcgttgacaataaattaagatcaaaacaaaagcaaacgtttcggtagtggagacacgacattctttttacatcgaattttttgtcgagttcaaatatcgatagattatatcgatatcgtcttcgtctgacaaaccatttcacgataccaaaaaaaaagtgcaaaaataactaaattctcggcgtaattatttagtaaatagcgtagctaagcagcaggtgagtaggtcgcaagcgcgcccctccacgatccatcaagcggtaattggcctgctgtgcaattgctcgaggacaaggccatttgcctggtggcccccacgcaaaaagtaagcgattatgccaaaaagcaaagcagaagtggtctctgccaacgcatgagggtcgctcggtcgcccattgttatatttgcgaaggcagaatcagtcggcgttctaattagcgtgcaccctgtcccatcagaaaacccttccaaatccatatccagacggaccacggattaggactaagacccatttgacatgtcgctcaagcccaaaatagtggagtttgtcgatgtttggccgcgcctgcgctgcatcgccgagtcggtgataacgctcaccaaagtggagcgctcggtgtggaatactagcttcaggtacgtcttggcaacggtcggagtattaaacagcctggagagagatattgtgataggtcactagagactacaaagttacccaactcagaagaaacacaaataacactaactaacttttaaattaatccaacataagtaatggtttcaatcacattattttgcatttgagttggtaaactatgaatgtactagtacctagcggttcaactatatattttattcaacagcaaaattcacaaatatagctgctagcgaggcgaaaatgatttggtaaatgtcgtagaatcttgataaatgcaatcatagttttaataataaatgcctgttttctagcttgaatttaaatattttgaccgcttaaaggttaaactaagttcaagtaaatattaaatagatcgatgacgtatctttttaaaattaataatcaaaacagtgtaacgcaggctgcttttattctgaccgcaactgttcgtatatatgtgtgaagcgtgagttgccaaaataaaatttctaaaataacgagcactaatacatctgtctttccaatcacattcctttaacatatagcgacgtttacacactgtgcgtggcgcagccggaaccgatggctgatcgtctttatggcgaaacaaaacactttcttgagcagcacgtccaggagatgctggccaaaaaggtgctgatcgagggagaatgctcccattccaatggtggcccagaccttctccagcgttactacatcacctggatggaatatagccagggtatcaagtatctgcaccaattgtacatgtaagaatgcatcgaagtctgtaataactcaatgatcgttggaattaatttcctttagctacctgaatcaacaacacatcaagaaacaaaagattaccgatacggaatcgttctacggtaatctgtcaagcgatgctgcggagcagatggagattggcgagctaggtctagacatttggcgcctgtatatgattgagtacttgtccagcgaactggtccgtcacatactcgagggcattgccgcagacagagctagcaatggcaccttggatcaccatcgcgtgcaaattatcaacggagtgatacacagcttcgtggaggtacaggactataagaaaacaggctcgcttaagctctaccaggaactctttgaaggccccatgctggaggccagtggcgcctactacacagacgaggctaacaagttgctccatcggtgctcagtgtcggagtacatgcaggaggttatccggatactggaatatgaaagccggagagcccaaaagtttttacacgtcagttccctgccaaaactacgtaaagagtgcgaggagaagtttattaacgatcgtttgggcttcatctactcggagtgccgcgaaatggtttcagaggagcggcgccaagacttacgcaacatgtacgtcgtactaaagccc

SEQ ID NO: 29030 - DNA, 793 bp, DROSOPHILA
caaaaataactaaattctcggcgtaattatttagtaaatagcgtagctaagcagcaggtgagtaggtcgcaagcgcgcccctccacgatccatcaagcggtaattggcctgctgtgcaattgctcgaggacaaggccatttgcctggtggcccccacgcaaaaaaaaacccttccaaatccatatccagacggaccacggattaggactaagacccatttgacatgtcgctcaagcccaaaatagtggagtttgtcgatgtttggccgcgcctgcgctgcatcgccgagtcggtgataacgctcaccaaagtggagcgctcggtgtggaatactagcttcaggtacgtcttggcaacggtcggagtattaaacagcctggagagagatattgtgataggtcactagagactacaaagttacccaactcagaagaaacacaaataacactaactaacttttaaattaatccaacataagtaatggtttcaatcacattattttgcatttgagttggtaaactatgaatgtactagtacctagcggttcaactatatattttattcaacagcaaaattcacaaatatagctgctagcgaggcgaaaatgatttggtaaatgtcgtagaatcttgataaatgcaatcatagttttaataataaatgcctgttttctagcttgaatttaaatattttgaccgcttaaaggttaaactaagttcaagtaaatattaaatagatcgatgacgtatctttttaaaattaataatcaaaacagtgtaacgcaggctgcttt

SEQ ID NO: 29031 - protein, 60 aa, DROSOPHILA
MSLKPKIVEFVDVWPRLRCIAESVITLTKVERSVWNTSFRYVLATVGVLNSLERDIVIGH

SEQ ID NO: 29032 - DNA, 5983 bp, DROSOPHILA
cgttctcaatgaagtttctgcagtctggcatcgattttttcaaatgcagacacatgcactaactgccgacaaggcgaaccgactttttcgactgcctggagttgttcggaagcttctgctgtcggctcacaaaatggtcaaacagaagtctttcgaagcgaaaagctgctaataatagaaaactcaaagcgaagagggcagggggtccacgaatggcagacgccgcggcgacacttaaagcacggtaccatcggctttgaacggttatgtccgagaatattctaatttcgcaatgggcttttatctcaaacacacatgaaaatgcccatgccagagaccagagaacctacttatcaccgactttccgacaacacgaaagcaaacttttgtttatgacagagaaacgttcacaaatctagggatatcagaaatgtaccaaaatattttatcgatatctttcgacacgcgcagcataaatcgtcgttgactgtttacaaagaagtgtttctttcaacaagagtttctatcagcaaaaatggagcaaataaatagatagatcagtgcagaaataaacttaaaacctaaatttctagtacttgacattctgaaaatttgttggtcatgtcggatatcgagttaatattcattttacttaaacggcgatattgcttagcaaggacttcaacccacaccggcgcggtaggaacggctgactgcattattttcacaaatggacgaccagactaagtaataaaaactaaaatatgcgtctaactttattcacgtattccagtgtatatgggtatcgtcaccgacaaatcgctttaatgtatggcaaggacacaagagagcgcataatttgtaaatttttcgcaaacaaaattaaaccaaaatcaattctcgtgtcagtcacatagcggcgctctgatttatgtaaagataagtattaaatcatttacttgatttattcttgatttaatgttatacaattcataatcatcaaaatttttattgtttttatttgttttaaaacattgaccaaaggcgatgtttcaagtgccttgccgaataaagatgttaaattcggtcactccatatttttctatgcttttccgctcagccagctgcacttggatgttgtgggggatcgggtggtggtgctttacaacttgtccaagtactgggatagatcgggcaatccttccttaagacccttgcgcttacgagtatcctggacgatggcatagggcttgcttgagggctcgctcggatcgccaggcaacacctgccaatgatcgaagacacattgagggaaggcctgtcctccggtattagagcgcagatcggcggtaaaaccgaatgactcgttgacgggcaggtatgccttcacaacgaacatgggagtgcccacaacctggttttcctcgaatacatggccacgtcgcctgttgagcacaccgtatattcctcctacagcaacctcggggcactggatctcgcacaggtaaacaggctccatcaggcgcggcttggcggttatagcggcagcgtacagacaacgacgagtggttggaatgatctggccaccaccacgatggatggcatcagcgtgaagtgtcacatcgtagatgttgaagcggacaccgcgcaagttttcgtcggctaaaataccctcctttgaggcccattggaatccagcgacaacagagtccttgatttcgttaaggtactgcacggacttggtacagtcgaggatgaaattcggaccggttccgtcggggccgaagcaccagatcttacgggcctcagtcacatcgtagtcgtacttctcagacaaataacgggcacgagccttgaactcatccttggcactcacatcgccgttatcaatgtcctcgggaagaccgtctggcataggtagggctttcatcagcagacggttgtgcttgttgggcgacttggacagacacatctggtcggactcctccgacacagtctcacggtaggagacgacgggatcagacttcttcagtgggatacaagcgtggtcttcctctagatccttaaggcagatctccaaatgcagctcaccggcaccagcaatgatatgctcgccggactcttcgatgatacactgcaccataggatcggacttagccaaacgcttcaagccctccaccagcttaggcaagtccgcggggttctttggctcaacagccacgcgcaccacaggggacacggagaacttcatgacctaaaaacgaaaaaattttaaaagtcaataataaatttgtatgctgcttaaaaaaagaagaaaatgaaaaacgctgcaaaccttcatgttgtgggcgtccttgaaggtggtaatcgtaccggtcttaaccaagaactgatcaacaccgaccagaccgcaaatgttgccagagggcacatcctcgatggcctcgacgtaacgacccatcatgagaattgtgcgctgaatagccttctcatataagtcctccttcttgccgggagtgtagttggggcccatgattcggcacttttgcccggtggccaccttaccggcgaacacacgaccgaaagcatagaagcgacccttgtcagaggtcggtaccatcttagaaatgtacatcattagaggaccatcaggatcgcaagacttaacggcgatagcggcctcatcgtcatggggaccttcgtacagcatctccatgcggtacttctgggcaaccactggcgacggcaaatgaatagcaatcatctgaagtaaagcctcgccggctggcagccaggtgcgcatcacagtcttcagcagagctttgccatctttgtccttgtcttcatgcttcagagtcacaccgattttctcgagcaaggtacctatctcctccttcttgtaattcataatggcatcgaacaccttgtagatggggtccaggatgtacatgcagaacgagcgtttgttgtcagcctctttctgtttctgccatttcttggtcttggcgttaaagaagttttcaccccacaatctgtgaagaagttgaacgattaattgtgccttcagatatttcttattaactacttatcacttaatgaaatgcttaatgaccagttcaaatcgcttatttaaaaaaataattaatattatttttctggaaattttgtataatacaaaatgattcatttcagccaataaatttgttgcaaatttgatttataaattttaagtcttagatatcaaaaatgacgtccgaatatatcgatttgtataatatgaggccaaacaacaattgatttcagatatatgaagaaattatgtgaacaataaaagatttctgtatacaatttaaaaataattagtgtaaggtaactgccttaacatgactcgtttgaacattaggaaagcggtcccgagtcagcgtttaaacagcatccgaaagtttattcttcttctatttaaggtccacttgtggcgccgtcagcacgagagactctaaaaggactttccttgcggagatgtctttcaagaagccgcccgctaagcgccacacgttttgtggtagaagtttgaaaacatttacaaacaaacttgagacatgactcaccggttcattagcttgacaacatcaatcttgaatttctcggagtacatctcagagaactgcttgagggtgaacgcccagccgtgaagcccagaaccgaagcccactgatcccttagagggatccacgcgaacctcacccatcggtcctccgtcatcgttataggtggcaatgataacgtttacgttctcgacgatgcgctggaaggtctggtacagctcctcggcatctagttgcagctcaagcagagcgcggtccattttgttcatgaataggatgggcttaatacgctcagcgatggcctgacgcagcacggtttcggtctggacacaaactccggagacgcagtctacaacaacgagtgcaccgtcggttacacgaagggcggcggtcacctccgaggagaagtcaacgtgaccgggcgagtcgatcaagttgatcaggaaacccttgcactccttctcgcgctgatcggggtgggtaatgaacaccagatccttttcctccacctcaaagtacatggaaatggcactgcaataatgaaaggcggattaaaaaagccgtgggtgctggaacatgactggtcttacgtcgacttgatggtaatgcagcgctcctgctcgtccttgcgggtgtcagtgaaacgagtctcaccagccttggctccggcaatgataccagccttcgacacaagggaatcggtcagagtggacttgccgtggtctacgtgggcaatcacagacatgttgcggatgttccgcttcttgtccatgaggccacggatctcgtcgacggtgaagttgacctgtaaaataaataaggcatcgttatgtacatattataacgagtttccactcgatctatacacagtgctgatttaaaaatggcgtccatacacacactaagtcttcacagtcgtgcaaaggtctttgaggttagataagaactaaaaaccacaaatcactcactcgcgagtatgggcatcgataaatatagcaatatacatctattccttgggtatttcacaacaagcaccaaacaggatcacattctagccaaatttcaatagaaaattgcatacgtcattcctagtctttgtcttgcatttcaccataatgcacacacacacaacaagcaaacgtgaaaatatgtggacacatcatttcaccaagtaatggttgagacatctgcactttttgcactgggcattaaagatattaatgcaggtcgcctctaggccttttctgtagatatggggctattatttctgactttgggcacctaccattttggatgtatggagattttctcgcggaccaaaaaaacactacgcctttcaacggcgtttcgacaggaaagagcgaggcgctgcagcgaccatagagctgggacaattcttgatattttcgatagtcggaaccagtagttgatcgatagtagttcacgtgacagattcatcagatagttattttgcatgtttactttatagtttttaaacttttattttacagaatgacgttttcgtaattttccacgtaattttccgcgtcgaaatcgtggttgtttatatagccataaataaatattgctaagcactattattaatttacatacatccgcttaaatttcttctaaattatttttcttaaaaataatctaatctatatatatatatttctttatcgcttaaactatcttatgaaaaataaactttaagtgaaagctagttatattctcatttgctcatagatgccgagcctttaaagttaacgacttatgatagtttcgatcaaacggcatttcgaaattctacgcacgcagtaatatttaaagtatagcaagcgagaacgctatcgtcgatttttacgactattagatacccattacatagctaatgcgattctctaggaaaatatttaaaaattttgttggcgttgcggtaggaattaaaaaaaggtttgaattgtgggcttgaaaacttattgaggtttgtaggtgtaagagtgggtcacgccacggcatatcgacagaaatttggcagacaaataataaaacgaaaaaaatcaagagatccgaaagtcaaattttccgacaagaagtttcaaaatttgtaaaaaatgcggtggaaggtcatggcgtaagtgtttttggtattcattatacccgctactcgtagagtataaggatatcgtttgttcgttgaatggtatgtaacaggcagaaggaagcgtttccaaccatattgctcaggatcaatagccgagtcgatctagccatgtccatgtgtccgcctatccgtatgaacgttgagatctcaggagctataaaaactagaaggctgagatgcccactctaacgccctaaaaccgcaccattaa

SEQ ID NO: 29033 - DNA, 2328 bp, DROSOPHILA
gtcgctgcagcgcctcgctctttcctgtcgaaacgccgttgaaaggcgtagtgtttttttggtccgcgagaaaatctccatacatccaaaatggtcaacttcaccgtcgacgagatccgtggcctcatggacaagaagcggaacatccgcaacatgtctgtgattgcccacgtagaccacggcaagtccactctgaccgattcccttgtgtcgaaggctggtatcattgccggagccaaggctggtgagactcgtttcactgacacccgcaaggacgagcaggagcgctgcattaccatcaagtcgactgccatttccatgtactttgaggtggaggaaaaggatctggtgttcattacccaccccgatcagcgcgagaaggagtgcaagggtttcctgatcaacttgatcgactcgcccggtcacgttgacttctcctcggaggtgaccgccgcccttcgtgtaaccgacggtgcactcgttgttgtagactgcgtctccggagtttgtgtccagaccgaaaccgtgctgcgtcaggccatcgctgagcgtattaagcccatcctattcatgaacaaaatggaccgcgctctgcttgagctgcaactagatgccgaggagctgtaccagaccttccagcgcatcgtcgagaacgtaaacgttatcattgccacctataacgatgacggaggaccgatgggtgaggttcgcgtggatccctctaagggatcagtgggcttcggttctgggcttcacggctgggcgttcaccctcaagcagttctctgagatgtactccgagaaattcaagattgatgttgtcaagctaatgaaccgattgtggggtgaaaacttctttaacgccaagaccaagaaatggcagaaacagaaagaggctgacaacaaacgctcgttctgcatgtacatcctggaccccatctacaaggtgttcgatgccattatgaattacaagaaggaggagataggtaccttgctcgagaaaatcggtgtgactctgaagcatgaagacaaggacaaagatggcaaagctctgctgaagactgtgatgcgcacctggctgccagccggcgaggctttacttcagatgattgctattcatttgccgtcgccagtggttgcccagaagtaccgcatggagatgctgtacgaaggtccccatgacgatgaggccgctatcgccgttaagtcttgcgatcctgatggtcctctaatgatgtacatttctaagatggtaccgacctctgacaagggtcgcttctatgctttcggtcgtgtgttcgccggtaaggtggccaccgggcaaaagtgccgaatcatgggccccaactacactcccggcaagaaggaggacttatatgagaaggctattcagcgcacaattctcatgatgggtcgttacgtcgaggccatcgaggatgtgccctctggcaacatttgcggtctggtcggtgttgatcagttcttggttaagaccggtacgattaccaccttcaaggacgcccacaacatgaaggtcatgaagttctccgtgtcccctgtggtgcgcgtggctgttgagccaaagaaccccgcggacttgcctaagctggtggagggcttgaagcgtttggctaagtccgatcctatggtgcagtgtatcatcgaagagtccggcgagcatatcattgctggtgccggtgagctgcatttggagatctgccttaaggatctagaggaagaccacgcttgtatcccactgaagaagtctgatcccgtcgtctcctaccgtgagactgtgtcggaggagtccgaccagatgtgtctgtccaagtcgcccaacaagcacaaccgtctgctgatgaaagccctacctatgccagacggtcttcccgaggacattgataacggcgatgtgagtgccaaggatgagttcaaggctcgtgcccgttatttgtctgagaagtacgactacgatgtgactgaggcccgtaagatctggtgcttcggccccgacggaaccggtccgaatttcatcctcgactgtaccaagtccgtgcagtaccttaacgaaatcaaggactctgttgtcgctggattccaatgggcctcaaaggagggtattttagccgacgaaaacttgcgcggtgtccgcttcaacatctacgatgtgacacttcacgctgatgccataacatccaagtgcagctggctgagcggaaaagcatagaaaaatatggagtgaccgaatttaacatctttattcggcaaggcacttgaaacatcgcctttggtcaatgttttaaaacaaataaaaacaataaaaattttg

SEQ ID NO: 29034 - protein, 699 aa, DROSOPHILA
MDKKRNIRNMSVIAHVDHGKSTLTDSLVSKAGIIAGAKAGETRFTDTRKDEQERCITIKSTAISMYFEVEEKDLVFITHPDQREKECKGFLINLIDSPGHVDFSSEVTAALRVTDGALVVVDCVSGVCVQTETVLRQAIAERIKPILFMNKMDRALLELQLDAEELYQTFQRIVENVNVIIATYNDDGGPMGEVRVDPSKGSVGFGSGLHGWAFTLKQFSEMYSEKFKIDVVKLMNRLWGENFFNAKTKKWQKQKEADNKRSFCMYILDPIYKVFDAIMNYKKEEIGTLLEKIGVTLKHEDKDKDGKALLKTVMRTWLPAGEALLQMIAIHLPSPVVAQKYRMEMLYEGPHDDEAAIAVKSCDPDGPLMMYISKMVPTSDKGRFYAFGRVFAGKVATGQKCRIMGPNYTPGKKEDLYEKAIQRTILMMGRYVEAIEDVPSGNICGLVGVDQFLVKTGTITTFKDAHNMKVMKFSVSPVVRVAVEPKNPADLPKLVEGLKRLAKSDPMVQCIIEESGEHIIAGAGELHLEICLKDLEEDHACIPLKKSDPVVSYRETVSEESDQMCLSKSPNKHNRLLMKALPMPDGLPEDIDNGDVSAKDEFKARARYLSEKYDYDVTEARKIWCFGPDGTGPNFILDCTKSVQYLNEIKDSVVAGFQWASKEGILADENLRGVRFNIYDVTLHADAITSKCSWLSGKA

SEQ ID NO: 29035 - DNA, 6276 bp, DROSOPHILA; identical to SEQ ID NO: 5662

SEQ ID NO: 29036 - DNA, 2025 bp, DROSOPHILA
caccgcgaagcatttacaaataaattccctggtcgtgttgttcttttttttcgttccgttacatagcacgctaaagtaaatatccgaaaggtaaatacgatcagctgaagagcagttaaagatcagccgattccagaatgctttctctgcagaatcaacggcaaccgaagaccaccccactgacggacgactacgtgacctcgaacacggttctgggctacgggatcaacgggaaggtggtgcagtgcacccatcgccgcacccaacagaactatgccctcaaggtgctgttggacagtgaaagggcgcgtcgcgaagtggacctgcattggcgggtcagcggatgccggtacattgtgaacatcattgatgtgtacgagaacacgtttaaggacaggaagtgcctcctggtggtcatggagtgcatggagggcggcgagctcttccagagaattcaggacaaggccgacggtgcctttacggagcgggaggcggcccagataatgcacgagatctgcgcggccgtagactatctgcacagtcgcgacatagcgcatcgcgatctcaagccggagaacttgctgtacaccaccactcagccgaatgcgacccttaaattgacggactttggcttcgccaaggagacattcaccagttacacgctgcagacgccctgctacactccctattacgtggctcctgaggttctgggcccggagaagtacgacaagagctgcgacatctggtcgctgggcgtggtgatgtacatcattatgtgcggattcccgccgttctacagcaaccacggcctagccatatcgcccggcatgaaaaatcgcatccgcaccggccagtatgactttcccgatccggagtggacgaatgtgagccaggcggcaaaggatctgatcaagggcatgctgaacgtggaccccagcaagcgtctgcgcatccaggacgtcattagcaacaagtggattgcccagtacaatgctgttccacagacaccgctctgcacgggtcgcatgctaaaggaggccgaggaaacctggccggaagtgcaggaggagatgacgcgctcactggccaccatgcgcgtagactacgatcagatgcaaatcaaggcgctggacaagtcgaacaacccgctgctgacgaagcgcaggaaaaagatcgaggagatggagttatacatggccaatgcgacgcgcaactagacaacgaggaatccagagcgactaacacggccaacccgggagtgagatgagatgagatgaggagagatgggcgtaggatgtaggatgggcgaaccatcggtttaacacttaagcggataacaatgttgtacaatgctttacaaaaacgataaatactactatactacgacggcggcaagatctgctattaactaatatactacgatgacagcaacctttgcaaaacaactactccatgttattgttacgttacgttttcttattcattttgtcccattatctatctatccatttccagtcaagggttcttagggtattttgtagtctgaaaagtgctcttttgtaaaagaaactataaagcgtaatgcgcaaataacgaacttaagtaaagccaagtgcaagcctagctagccagccagcccagccgaatattcaaaatgtctcggtatcgcgtgaaagtgtttcgtttttcgattccctttttttttttaaatattattttccaaaaacgtgtcatttgtaaccgaaccgttttttacgtgtacgtgactttgattataattatatatatatatgtatatgtataaccgtctgtgtatgtatggcatatgtgtggagaaacaattatacagccagttcacgttagcattaatctgcgcaagattcagtgttgtttataacttttatttgctgattctgcaagcgatataccattttaccgtatagcatatttgtagtccataaacaacaagatcatcccccaaattaataaaaacaaatcaagcttattttactatgattaaaacat

SEQ ID NO: 29037 - protein, 359 aa, DROSOPHILA; identical to SEQ ID NO: 5664

SEQ ID NO: 29038 - DNA, 2709 bp, DROSOPHILA
tagttgaagccaaatgcgacgcgctggttaattggcctgaaaagcgaccaaaatgccagcggctcacagtgggtcaaacaggcgtggaaatttggcatttcaaaacattttcgcactttaattgcaataaaatatttgtgaatatggattttcctgtacgaaacttagttatctcgcactgtgcaaatgcagcagtggttttccttgaagtcgttaaaaagtctgaacaaacatggttttcatatcgttgactttcttattattgacaagtcaataaatatccgttttttggcttggatatatttatgaaaaatacttcctacaattggccaattgattaactatgtatttgccccactgtgccagttttgatcccaatttctcagcgggccatacaatcataaaaaaaaaccgcatggagctgactataaacaaatatatatgtatgtgcatatatatatgtatgtatgtttcccctttgactaaacaattagtaggaacttgaagatggagtggggctaatattttgtgggaaattcgttgccggctggctggaaactgcagccggcgtcgcttggaaagggaaaacttcgagttgcagcaacaaaaaacgcgtgtatgccgcacaaaccgcacacaagcaaacaagcgctgtttcacacacacacacatatatatatatatttacacggacgcttgcagaatgttgggcgtttccacgtgaggttatgtttgtcgataaaaaaaaaatgaaatgaaatggagaaaagaaggaattatgaataaagtttactgtacatggtgcaacaaacgtggggcggtgggcttactcaatggtaaggagagcgagaaagagcgggagagagcgagggaaagccgtatgaatggggttagagaaagaggcggaatggaatcatgttgccgggaatggcgagaatggaaagggagtcagtcagttggttgggaagagtgcggaggggggaaaatggacgtggaaaacttaccgctccagcgtgtagcggaccagcatgacaacagcggcgaatggaatgggccatatgaggtccttgtagttggcgtgcaccacatctggacgcgagccgggcgcaatgtccgcccaggttgtgttcggcggcagccaaatgtgcgtactccagaatacattgctgaactcattcaatatgtccatgttgctgcttcagttgccgcttcttaatttctcaattgtttgttttctttttcttggttttcctttgcttagctttccagtttttccttggcgtttgttgtcacatatgtatatgctttgctttttctaaatattcgcaattgtatgagcctgtgttattgtgccttgcgaacaacagcaacaataacagcaagaacaacaataagcgacaacaacagcaacaagaacaacaacaggagcaccggacactaatgcacactcacagcgtagcacaaacacacactggcaaaaaaacaaaaaccgccgaatcgaattgttgttgtcttgtctcgttaacttgcgcttatggcttttctaattctacttctatttctatttggatttcgatttaattcgtttttggaaatgctacctttgccgtttgtttgggagcgtaaatgaagtgaagttccctgacaatctgttctcgaccaaagcaatagactttctgaatttcggctcggtgtcgagtcggccgccgctcgtttcgtccacttaaactttcaggatgaacgaaaaaaaatactaatagtatttcctcgtcgagcaacaacaatacagtgtgcccagagacggcggagcagtaaatgtaactgcagcgcgacaagtgtgcccgtgtacgggaagacaaggaaagccagcaaaaataaggctttagaagctacacaaaataccaaatgcactaataattttaaagaacttttaattcacaagtttgcgaattttgtttattgcttattattattattgttcattacgtttaccactagtttttgagagaaattattatgcgctacaattagtgttggtttttcggtaagaactcataaaagtcaactatgtaaaggaagtatgccatggactataatggaaattagcaaacttcatcgttgagaccaaagggcatatgtgtgttcccatataggggaattttcccgcttatcaatacaagtatgtgtgcaaaattcttgtccaattgttgtcagcacatgaaaacggataactaaccataggttataggaaggatccactgtagttctgcaatgcaaaccagggctggcagcgagaacactgctgtaagctaacagcaaactgtactgtaaacagtagaaaactgttcgtggtatttagtatttagctagtattttaataccaacttttgtgcaatgcgatgagaaataaagaagaagagaagaggaagaaacgctcacaaactcttcgtttctctgcattaatacgcactttattattaagttaagctttattccattatattatggccgaatttctggactccgaggccgaggaatcggaggtaggtgtctgcggaaccccaaaaacactatttctagaagcgcgtaccgttcgtgcgtcgttatgtgtgcggtgtgcgttgcgccttgcgtgtgtgtacatacatatgtgcctacatatatattgaattaaccaaatggcttttcttcgtttttcccgcaggagga

SEQ ID NO: 29039 - DNA, 709 bp, DROSOPHILA
cggcggccgactcgacaccgagccgaaattcagaaagtctattgctttggtcgagaacagattgtcagggaacttcacttcatttacgctcccaaacaaacggcaaaggtagcatttccaaaaacgaattaaatcgaaatccaaatagaaatagaagtagaattagaaaagccataagcgcaagttaacgagacaagacaacaacaattcgattcggcggtttttgtttttttgccagtgtgtgtttgtgctacgctgtgagtgtgcattagtgtccggtgctcctgttgttgttcttgttgctgttgttgtcgcttattgttgttcttgctgttattgttgctgttgttcgcaaggcacaataacacaggctcatacaattgcgaatatttagaaaaagcaaagcatatacatatgtgacaacaaacgccaaggaaaaactggaaagctaagcaaaggaaaaccaagaaaaagaaaacaaacaattgagaaattaagaagcggcaactgaagcagcaacatggacatattgaatgagttcagcaatgtattctggagtacgcacatttggctgccgccgaacacaacctgggcggacattgcgcccggctcgcgtccagatgtggtgcacgccaactacaaggacctcatatggcccattccattcgccgctgttgtcatgctggtccgctacacgctggagcggtaa

SEQ ID NO: 29040 - protein, 62 aa, DROSOPHILA
MDILNEFSNVFWSTHIWLPPNTTWADIAPGSRPDVVHANYKDLIWPIPFAAVVMLVRYTLER

SEQ ID NO: 29041 - DNA, 11203 bp, DROSOPHILA
tgttagcaatatctacaaataagtttaaataattttgcacatttgttgcttggttttagtagaaatgattgtaaatttaattatataaatatataaaattgattccttaaatatccacactgaaacactgacacggaaaaaaatatacaaaataaatttagttttgcgattttttgattttcttttttttttttgtttgagagcactaggcagagatgagtaacaaaaaaaaaacagcttagcacacaattttcacttgaagaaaatgttattatgaaatacactggcaaaaaaagttaaaaaaaaatatttgttttcttttttgcactggaatcgataaaagggtgtatgggttcaaagagagagacatcaacatggttatggtttcgtgtctattttatcgttgatatttcgatccattcataaaaaaaaatatcacattaaaaaaatagaaaaaaaaagatggggatttatgagaggggttctgagaggttcgtttttagaggggtggttgtgtgacttttggcagcaccccgttatcgtttcggttgagtgcgcgcatacttaccatgcgcctttcacttctttctaatcactttcacagtgtctctgtctgtcacacagtcgtccgcctctctttgtctcttgtgcctgggtactgtaactgtaacgggaaatctgcactcgcgctcacgttcgcaccctcttgcacgcacgcgtgatagatggggaatggtgatatcctgccaactcctagttgcctttcaacagctaacgcactctcgttcacacacacaaacacacacacacacactcacacacaaggcagataagcaagatcaaaaataaaaaagaaaaacaaaaaaatagtggaaggagtatgggagaaaaacttcccgttgtaaagtatatgacatccagatgcatctggcattttccaacactgcattttttcaaattagcttgaacttgaaaaaaaataaaaaaaaattgcgattttggtttttggttttatgtttgttttgcttttcgccatttattatattcagtttctctggtcacacgttcgggattttgttttatatacttgatttttgttttgaaatgcttttaacgcactacaaactaaataattattaaaatttaacgctattttatagaataggttccatatagtgaaatatatatgtatattataagtatatctaaaaaggggatttttttttttaaattatttgtgtttttcgtttttgttgatatatggaaaaaacttgatgatagaagatatcagttgaaaaacagaaatattttagttttcttgttttttttttcatgttgtttatcttgcagtagattgtagttgttgtcgctggtagagatgggcaaattaaaaccaaaaaaaaaggcgtgattcgatttcaatattattgatgcgatctgaagatgctgaagaggtaagtggatctaaaagggttacaggttaatgctcggcaacgcttttgtaatttttactcctttagatttgtattttatatcgtgatttgttttacttttataattcagttctgattgcttgattgcaatgtttgtttaatcttctgttgtctcgcaccagtcttttgtgtaaacgggaaaaaaattaccaaaaaaaataactaggatcaaaaaaaattgcactctttagcttcgttcaagaaggatatatatcatcttttttagtgggttatgcatttcttgcttttttagttaggtatcgattcagtccttggttggtttatctctttgttgttaatatatattactcattatgtgcatttcggtattttttatttgtataaaaaaaattgcagctttacgttttgttattgtgctgtatccgggaaaaaaaaattttccgctttggaaaacacacacataaaaaaaaagtttaaaaaaatggtttttgactaacacttttacgcgaactttgaagtgctagtttaccgtttcgcctggttttgtgtatgtgtgtgtgtgtagttgtgagttctgttgtcaaagttgtgaaagaaaagcttaagatttaagcctaaacaaaaaaaacgtgatatttccctttctctttttagttgtaggttagtatctaaaagttacttttttttacgttttccaaatgatttttaatttttttttttagttttgttatatttttcaattacactaaaaaatttaaatacaattcaatttttgtgttttttttttttatcaaaatatacgacatatatattagtataatatatatgcactgcgaaattgcaacaataaattgaattatttacgaattaccgaattaagagcaaataataaaactaagtatgcattcatattgttgttggttgttagtgttatgtttgttgttggttggattgtttttcgtagcctgctgttttgttgttgttgtttgtgaaataccaaaagaaacaaaatgaatcaagggtttcagatgtaaacactctcaagattaattggtatatatgtattcactatatacccagcagatcgctcttgattatattttgtgtgtggcttgtgtgtttcatcttgtattcgtttctggatatttgtatttcagataaactttttagcatcgaaatagggatgcgagttttggaagcgttgctgtgatttaattgatctacctctgtgcatcatgttgaatgcggcggccatatgtgctggcggttgtggtggcggcggtggtacatttgctggaaccacgcccatctgcgacataaagtgggccgccttcgccttgccatgctcctcagccaaccggacggacagcggctgtgatccgccctcgggtattacgttgttcagcgccgaaatggcctcctgggcctcctcacgcttgttgtacctgcatagttttgatttatcgatcgaaataacacaccatagtagttgtagatggcaaatgaggtttataaaaatgagagaaaagaaagaaaacacataatgagccgggtgtcgaaataataaggggaaaagaaaacataatacaattgaccaaagggatacattcaaaggttctgtgagtcgacaaattcttctatacttccaacatttaagtttaatgaagttttagtgacaaaacaaaatgttcgactcagagaacctcgattgtggacattaacagaccatctagtcttctgattgcacatatcttaaccatataaaactatattgggcactcaccgaacaaaggccacaccacgaggacgacctgtgagcttgtcacgcaagatgttcttctgcacaatggaaccgtacttgccgaagatcgtgtccagctgatcgtcggttatggtacgcggcagattggtcacatacagattggtgtccttgatcgattctccgccgggacgtgcataggaaacctgttcgaaaataatgaaatggattagttaactaactctttgtgtgattggtgtgtttcaaagatctcaccttaagccgcttgttgcgcactgtgatgccattcagcactttaatagcacgctgcgagtccatttccgatgtgaagtccacgaaagcataaccaaaactgtagccagtctgttagatgataaaaattaagatttagttaggtttgttatttgcttgagaagatagatgagctatcagctatctgatatatttggagaaaagacgcttaccttatagtctcgcatgattctgcacgtgttgatgggtccaatggctctgaatagggcgtacagctcgcgatcggtcatgtcctggggcaagtagttgacaatcaggttggtgttgcttgcccgaggatcgttcatgagatcatcactaccaccgctgcccagcgacaatccgcagagattattcagcgagttgttgctggccatcggcggcaggtggcacatgttgccgccccctaaattgttggcactcccaccatttccgccgctgccgccgcagccggggaaatcattgtaaccacgacgcgacgatgaacttggaaatgaaaattctgtatcctgtggcgagaacgcataacgtgactgtaatcagattaaccatacaaagatattctagtgttgtgagaaggcctcatatcgcttgtcttggggttaattattagtagattgattggattggatggtttggttcggttcgatacgttttgactggctgctgctgcttggttgttataataattctcgagttctcgatatcgatatagacacaatacatatatatcgatcgttgctttttggcggcagcaacaacaacacacaacttgcttagtggatgaggtggctggcgaaggttcggagtggcttaaaacgtagaaatctacgacaaaaacgctaacggtaacaatattccaaatgcatatctcgcgaaaaatcgttagttctttgaatttcattggttagatttaagggcgtgcttgaaactcgagtgcagcgattttgaattggatttgatttttgatttaagcattaaatcgaaacattctcttgcttcactgtacttccgtgtgtgtatttgtttgtgtgagctaaacggcattcacagggttgcaaaaaccaaagaaaaaaaaaatggaatttcaagaaatgcataaaatgtttctttcctttctcagttttcttgagcttttcttaagtgtattgtgttaagtctctttaagtttttctttgaatgtgtgttttctgagggtctgtgtcattaacgtagaagaaatacagtgcgaggcaaaaatataatgacaatgagccagaaaccgatcaataaagtttttttttcaatatgttattatgcgcctgggatgatcaatgaagtgatttagttgatgcttcaaatggaatgggatattttttttttaattaaatgcccactttttagtgtcatctaatgcaatggcgtcaagtgtgtcgtccaatatttttgcaagtctgtgtggtaaagactgcgcaaaacgctaaacggaagccaaagctgaggcggaaacggaaatggaaacggatacgaaaacggacaatgtgacagggcaatacctaaaggtatttcatttaaaaactgtctgcttttcatggcacatgcaggtgagttgagtatttttgcttggcgtttgtatttctgtgtgttctttgtttagatgattctatttaaggtttatgtatatttataagttgtttgtgttgtcgttgctatttgagttttctttggtttatgtttattttgtatctgtttgtttaggttttgttgtttaaattgcaaactttaagttgttaatttgattttcatcattatcaataaaccaaaaggaaattgttcagcatccataaaataattcagttatgtttttagtatttgtttgttattcaaaagcgtgtgtccccagagcgttcatgagacaaactcaataacatacaactataaatagtaaaaggcataaaatttatattatcattattgttatgattatcaaaaacgaaaccgaacaaaacaaaatacaaaagtcagtaaatatcaaatgcattgccttgaatttggtttcaaatgaatagctttttccttattgttctttaattgattgctttcatgcaattgaaaatggaaatttatcgctaacaataattataaatttcaggcgtaagaatgagtatataaatgtgatgaatactaaccattccggatggcagagaatgggacatcccaaatccacgcccaccactgtacgatgaatcgattccatttcgttggggaagagaaaatatgaattagatatcatagaaatgattgtgttgtcggttattggttaaagtaaaatactatttaaaattatcaaaattaaatgtataaagcgcaatttacttatattatttagccattttgaaaatactttaaaaatgattaagaaatgttttggcgctggatgatttaacaatacttttcttactactaacttaaacttatgactaatgagttttgaaaacttgctgcagagtacagtaaactgtctcgtgtgcaaattagcttaagacttaggcttaatttaaatgagaaaaccattagtggattttgaaaaaaattgagaaatattgatgtgacgattttgcagtttctcgacgaatataacttagactgaccctcaaaacgatcccccagttatattcaaccgtgaaattctgcaaaacctcctttgccttaaggtgaaaacaattggtttcactttaaatattggcacttaagaaaagcatgatgtatttttttttttttgtactttcgaatcaccgaaaaaaaataaaaaaaaataatcatgggactatactagtaacccatatcggacactttgtggctggagcacattttcactttaaaaaaatcaaaaaaataatcacttttggcactttttcatcacattaacaaaaaggatttggggactttttatagtttcggacatcgccgtttcttcccacgtcgaattttggttgcatatcatattcggttcatacatttaggtctaagttagatctaagttgatttttatagtattttacaacgagctgcttccccaatatttcatcatcatattattatatatttggtttttgcctttggctttagtagtcttagagtcttgttacttacagggctttggaggtgtcctcgattcaaaaacattgcgtttcgttggcgaggagaccatggggggcggagctggcgcgtttgcccccccgtgcaaataaaaactacatactatcttaagagtcagtgagtgtctttcgcttttcggtgataatggtggctgcttctttctgggctgtgaaaaaaaatatgtctacacacgattaaattcagctgcggtacaacgtcgatgatgggcgttacataatttttgctgtaagggagttttggttcttgtttatgagttgggtgtttttctgggatatgtgtgtgttgtgtgggctggaagttttcaatttcactatatgtacgaaaacaaaagtgagattaggaaatctcaaatactcgctggcaaggtcacactaatttcgtgagcttgatttcattttgcacagtaaaaaaatatgcaaaaaaaaaaaggtagggcacaaagttctcaattacacgttgggaaaagtcacgctgttttcttttgaaattttgctttcattttcattttgcacagtaaaaaaaagaaaaaaaaaaagagtgccacttcaaaatctcagatatgctttggcaaggtcactctgcgctggtgttgattgttgacattgttgattgatgcgatgctgctgctgctctgcttgcggtttgatgttttagtatttgtagttttgctcggcattttatgaccttgagcaaatgttgcatttgtatttgccttttggcttttattcatttttgctgatactctcgcaagaggaagagagatggtcagcacagggatatagagaatgagagaactttggggggcaaaggcaatttgtcggctatatgcattggaatatgttggggaccttaggggttgggatggggcaagagtgagatggcgacgcaataaccacaacaacaaccggtgcttaaggctagttataaactgtaaaatctcccaacacgtgtgtggaaaaaggacaaccatacgtacataacttaaggctactgcatgtcaaggtcctgacacaatttttcgcacagcacgtgatgcactaaatttggagagggtgccctctgtggctgctctgtttacatttcatcgactgctgaataatgtgccataaattatacgaccccaaaaaaaaaaggggaaagaagaagcagctcataaaaatgtcacgaatgacgctgcttttgcttttcctccatttgttttatgccctaggaatatcattatagaaatcagaccacttcttgaccccgcttttcatttttttttttttttttttggcagcaaaaaacagtcaatttgtcatttcttaggcaaaacttaaggcttacgttctaatgaagatctggatatggaagatatatggataatgcgaggcgagaaaagaaaaactgaccgaaattaacaaaataataggcatttaaggcaataaagtacttattttttttggtacagttacgccaagcagtaagtgtggaagaacaaagacaaaaaataagataaaagagagaggtagagttttaagaacatttaccggtacattgtgagactgtttaggttgcacaatccgcacgatgagaacgtttttaggccgtttctataatcctcttgccacaaacaaattgcccagatacggatacatgtatctgccttgttctacgcgtgtatatgtaagagatatatcaagtttcgattcccagcggaatcaaaacgcttctgatggcccaaacatggcgcacgttcggtctttgtaaatgcagttcgatcttataaatggttcatgtgtgtatatatatatatacatatatatatttatatataaatatggaagattgcgttacattacgttgtttcacgttgatcggttaacatttttgcatattgcttatcttttatcacatacaactgtaaatataggacaaaaataaagcatgtcgcgattacgaaaacacgcagacgacgatcagctgattcaaagtgaaagtgtgtgcgactgtgggataaatgcgagcgcatgaatgtatgctatgaaaaatggcacaacgcaaacgtaacaactagatcgaacgatttatatggtagatacagctaatgaggggattcctatgtaatgcaaaaaacaacatctttttatagtggattgcttggaacgaaattaacattttctaagaaaaaacaaacaatgaatttgcaattgggagcggagcttttcaggggcgggctgttactcataaggcgggttccccttaaaacgattgactgttttttgctgcttttggttcgctatcaatgtgtttgtgtattcgtttgtgttaattgctatttgtatttaatcgattattggttttctgttatcattgattgcaccatctagcacatgtaacatttaattatacttatatacatcctccttgttgttgctgcggttattgttatccattcctgtggctgttcttgttgtttttctttctgtctctgataatatcagagcgcaaaaataaaaaagaagaatcaagtgaactaaaaaccaaacaatgtgtatgtgtgtgaatgtagaatgaataggggggagaacatcactcaatatgatttccttgttttttctttgccagtgacatcgacagcaaatcgataacaatctcgagattttatcgactgtcaatcgacatccttccctgcacaaataccaatgcacatatgccgacaagttttgctagtaaaagagatttcgaacaagcaaataacttgaactttcataaccaataagtctaaatctaaacaaaataataacgttgactgcaactattttccagcaacatggaattttcttcttcgtacaaactattcaaaaaaaggttgggttggtcttttgttcgttcgccaaagaggtatgggtagcaaaaaaattaggtaaacactgtatcatcttaaagttttgtgtgttatatgtgtgggaaggaatgggtggaaaggaagaggggattggggattgtcattcgaatgggtatcaagatcaaacataaatgatgtggatgtggctgacgaaacgtgagaactcaagtttaaaaatttacctcgacttgttgttgtagccatatgggggataaccaccattattattgttactacccggattattgttgccgtacatatcctgagagttgggagtgtgtttttcgaatcaacaaaagttacaccctcgatcgaaggtgagtttcggttttacaggaaaaggatgatgaggtgagttgcagttgacttgaggttaagaacgatgatcgagattcaatcgatctcttcaattgttttggcgctcagcgctctcagctggcctgctgctgtcgttgttattgttttcctgttacttctcttctgcctctgttcaactttcttgtgttgtactaaaattgctgttgctctctttctctttttacatgtgtgcacgctcactgtgctttcctctcttaagtcctatggggttttttttaagtgtgtgcttattatagctgttcttgtaggcgcgctgttgtagttgttgtagaagttgaagagttagttgttgttgttggtactaggagttgattgatcgatatagtttagattcaattgaatttcccttagcttgaggaggggagggggtgtaatggtggttctacatttatacgatgacaataaaaatatgacaaagacgtgaattgtgtgctgcacgatttaatgaacgaaataaaatgatcaacccacagctaaatagagaagttccgttaatcgtaccacgcattgagctgagtttatgtgtgtgtgtgtgtgtgagtgtttaaaactatagttgtcaggcattaaaaaagaaaagattctagatattgtttctaagcagatcccgaagaaatatatacactaacacaggttataacttaagaatacacttaataaatacttaaatccttaacactttgtatacagtcgcttatccagggttgccataccatcataagttatagcaaacgatttcttaacacaagtcactagtaaataagctgcgcatttatacaatattttgaccagcaaacaaacaagcgattggatagaactcaacatacctcgccatcttaaagttatagtaggacgacatggtcgaacagggagtcacagtatcaaaattgaaatccataatgggataatcacaaagttacgtttttcaacaaattgaatgtaagacacacaagaaatcacaagatctctgaacacaagttggacttgtcacgagtggaactcgactgaagatgtcctgcgggccatcgatctatttaaggatcgacagaggggtgccgagcgagtgggcggtggctgggtgccaggtagaagatcgaaggaggcaaggtgcgcgtgccagtcgcgtgggctacctaagatcccgcgaattgatcccgctaggaagtgtgccaggcgtactttcttgggtggccggctgcatttcgcggatccccgattcccggatcgcggatcttcgcaggcaggcagatgttc

SEQ ID NO: 29042 - DNA, 3045 bp, DROSOPHILA
gcgcgcctacaagaacagctataataagcacacacttaaaaaaaaccccataggacttaagagaggaaagcacagtgagcgtgcacacatgtaaaaagagaaagagagcaacagcaattttagtacaacacaagaaagttgaacagaggcagaagagaagtaacaggaaaacaataacaacgacagcagcaggccagctgagagcgctgagcgccaaaacaattgaagagatcgattgaatctcgatcatcgttcttaacctcaagtcaactgcaactcacctcatcatccttttcctgtaaaaccgaaactcaccttcgatcgagggtgtaacttttgttgattcgaaaaacacactcccaactctcaggatatgtacggcaacaataatccgggtagtaacaataataatggtggttatcccccatatggctacaacaacaagtcgagtggtgggcgtggatttgggatgtcccattctctgccatccggaatgtcacgttatgcgttctcgccacaggatacagaattttcatttccaagttcatcgtcgcgtcgtggttacaatgatttccccggctgcggcggcagcggcggaaatggtgggagtgccaacaatttagggggcggcaacatgtgccacctgccgccgatggccagcaacaactcgctgaataatctctgcggattgtcgctgggcagcggtggtagtgatgatctcatgaacgatcctcgggcaagcaacaccaacctgattgtcaactacttgccccaggacatgaccgatcgcgagctgtacgccctattcagagccattggacccatcaacacgtgcagaatcatgcgagactataagactggctacagttttggttatgctttcgtggacttcacatcggaaatggactcgcagcgtgctattaaagtgctgaatggcatcacagtgcgcaacaagcggcttaaggtttcctatgcacgtcccggcggagaatcgatcaaggacaccaatctgtatgtgaccaatctgccgcgtaccataaccgacgatcagctggacacgatcttcggcaagtacggttccattgtgcagaagaacatcttgcgtgacaagctcacaggtcgtcctcgtggtgtggcctttgttcggtacaacaagcgtgaggaggcccaggaggccatttcggcgctgaacaacgtaatacccgagggcggatcacagccgctgtccgtccggttggctgaggagcatggcaaggcgaaggcggcccactttatgtcgcagatgggcgtggttccagcaaatgtaccaccgccgccaccacaaccgccagcacatatggccgccgcattcaacatgatgcacagaggtagatcaattaaatcacagcaacgcttccaaaactcgcatccctatttcgatgctaaaaagtttatctgaaatacaaatatccagaaacgaatacaagatgaaacacacaagccacacacaaaatataatcaagagcgatctgctgggtatatagtgaatacatatataccaattaatcttgagagtgtttacatctgaaacccttgattcattttgtttcttttggtatttcacaaacaacaacaacaaaacagcaggctacgaaaaacaatccaaccaacaacaaacataacactaacaaccaacaacaatatgaatgcatacttagttttattatttgctcttaattcggtaattcgtaaataattcaatttattgttgcaatttcgcagtgcatatatattatactaatatatatgtcgtatattttgataaaaaaaaaaaacacaaaaattgaattgtatttaaattttttagtgtaattgaaaaatataacaaaactaaaaaaaaaaattaaaaatcatttggaaaacgtaaaaaaaagtaacttttagatactaacctacaactaaaaagagaaagggaaatatcacgttttttttgtttaggcttaaatcttaagcttttctttcacaactttgacaacagaactcacaactacacacacacacatacacaaaaccaggcgaaacggtaaactagcacttcaaagttcgcgtaaaagtgttagtcaaaaaccatttttttaaactttttttttatgtgtgtgttttccaaagcggaaaatttttttttcccggatacagcacaataacaaaacgtaaagctgcaattttttttatacaaataaaaaataccgaaatgcacataatgagtaatatatattaacaacaaagagataaaccaaccaaggactgaatcgatacctaactaaaaaagcaagaaatgcataacccactaaaaaagatgatatatatccttcttgaacgaagctaaagagtgcaattttttttgatcctagttattttttttggtaatttttttcccgtttacacaaaagactggtgcgagacaacagaagattaaacaaacattgcaatcaagcaatcagaactgaattataaaagtaaaacaaatcacgatataaaatacaaatctaaaggagtaaaaattacaaaagcgttgccgagcattaacctgtaacccttttagatccacttacctcttcagcatcttcagatcgcatcaataatattgaaatcgaatcacgcctttttttttggttttaatttgcccatctctaccagcgacaacaactacaatctactgcaagataaacaacatgaaaaaaaaaacaagaaaactaaaatatttctgtttttcaactgatatcttctatcatcaagttttttccatatatcaacaaaaacgaaaaacacaaataatttaaaaaaaaaaatcccctttttagatatacttataatatacatatatatttcactatatggaacctattctataaaatagcgttaaattttaataattatttagtttgtagtgcgttaaaagcatttcaaaacaaaaatcaagtatataaaacaaaatcccgaacgtgtgaccagagaaactgaatataataaatggcgaaaagcaaaacaaacataaaaccaaaaacc

SEQ ID NO: 29043 - protein, 354 aa, DROSOPHILA
MYGNNNPGSNNNNGGYPPYGYNNKSSGGRGFGMSHSLPSGMSRYAFSPQDTEFSFPSSSSRRGYNDFPGCGGSGGNGGSANNLGGGNMCHLPPMASNNSLNNLCGLSLGSGGSDDLMNDPRASNTNLIVNYLPQDMTDRELYALFRAIGPINTCRIMRDYKTGYSFGYAFVDFTSEMDSQRAIKVLNGITVRNKRLKVSYARPGGESIKDTNLYVTNLPRTITDDQLDTIFGKYGSIVQKNILRDKLTGRPRGVAFVRYNKREEAQEAISALNNVIPEGGSQPLSVRLAEEHGKAKAAHFMSQMGVVPANVPPPPPQPPAHMAAAFNMMHRGRSIKSQQRFQNSHPYFDAKKFI

SEQ ID NO: 29044 - DNA, 10008 bp, DROSOPHILA
ttcgtttttgttgatatatggaaaaaacttgatgatagaagatatcagttgaaaaacagaaatattttagttttcttgttttttttttcatgttgtttatcttgcagtagattgtagttgttgtcgctggtagagatgggcaaattaaaaccaaaaaaaaaggcgtgattcgatttcaatattattgatgcgatctgaagatgctgaagaggtaagtggatctaaaagggttacaggttaatgctcggcaacgcttttgtaatttttactcctttagatttgtattttatatcgtgatttgttttacttttataattcagttctgattgcttgattgcaatgtttgtttaatcttctgttgtctcgcaccagtcttttgtgtaaacgggaaaaaaattaccaaaaaaaataactaggatcaaaaaaaattgcactctttagcttcgttcaagaaggatatatatcatcttttttagtgggttatgcatttcttgcttttttagttaggtatcgattcagtccttggttggtttatctctttgttgttaatatatattactcattatgtgcatttcggtattttttatttgtataaaaaaaattgcagctttacgttttgttattgtgctgtatccgggaaaaaaaaattttccgctttggaaaacacacacataaaaaaaaagtttaaaaaaatggtttttgactaacacttttacgcgaactttgaagtgctagtttaccgtttcgcctggttttgtgtatgtgtgtgtgtgtagttgtgagttctgttgtcaaagttgtgaaagaaaagcttaagatttaagcctaaacaaaaaaaacgtgatatttccctttctctttttagttgtaggttagtatctaaaagttacttttttttacgttttccaaatgatttttaatttttttttttagttttgttatatttttcaattacactaaaaaatttaaatacaattcaatttttgtgttttttttttttatcaaaatatacgacatatatattagtataatatatatgcactgcgaaattgcaacaataaattgaattatttacgaattaccgaattaagagcaaataataaaactaagtatgcattcatattgttgttggttgttagtgttatgtttgttgttggttggattgtttttcgtagcctgctgttttgttgttgttgtttgtgaaataccaaaagaaacaaaatgaatcaagggtttcagatgtaaacactctcaagattaattggtatatatgtattcactatatacccagcagatcgctcttgattatattttgtgtgtggcttgtgtgtttcatcttgtattcgtttctggatatttgtatttcagataaactttttagcatcgaaatagggatgcgagttttggaagcgttgctgtgatttaattgatctacctctgtgcatcatgttgaatgcggcggccatatgtgctggcggttgtggtggcggcggtggtacatttgctggaaccacgcccatctgcgacataaagtgggccgccttcgccttgccatgctcctcagccaaccggacggacagcggctgtgatccgccctcgggtattacgttgttcagcgccgaaatggcctcctgggcctcctcacgcttgttgtacctgcatagttttgatttatcgatcgaaataacacaccatagtagttgtagatggcaaatgaggtttataaaaatgagagaaaagaaagaaaacacataatgagccgggtgtcgaaataataaggggaaaagaaaacataatacaattgaccaaagggatacattcaaaggttctgtgagtcgacaaattcttctatacttccaacatttaagtttaatgaagttttagtgacaaaacaaaatgttcgactcagagaacctcgattgtggacattaacagaccatctagtcttctgattgcacatatcttaaccatataaaactatattgggcactcaccgaacaaaggccacaccacgaggacgacctgtgagcttgtcacgcaagatgttcttctgcacaatggaaccgtacttgccgaagatcgtgtccagctgatcgtcggttatggtacgcggcagattggtcacatacagattggtgtccttgatcgattctccgccgggacgtgcataggaaacctgttcgaaaataatgaaatggattagttaactaactctttgtgtgattggtgtgtttcaaagatctcaccttaagccgcttgttgcgcactgtgatgccattcagcactttaatagcacgctgcgagtccatttccgatgtgaagtccacgaaagcataaccaaaactgtagccagtctgttagatgataaaaattaagatttagttaggtttgttatttgcttgagaagatagatgagctatcagctatctgatatatttggagaaaagacgcttaccttatagtctcgcatgattctgcacgtgttgatgggtccaatggctctgaatagggcgtacagctcgcgatcggtcatgtcctggggcaagtagttgacaatcaggttggtgttgcttgcccgaggatcgttcatgagatcatcactaccaccgctgcccagcgacaatccgcagagattattcagcgagttgttgctggccatcggcggcaggtggcacatgttgccgccccctaaattgttggcactcccaccatttccgccgctgccgccgcagccggggaaatcattgtaaccacgacgcgacgatgaacttggaaatgaaaattctgtatcctgtggcgagaacgcataacgtgactgtaatcagattaaccatacaaagatattctagtgttgtgagaaggcctcatatcgcttgtcttggggttaattattagtagattgattggattggatggtttggttcggttcgatacgttttgactggctgctgctgcttggttgttataataattctcgagttctcgatatcgatatagacacaatacatatatatcgatcgttgctttttggcggcagcaacaacaacacacaacttgcttagtggatgaggtggctggcgaaggttcggagtggcttaaaacgtagaaatctacgacaaaaacgctaacggtaacaatattccaaatgcatatctcgcgaaaaatcgttagttctttgaatttcattggttagatttaagggcgtgcttgaaactcgagtgcagcgattttgaattggatttgatttttgatttaagcattaaatcgaaacattctcttgcttcactgtacttccgtgtgtgtatttgtttgtgtgagctaaacggcattcacagggttgcaaaaaccaaagaaaaaaaaaatggaatttcaagaaatgcataaaatgtttctttcctttctcagttttcttgagcttttcttaagtgtattgtgttaagtctctttaagtttttctttgaatgtgtgttttctgagggtctgtgtcattaacgtagaagaaatacagtgcgaggcaaaaatataatgacaatgagccagaaaccgatcaataaagtttttttttcaatatgttattatgcgcctgggatgatcaatgaagtgatttagttgatgcttcaaatggaatgggatattttttttttaattaaatgcccactttttagtgtcatctaatgcaatggcgtcaagtgtgtcgtccaatatttttgcaagtctgtgtggtaaagactgcgcaaaacgctaaacggaagccaaagctgaggcggaaacggaaatggaaacggatacgaaaacggacaatgtgacagggcaatacctaaaggtatttcatttaaaaactgtctgcttttcatggcacatgcaggtgagttgagtatttttgcttggcgtttgtatttctgtgtgttctttgtttagatgattctatttaaggtttatgtatatttataagttgtttgtgttgtcgttgctatttgagttttctttggtttatgtttattttgtatctgtttgtttaggttttgttgtttaaattgcaaactttaagttgttaatttgattttcatcattatcaataaaccaaaaggaaattgttcagcatccataaaataattcagttatgtttttagtatttgtttgttattcaaaagcgtgtgtccccagagcgttcatgagacaaactcaataacatacaactataaatagtaaaaggcataaaatttatattatcattattgttatgattatcaaaaacgaaaccgaacaaaacaaaatacaaaagtcagtaaatatcaaatgcattgccttgaatttggtttcaaatgaatagctttttccttattgttctttaattgattgctttcatgcaattgaaaatggaaatttatcgctaacaataattataaatttcaggcgtaagaatgagtatataaatgtgatgaatactaaccattccggatggcagagaatgggacatcccaaatccacgcccaccactgtacgatgaatcgattccatttcgttggggaagagaaaatatgaattagatatcatagaaatgattgtgttgtcggttattggttaaagtaaaatactatttaaaattatcaaaattaaatgtataaagcgcaatttacttatattatttagccattttgaaaatactttaaaaatgattaagaaatgttttggcgctggatgatttaacaatacttttcttactactaacttaaacttatgactaatgagttttgaaaacttgctgcagagtacagtaaactgtctcgtgtgcaaattagcttaagacttaggcttaatttaaatgagaaaaccattagtggattttgaaaaaaattgagaaatattgatgtgacgattttgcagtttctcgacgaatataacttagactgaccctcaaaacgatcccccagttatattcaaccgtgaaattctgcaaaacctcctttgccttaaggtgaaaacaattggtttcactttaaatattggcacttaagaaaagcatgatgtatttttttttttttgtactttcgaatcaccgaaaaaaaataaaaaaaaataatcatgggactatactagtaacccatatcggacactttgtggctggagcacattttcactttaaaaaaatcaaaaaaataatcacttttggcactttttcatcacattaacaaaaaggatttggggactttttatagtttcggacatcgccgtttcttcccacgtcgaattttggttgcatatcatattcggttcatacatttaggtctaagttagatctaagttgatttttatagtattttacaacgagctgcttccccaatatttcatcatcatattattatatatttggtttttgcctttggctttagtagtcttagagtcttgttacttacagggctttggaggtgtcctcgattcaaaaacattgcgtttcgttggcgaggagaccatggggggcggagctggcgcgtttgcccccccgtgcaaataaaaactacatactatcttaagagtcagtgagtgtctttcgcttttcggtgataatggtggctgcttctttctgggctgtgaaaaaaaatatgtctacacacgattaaattcagctgcggtacaacgtcgatgatgggcgttacataatttttgctgtaagggagttttggttcttgtttatgagttgggtgtttttctgggatatgtgtgtgttgtgtgggctggaagttttcaatttcactatatgtacgaaaacaaaagtgagattaggaaatctcaaatactcgctggcaaggtcacactaatttcgtgagcttgatttcattttgcacagtaaaaaaatatgcaaaaaaaaaaaggtagggcacaaagttctcaattacacgttgggaaaagtcacgctgttttcttttgaaattttgctttcattttcattttgcacagtaaaaaaaagaaaaaaaaaaagagtgccacttcaaaatctcagatatgctttggcaaggtcactctgcgctggtgttgattgttgacattgttgattgatgcgatgctgctgctgctctgcttgcggtttgatgttttagtatttgtagttttgctcggcattttatgaccttgagcaaatgttgcatttgtatttgccttttggcttttattcatttttgctgatactctcgcaagaggaagagagatggtcagcacagggatatagagaatgagagaactttggggggcaaaggcaatttgtcggctatatgcattggaatatgttggggaccttaggggttgggatggggcaagagtgagatggcgacgcaataaccacaacaacaaccggtgcttaaggctagttataaactgtaaaatctcccaacacgtgtgtggaaaaaggacaaccatacgtacataacttaaggctactgcatgtcaaggtcctgacacaatttttcgcacagcacgtgatgcactaaatttggagagggtgccctctgtggctgctctgtttacatttcatcgactgctgaataatgtgccataaattatacgaccccaaaaaaaaaaggggaaagaagaagcagctcataaaaatgtcacgaatgacgctgcttttgcttttcctccatttgttttatgccctaggaatatcattatagaaatcagaccacttcttgaccccgcttttcatttttttttttttttttttggcagcaaaaaacagtcaatttgtcatttcttaggcaaaacttaaggcttacgttctaatgaagatctggatatggaagatatatggataatgcgaggcgagaaaagaaaaactgaccgaaattaacaaaataataggcatttaaggcaataaagtacttattttttttggtacagttacgccaagcagtaagtgtggaagaacaaagacaaaaaataagataaaagagagaggtagagttttaagaacatttaccggtacattgtgagactgtttaggttgcacaatccgcacgatgagaacgtttttaggccgtttctataatcctcttgccacaaacaaattgcccagatacggatacatgtatctgccttgttctacgcgtgtatatgtaagagatatatcaagtttcgattcccagcggaatcaaaacgcttctgatggcccaaacatggcgcacgttcggtctttgtaaatgcagttcgatcttataaatggttcatgtgtgtatatatatatatacatatatatatttatatataaatatggaagattgcgttacattacgttgtttcacgttgatcggttaacatttttgcatattgcttatcttttatcacatacaactgtaaatataggacaaaaataaagcatgtcgcgattacgaaaacacgcagacgacgatcagctgattcaaagtgaaagtgtgtgcgactgtgggataaatgcgagcgcatgaatgtatgctatgaaaaatggcacaacgcaaacgtaacaactagatcgaacgatttatatggtagatacagctaatgaggggattcctatgtaatgcaaaaaacaacatctttttatagtggattgcttggaacgaaattaacattttctaagaaaaaacaaacaatgaatttgcaattgggagcggagcttttcaggggcgggctgttactcataaggcgggttccccttaaaacgattgactgttttttgctgcttttggttcgctatcaatgtgtttgtgtattcgtttgtgttaattgctatttgtatttaatcgattattggttttctgttatcattgattgcaccatctagcacatgtaacatttaattatacttatatacatcctccttgttgttgctgcggttattgttatccattcctgtggctgttcttgttgtttttctttctgtctctgataatatcagagcgcaaaaataaaaaagaagaatcaagtgaactaaaaaccaaacaatgtgtatgtgtgtgaatgtagaatgaataggggggagaacatcactcaatatgatttccttgttttttctttgccagtgacatcgacagcaaatcgataacaatctcgagattttatcgactgtcaatcgacatccttccctgcacaaataccaatgcacatatgccgacaagttttgctagtaaaagagatttcgaacaagcaaataacttgaactttcataaccaataagtctaaatctaaacaaaataataacgttgactgcaactattttccagcaacatggaattttcttcttcgtacaaactattcaaaaaaaggttgggttggtcttttgttcgttcgccaaagaggtatgggtagcaaaaaaattaggtaaacactgtatcatcttaaagttttgtgtgttatatgtgtgggaaggaatgggtggaaaggaagaggggattggggattgtcattcgaatgggtatcaagatcaaacataaatgatgtggatgtggctgacgaaacgtgagaactcaagtttaaaaatttacctcgacttgttgttgtagccatatgggggataaccaccattattattgttactacccggattattgttgccgtacatatcctgagagttgggagtgtgtttttcgaatcaacaaaagttacaccctcgatcgaaggtgagtttcggttttacaggaaaaggatgatgaggtgagttgcagttgacttgaggttaagaacgatgatcgagattcaatcgatctcttcaattgttttggcgctcagcgctctcagctggcctgctgctgtcgttgttattgttttcctgttacttctcttctgcctctgttcaactttcttgtgttgtactaaaattgctgttgctctctttctctttttacatgtgtgcacgctcactgtgctttcctctcttaagtcctatggggttttttttaagtgtgtgcttattatagctgttcttgtaggcgcgctgttgtagttgttgtagaagttgaagagttagttgttgttgttggtactaggagttgattgatcgatatagtttagattcaattgaatttcccttagcttgaggaggggagggggtgtaatggtggttctacatttatacgatgacaataaaaatatgacaaagacgtgaattgtgtgctgcacgatttaatgaacgaaataaaatgatcaacccacagctaaatagagaagttccgttaatcgtaccacgcattgagctgagtttatgtgtgtgtgtgtgtgtgagtgtttaaaactatagttgtcaggcattaaaaaagaaaagattctagatattgtttctaagcagatcccgaagaaatatatacactaacacaggttataacttaagaatacacttaataaatacttaaatccttaacactttgtatacagtcgcttatccagggttgccataccatcataagttatagcaaacgatttcttaacacaagtcactagtaaataagctgcgcatttatacaatattttgaccagcaaacaaacaagcgattggatagaactcaacatacctcgccatcttaaagttatagtaggacgacatggtcgaacagggagtcacagtatcaaaattgaaatccataatgggataatcacaaagttacgtttttcaacaaattgaatgtaagacacacaagaaatcacaagatctctgaacacaagttggacttgtcacgagtggaactcgactgaagatgtcctgcgggccatcgatctatttaaggatcgacagaggggtgccgagcgagtgggcggtggctgggtgccaggtagaagatcgaaggaggcaaggtgcgcgtgccagtcgcgtgggctacctaagatcccgcgaattgatcccgctaggaagtgtgccaggcgtactttcttgggtggccggctgcatttcgcggatccccgattcccggatcgcggatcttcgcaggcaggcagatgttccgcattctcggaagctggatgccggcaaggtgatagttctattttttt

SEQ ID NO: 29045 - DNA, 2016 bp, DROSOPHILA
gtaccaacaacaacaactaactcttcaacttctacaacaactacaacagcgcgcctacaagaacagctataataagcacacacttaaaaaaaaccccataggacttaagagaggaaagcacagtgagcgtgcacacatgtaaaaagagaaagagagcaacagcaattttagtacaacacaagaaagttgaacagaggcagaagagaagtaacaggaaaacaataacaacgacagcagcaggccagctgagagcgctgagcgccaaaacaattgaagagatcgattgaatctcgatcatcgttcttaacctcaagtcaactgcaactcacctcatcatccttttcctgtaaaaccgaaactcaccttcgatcgagggtgtaacttttgttgattcgaaaaacacactcccaactctcaggatatgtacggcaacaataatccgggtagtaacaataataatggtggttatcccccatatggctacaacaacaagtcgagacatattttttttcacagcccagaaagaagcagccaccattatcaccgaaaagcgaaagacactcactgactcttaagatagtatgtagtttttatttgcacgggggggcaaacgcgccagctccgccccccatggtctcctcgccaacgaaacgcaatgtttttgaatcgaggacacctccaaagcccttggtgggcgtggatttgggatgtcccattctctgccatccggaatggatacagaattttcatttccaagttcatcgtcgcgtcgtggttacaatgatttccccggctgcggcggcagcggcggaaatggtgggagtgccaacaatttagggggcggcaacatgtgccacctgccgccgatggccagcaacaactcgctgaataatctctgcggattgtcgctgggcagcggtggtagtgatgatctcatgaacgatcctcgggcaagcaacaccaacctgattgtcaactacttgccccaggacatgaccgatcgcgagctgtacgccctattcagagccattggacccatcaacacgtgcagaatcatgcgagactataagactggctacagttttggttatgctttcgtggacttcacatcggaaatggactcgcagcgtgctattaaagtgctgaatggcatcacagtgcgcaacaagcggcttaaggtttcctatgcacgtcccggcggagaatcgatcaaggacaccaatctgtatgtgaccaatctgccgcgtaccataaccgacgatcagctggacacgatcttcggcaagtacggttccattgtgcagaagaacatcttgcgtgacaagctcacaggtcgtcctcgtggtgtggcctttgttcggtacaacaagcgtgaggaggcccaggaggccatttcggcgctgaacaacgtaatacccgagggcggatcacagccgctgtccgtccggttggctgaggagcatggcaaggcgaaggcggcccactttatgtcgcagatgggcgtggttccagcaaatgtaccaccgccgccaccacaaccgccagcacatatggccgccgcattcaacatgatgcacagaggtagatcaattaaatcacagcaacgcttccaaaactcgcatccctatttcgatgctaaaaagtttatctgaaatacaaatatccagaaacgaatacaagatgaaacacacaagccacacacaaaatataatcaagagcgatctgctgggtatatagtgaatacatatataccaattaatcttgagagtgtttacatctgaaacccttgattcattttgtttcttttggtatttcacaaacaacaacaacaaaacagcaggctacgaaaaacaatccaaccaacaacaaacataacactaacaaccaacaacaatatgaatgcatacttagttttattatttgctcttaattcggtaattcgtaaataattcaatttattgttgcaatttcgcagtgcatatatattatactaatatatatgtcgtatattttgat

SEQ ID NO: 29046 - protein, 48 aa, DROSOPHILA
MYGNNNPGSNNNNGGYPPYGYNNKSRHIFFHSPERSSHHYHRKAKDTH

SEQ ID NO: 29047 - DNA, 4528 bp, DROSOPHILA
atatattttattgacaagaacttagtaagtgaaatcaaatgagtaatatcatataattataatctttactgtactttagctttccagtacaaggtcagactttaaatcatattctagaaattgggtcaattcctgcttatcggaaatgtgtatatatgtatatttgtaccaaaatacaaaattttttctgcgactaccgacaacaagtgcttagattaagacttgtttttttttcttctcgccattgcgggatcaaaaaacccattaatttttaaacgccgcccgtatattgtgtattgaaaatgctcaatacatatgtgtagatgtttgccaaaatgtcagacactttcattatcaactgcgttttggcctttgaaaccaaaaatgccgttcaactcaagggcctttggtggtctttgaattcctgagctcaaaattcttggtaatttataacaaatatttagtaggttttatttcgatatacgataataacaaattaattatcttatgcatagcaacatcgtcaaattcgacagttcgacagataaataaatacgaaataacatgggatcggacttatgtgcgaatattctccggttgccactcgatatgttgacatcttcaccttccttttgctttttttgtggatttttttcggtattgcgatggcttgttataggttttgcccgttgatcactcggcaaatgcatggggaatggagttggatgttggagttgggactaggactgtttttgggggcttgggtagcgggaacatatggctgtgaatgagggcagctcaggctcgacacttagtgggactttgctgcctggcggagtcgctccaatgcggcctgctcctcgcgctcctcctcctcggcgagctccacctcgtgctccagcatatggatctgctcggtcagctccttgggcatctcctccagatggatcgccttgatctgcgccttaaggtccttggtcatgtgattgatgcggaagccgcgatggtcgaactgagccccaccgttgatcttgtgctgctcctccacgtacttgagggcacggacaatggcatcggggatcgggtgaatgtggtctccctggggcatgaagccgccatcgttggaggcgtagtttacgcgataaagcttgccatcgtcaccggtgtactcatagaatcccttggcatgtgtgcctccggtgtggtgaagcttggcctgctcctcgccatagattccattctcagtcaggtaactgttggataaaataaattaaaattgattaaaatgattgtacacacaaaagctgattatacgaataatataatattaagaaagcggaaatgagccccgttctttaatttaaattgggattgccgaaataaggacttgagaattttcaaaaatcatacaaaaacttacgagtgatcgtatttgtcctgtttgcggacctcttccttgtgcaggatcttgtggcgaccctcatcatcgtagttgaacagaatattgcggggcgtggtggtggtggtggtggtcgaggttgtcgtccttttggtggtcgtggttggtttcttggtggtcgtgctctgcgagtggtgttgtgatcattggcttgggtgtttttgatcgggcgtgtgtgcatgcgattgtgtggcatggtgtttggtggcaaaggatctttttgggggtcatgcgggataccgaatgtggggtgtcatgtagcgcggaatggttgattttgttgcgtagccgagaaacattcgcatttttgcttggattggttatgaaagcaggggggttcgggattggtttttgggggtagatttcgctgtgttggccggatgttggaattcgggggattctggtgggatctggtgggttcttagtactgtgtgctcggttggtgatggggttcatgatcggggaagccgtactccaaggggatttctggtactttaaactcggcgttacttactgtgtacaggtcgtggctgaaatggacaaaggcacatgaaataaaatacaatacttcacaccaaaaccagatgagtcactcacttgtaaggcctgtcgtcatggacatagggaatattcgaaccagcgtagggtccatagcctccgtcatagggatagggaatgtgatggtattttccaagctcacgctgatcgctcacatgtctgtagggaatcggcatgtgatgatagcgaccttttgggaaagaaacaaaatcggaagttagtgggctgtctcgttaatatatctacggtttctctcggtgtttgagtgagtgacttgcgattcaaattcgaaactattcaagttattcatatctaatattagatatttacacagttaattagtttctcattaagtttttgtacaaaagaggcagctggatctaaattggttgcaatttggagttaaactacagtcgtttaactacagtcgagttgatttacaatttccatatggatttttttttttgtagactgctttttgtgtgaaatgatttctgtttgtgtgattgtgagatagatatgcattttgctccttctttcaataatttacctatactttcttgcgaaccactccggcctagagtatgagtataagaaagtgattgtttaatatcagagtgcttaaagtaaaaacggttctttgattagtgatagaagcttggctcaaggtctgaataatctgagttttgtttacaatatcgctaatttcagatgtcagccttgagcttgaacttattcgaggagagtcagtggattattcgtgtaggtgagtgtgtgttttcgaagtcgtcgggtatacagatatacatatggtggtgtatgtatagtatgtatgttagtatttgggcaagtcggtcttgcttttcgatcgattcacatttgctgggtgttagtgggcgttggcagcggcatgcagtcattgggcgtggcagtaggcacgatatttgatattggcttgtctcacgaaaataccttcgttctgcgaattcccatggtacttcccatcgtcgctggggcgatacttgccatcgttagaggattgctgtggaaccgtatacttgccattattatccggaacgggactggcgtggcagacaacgaagagggcctgcggggcaagaggatgtcgttcaataaaccgatttgcataatgccgttaaatgtgacaggaagtggcgcccaccgccgcacgttcggttgaatgtactcaaacaatgctgcggatggcagtaaagattcaaggcttcacacgacgtgcagcagctaattaattgtgctaaaacttgctgataaacaacaattttatatatttttcctcaggcacgtgagtaacacttggcggacactgcacttcgtcaccaatcaggagaccaatatccttttgcgctactcaccacgaccagggagaagctcagcattgacttggtgaacatgttggctttgagtatcctttaggggaaagtatcctttttcgttaagataactgagatggtaatcctgctcgaaaggcgattgcaacaggaatgtttggtttcccttccagtacaccggatttatatagaaatgtgccaggttcgcagtcgcagcgctgctctcaacgcatcgtcgcgcctaaaattctctgagcggagattcgtcggttcacttcggttcatcagctacatttcatgaagacttgtaccccgagctgctccctttggatttttagacagaagatgagccgaatacttctggttccaccttttgttagcttctctcgcctcttcgagttcaatcgctttctggggcatcatctttatggcgtatcaatgtcacaagtaaacgtaatttcatttattaccaatcaaccgatttgtattatttcacaaatgtcgcttaatcgagttcatcggccaatattgttctttccagagcgcaggatatgtggctttaactgactcatcatcggagttatttactctagttgtgaaaaagaaattcccatgtttttcagaattgtcatcgaatttcgtgtgaacaataagagcgaattattttggaagcaatttcatttcgatgataatcgaaggttgagttcaggtcaaagcggacgtcaccgagattaaaacaataaacaccatataggtaacattatttcgcgttctgtgtttctgtgtcatcgacgtgggaagaatttttgatagcataaagggaaaaccaaaaatattaccaaaacttgtaaagttaaaagcatggagaaaatatatatatatttctaagaagctgaaaatcgttgcgcatgtgtacaatggaaacctgagagataatttaattatacctttccataataaaaaccatctttacaagtaaggcttaaaaataaagcgattaaattcctagagccaactggtcgtatactaaatctttcccatcccatcacagtttcttgacagagagtttcattgcaaggaagcgatattcaaaataagacaatatttaacaccagccagctattcctgaacgacgtcagtt

SEQ ID NO: 29048 - DNA, 1163 bp, DROSOPHILA
cgcctttcgagcaggattaccatctcagttatcttaacgaaaaaggatactttcccctaaaggatactcaaagccaacatgttcaccaagtcaatgctgagcttctccctggtcgtggccctcttcgttgtctgccacgccagtcccgttccggataataatggccggagtggttcgcaagaaagtataggtcgctatcatcacatgccgattccctacagacatgtgagcgatcagcgtgagcttggaaaataccatcacattccctatccctatgacggaggctatggaccctacgctggttcgaatattccctatgtccatgacgacaggccttacaaccacgacctgtacacagtaagtaacgccgagtttaaagtaccagaaatccccttggagtacggcttccccgatcatgaaccccatcaccaaccgagcacacagtactaagaacccaccagatcccaccagaatcccccgaattccaacatccggccaacacagcgaaatctacccccaaaaaccaatcccgaacccccctgctttcataaccaatccaagcaaaaatgcgaatgtttctcggctacgcaacaaaatcaaccattccgcgctacatgacaccccacattcggtatcccgcatgacccccaaaaagatcctttgccaccaaacaccatgccacacaatcgcatgcacacacgcccgatcaaaaacacccaagccaatgatcacaacaccactcgcagagcacgaccaccaagaaaccaaccacgaccaccaaaaggacgacaacctcgaccaccaccaccaccaccacgccccgcaatattctgttcaactacgatgatgagggtcgccacaagatcctgcacaaggaagaggtccgcaaacaggacaaatacgatcactcttacctgactgagaatggaatctatggcgaggagcaggccaagcttcaccacaccggaggcacacatgccaagggattctatgagtacaccggtgacgatggcaagctttatcgcgtaaactacgcctccaacgatggcggcttcatgccccagggagaccacattcacccgatccccgatgccattgtccgtgccctcaagtacgtggaggagcagcacaagatcaacggtggggctcagttcgaccatcgc

SEQ ID NO: 29049 - protein, 123 aa, DROSOPHILA
MFTKSMLSFSLVVALFVVCHASPVPDNNGRSGSQESIGRYHHMPIPYRHVSDQRELGKYHHIPYPYDGGYGPYAGSNIPYVHDDRPYNHDLYTVSNAEFKVPEIPLEYGFPDHEPHHQPSTQY

SEQ ID NO: 29050 - DNA, 3836 bp, DROSOPHILA
caaagacaaaagatttagttaatttcctagtgcaaaaataaaaaaaaacacacgtaaagcgaacggagttttaataattatctttacaaaattaaattataaaagaaatttttaaaaaagcctcctctggagaccaacctttttctttgggaatatcatttgaatggaggttatggttactagatgttaaaaaaattatcaggagagtgctatagttcaagcaaagacactagaattctagggtctttggttcaagtgatcgacttagatactcagcttatgggaacacaagtaaaacaaagctagtgtgaatgcgaactcaaattgaattatttttctgggatcttgatagatattaagaagtaaaatgagaaaaaatttaaaaattgtaccaaagtgtgggcgtgaccggttcggcggcttttgggcgttagagtaggcatggcaaaacgttttttggcaaatggccaaaaatatatggttcaaaatgtgggcgtggcagttttgtgcaacttgtgggcgtgccaacatggctcgaacttgtgctgcgtttttgtctctgggcagtctgtgggcgtttactcgtcatagtaattggcaagagtaaagtgtgagcgtggcccttttttatgctgtttttttctggccagaaatggctgtgtatttgaattaacttgtcttaatttgcctttggaatacattacctaccagagaaatgttaagcagtgaattgatgaaatagtgttccactgcggccgaaaccgaattaagtacacaagttcccatcttaccattaatgactcttaatttgtaatttgtacggagggatgtggggtttttctagatttaataccgattcagttcattcctcacttaaggtaattttgtatttagactagtattgccccatttctgtcacatttctcggccgcacactacagattgaaatttttaagaagagtttcccaaataatggctgttaattactaccaattgtcgctggtgtcattagaactgtttatttatttttacaccaatataaactgaagctggtgacgaacacttttaagcctcagtttcagactgcagcttggcaacatatgctgccttatgagctgcaatcttagtcttccgttgctcgtttgtgagtttcttagcattccaccttttcttcgtaacggcagaagacttcttagcggtgaccttgtgtgtagggtcgttacgaattgcctggtgggcttttttatagatatcctcaagctgcaaaaccaaagtaatgaattagacttttaataattaaatcaagatcaaattgttaaagctcatatttttaagactaaataatatatatggttatctgaatttaaatatacaatatttgatgaaaagtatggaccaggttgaaagacaaagcagtatatgtaatatggatcaagatcgctaacacagtcgatacgcaacataaattttgagagctcggaatctgaaattcaacatacagatgcacgaagcataataagatcagcccttaaggcaacaggagcattatctgctcggctggtgatcataatcaaggcatatattgtccaaatatgctttttaacgaacctattatgttatttaattcgcgagtatttggattataaattgtataaaatgtgtaaccataacaggaagtgtgatccattgggagaaaaacttcgaacataggttgcagattttatgttgtccacttatggcacagttagcgtcgtgtgcgaaacgcagctgtaattttttaagtggacgtcttgaaaaactatgtagtacttacatcatcagcacgaatgcccaacttgatgtatcggctaaactgccttttgaagctctcctcatcctcctcctccaaagaacgcatatagtctgcaacgtgctggccaaatatatgagcgcgatgcacatcggcattaaagctcttggtttcagcagagtatccaggaaagcgtttcacagagtgaggtatgtttagaccaccatcaactgctcccttcatagcgccaaacacacgggcaccagttgtagtacgagcgagtccaacatccaagaagcaacggaatgcccctgggccgtcatcaacaggctcgacgttgaactcctcaccagtcacttcagtgcatcctgcatatagggagtccagtcccaacttgttaaggacacgacgggcgaccagcaggcctgtgcagtaagcagcagcgtagttggtcaatccaaccttaaataaatataatgggccatcaagttgagtacgccagaacgcagtgggaaaactcacctggatcccgtatttgggaagctcatgggaataagcagcgcacaccacgcgatcaccctcgatgcgagcataggcgatctgtactgtgatgtccttgttggacaaacgtacgatcaaacggtacttgggagtgttgtacttgttcttgtcctgaaatgttaggcgtttcctggcatagtaatcggtctttccttcgcgacgccttcggaacttgacttggtacctcttaaagtactgcttgttcttgactaccttaacgaaaccctgcaaaaaataaaaacaaatgcaactaataagccaaactttttagacgcctgaacacatcattttctcggcacgaccaaatcacttatttcagtatttatcttaataaataaatgctcaatgtttcgagtccatgctcgcttttctatagcacctaccattttaaaatttgataacaatataaccgctaaaataaaaaagatttattaaaatcacgtggagtagaaatattttacacatacctcgccggaaattgctagcaaaaagaaggaaaatagtgcggccttattggatccaagaaacaaatgtactaaaaaataccttacaataaaaataataaatgccaatataaggcaagacagcgtcaaaggcacagcacaacttatggaacacttggaaatggtgtccaatttagaattatttattttcgatattaagttgataagtttcctttccagaatagtgatgtggaatcagattgacgtaggtgttaacattcaacaacgcaatttcttaaagtacgaaacaagcgatgtgaacggtatgaacgatatgacaggtttacactgctaatcgcatttaatttcacttcaatagccatgtgaagtatgacaattagatcaagtaatgttgttaaatgctacattgtctaactgagttgtcttcacagatagggacgaaatagaattttaaactgcaatcactgtactataatttttatatcctctgctcgaatatattacggattttttaatcgtatactatactagattcaatgaaaaatatgtacaggtagaaggaagcgtttccgattttgtaaagtatatcaggcatgctctgataataaaaaaattttaagggtatattaagagttggcttcttgatattgcccaaaatgttaccaaattagacaaagggtgacccaggaggaagtgtaacatcggttaaaatggttgggacgtccgctttaagcttcagagaagtggaaatgtgtaaatgtatagctttcacattagagtgaatataagtaaaatttataggcttggaaagataggcgaaattcaataatgaaatataagccacctaaacccaaaaagacctaaaacctaaaagaaatatttaacgtcttattatacgaattagttgtaaattaacttcgacgtgactacacgaaaatacacatatttttccagtgaaatctataatgaatagcgcaagtgtcatgtctttcgctaggaactgtagcatcggcttagagaat

SEQ ID NO: 29051 - DNA, 1010 bp, DROSOPHILA
gctagcaatttccggcgagcggttatattgttatcaaattttaaaatgggtttcgttaaggtagtcaagaacaagcagtactttaagaggtaccaagtcaagttccgaaggcgtcgcgaaggaaagaccgattactatgccaggaaacgcctaacatttcaggacaagaacaagtacaacactcccaagtaccgtttgatcgtacgtttgtccaacaaggacatcacagtacagatcgcctatgctcgcatcgagggtgatcgcgtggtgtgcgctgcttattcccatgagcttcccaaatacgggatccaggttggattgaccaactacgctgctgcttactgcacaggcctgctggtcgcccgtcgtgtccttaacaagttgggactggactccctatatgcaggatgcactgaagtgactggtgaggagttcaacgtcgagcctgttgatgacggcccaggggcattccgttgcttcttggatgttggactcgctcgtactacaactggtgcccgtgtgtttggcgctatgaagggagcagttgatggtggtctaaacatacctcactctgtgaaacgctttcctggatactctgctgaaaccaagagctttaatgccgatgtgcatcgcgctcatatatttggccagcacgttgcagactatatgcgttctttggaggaggaggatgaggagagcttcaaaaggcagtttagccgatacatcaagttgggcattcgtgctgatgatcttgaggatatctataaaaaagcccaccaggcaattcgtaacgaccctacacacaaggtcaccgctaagaagtcttctgccgttacgaagaaaaggtggaatgctaagaaactcacaaacgagcaacggaagactaagattgcagctcataaggcagcatatgttgccaagctgcagtctgaaactgaggcttaaaagtgttcgtcaccagcttcagtttatattggtgtaaaaataaataaacagttctaatgacacca

SEQ ID NO: 29052 - protein, 299 aa, DROSOPHILA; identical to SEQ ID NO: 25752

SEQ ID NO: 29053 - DNA, 5687 bp, DROSOPHILA
atctgcgcaacaaagtcaatgccctgttcatcgaccgagagaagtgcatgagtctccggcgctccttcccggtcagcaatctgatcaagtactgatccgtatccgtaactgcacgccggtctctggactccgcactcccactcgctttttccgccaccagttttcctgacatgtcatttgtgtgtgtaccatcaagagataaactgcagattgcatttgttgaaaactccttcgagataatccaactttctctttctgattggcactataaaacatgcaagcgatgggccacaaatgctatagctcattagtttgccttataggtaaaaataattaatacatatgcatgtgtgtatgttcaaaagatttgtaaactattaatgtgaccgccgctagatggcgcgtatgcgcaatctttgaatctatcgattttctacttatgtaagtatgtaagatggaccttcatctcgctcacacaccatttagctgagtaacgggtatcagatagagagtaactcgattccagcgttttttccttcaaagaaaataaacgtccagtttttcttaatgaaatcataaatacgcataagattatgcatcttgcgcacaacagttactaaattttactataaaagaaagcttatgtatattgcatgtacaaattacgaaagtttggtctgtgcgtttctgaagttttctcctcccaattttgattattggagtctttctcattagctcttagcttctctgagaatttcgaatatctgcttaaaaataaaaagcttaaaagggttttgctgcttttgaaaaaataagaattgacattttttaaaattggagccataaaataaacgtacaggcacactaatagtagggttggtattttttgctaagtttggtattaagtgcacacttcggcgtatgtactgcatatttaaacagccaagcgacggtcacattgcttgggtcctctgcaaaatttttaatgaaagttattaaccagaattcaaccggaggtgagctgtttgaaacttaaaggtttggagtcccacgaagacttaaaaacgaccaacgctatactggatccgcggatctcccaaaagtgaagcagcgtaaagtgcattaataaccgccggcatatttttacgaccataatccatacttttccctgcaagtcagctgcaccacacaccaacaccatctgattttccccgcaagtgcacatatcccccgccagggtttgattagagggtaatccgtagcccagctgcatgcaagctgcattttccggccattttcgcctaacggttccgtcccacctattggggcacgactgacgtgtacattaattttgcagcggtggggcccacacacacacacaatggcttaaaagaatgccttttgtttgtgtgtaagcaatgtataagcgaagccacaggatcgaattccctgtaaacttgacagttacagttataggtactgttactgttacagtaggccgcgtcgtgtagagcaaataagataatactagaaaacaaaatcgaaaattgcccgagtccctggtagtttgttaattatatattttcccgctcttcagtttgaaacacgggacaagccgccatgcgattcgctctggccaccgtggccatcatctgggctttattcgtcctggccgacggagtggaccccgggaactttaagacctgcgagcagagcagtttttgtcggtgagtctggctttgtacacgatgcactgcatacgtacgtggttcgggttgcaaggatttcattagttggctaaaaaagattgcgtttccgactatattaagtatatatattcttcatcaggatcaatagccaagtccgtctgtcagactgtccgtctgtccgtatgaatgtcgagatctcaggaactataacagctagaaggttgagattcagcaaacagattctagagacaaagacgcagcggaagtttgtagacccatgttgccatacccacaaccccacaaaacagctacgcccacacttttgaaaaatgtgttgatattttttcacatttaattccccaacaattatgaaatttcgcgtttgcgttcacactagctgagtaacgagtatctgatagtcggagaactcgactatagcattctctcttgttttttttttaatcgaaatattcctattttcgtcaatgaaacgcagtaggaaggcagacttttccgtctgtagctttgtgttgtttctaaatttccacttaaagagaaagtggaaagtgtcttcacaatgtttaaactctacactttgggactcaagtatcatcgatgtgattttcactcaaagtgctagtccactgtaatttcgaagatatttagcgaaataagtccacatattgataattcaggttgttgtttatagaacaaccataacttgatgatgattttattaatggttttcagacgctcccgaaagattcagggatcgggcagcaagtacgccttaattcccggcaccttgaacacctatgcggattcgttgaccgctgatctcgttaacaaggaaaaccatcaccagtttgcctttaagctagaggctctggtgggcagtaccttccgcctgcagatcgatgaaaagcagccacttcggccacgatatcgcgtcgagcacgctctgaagggcccaacccaggccggacgcattcgtgtccagcgggaaacagatggagagatcgttatcacatcggagaagaacaaggctgtgatccacggagacccgttccgcatcgatttcttcgagaacgacgtgctggtggtctcggtgaatgccaagaactggttgtactttgagcatctgcggcagaaggcccaggaaccgacctcccacccggcggaaaacgagaatcagcaggagcaggatgccgctgtcgaaactcctaaagcagcagatactatcgatgatcctggtgcatgggaggagaacttcaaatcacaccacgactctaagccctacggtccggaagctgtggctctggacttttcgttccccgcagccaaagttctattcggtattccagagcacgccgacagcttcatactaaagtccacctcgggtacggatccttaccgcctgtacaacctggatgtgttcgaatacgttgtggacagcaagatggccctgtacggctcagtgccggtaatctatggtcatgggtgagtttcttttgagtttttttaaaagcttaaaaactggcgaatagcctgctgattgcgcatatacaatagtatgctgtgcacattgtttaatgttataatacgaagttctaagaacaaattttaacatctaatttgtaatatcttccagagcgcaacgcacagcgggcgtttactggcagaatgccgctgaaacttgggtggacattcaaacgtcggagaccaatgttgtatcttcgctggtaaattttgtatccggctcgcagaagactcctcctccggctgcccactttatgtcggagtcgggcatcgtggacgccttcatcatgttgggacccaagcccatggacacttttaagcagtacgcggctctgactggaacacacgagttacctcagttatttgctctggcctaccaccagagccgctggaactacaacgacgagagggacgtgacctccgtgtcagcgaaattcgacgagtacaatatacccatggacaccatgtggctggacatcgagcatacagatggcaagcgctacttcacctgggacaagttcaagttcccgcacccgctggcaatgatcaagaatcttacagaactgggtcgccacttggtggtgatagtcgacccgcacatcaagcgggataataattacttcttccaccgcgactgcacggatcgtggttattatgtgaaaacgcgcgagggcaatgattacgagggctggtgttggccgggagcggctagttatcctgatttctttaaccccgtggtcagagagtactacgccagccagtacgcgctggacaagttccaaacggtcaccgcagatgtgatgttgtggaacgacatgaacgagccatcggtgttcaacggccctgagatcacggcgcccaaggacttgatccactacggcaactgggagcaccgtgacgtgcacaatttgtacggtcacatgcacttgatggggtccttcgcgggcctgcagcagcgcgatcccaaccagcggcccttcatcctcacacgcgcccactttgctggttcccagcgttatgctgccatttggacgggtgacaactttgcggactggtcgcatctacagcactcagtcaaaatgtgtctcacggaggcggtggccggcttctccttctgcggtgccgatgtcggtgccttctttggaaacccagatactgagctgctggagcgctggtatcaaaccggtgccttcctgccctttttccgggctcatgcacacatcgacactaagcgccgggagccatggcttttcccagaacgcactcgccaggttatccaaaatgctgtgatcaagcgttattcatatctgcccctgtggtacaccgcattctacgagctggagctgactggcgagccggtaattcgcccattattagcccaatatccactggataaggaggccttcggcgttgacaaccagctgttggtgcaagatcgcctgcttgtgagacccgtcatgcagcagggcgtcagcaaggtggacgtgtacttcccggcaattgacgacaaaaagaatggcgactggtggtacgatgtggatacttaccagcgccaggaacgatccggctatgtgtcggttccagtagatgatttcaaggtgagaggcgttattgtgtttttgaaaggtcacattttttagtttcttccgctttcaaactacttacagatccccgtttggcagcgtggtggcagcattgtaccgaagaaggagcgacagcgccgcgcctcaaccttgatgttgcacgatccgtacacactgataatctgcttagaccgtcagggcaaggcatccggttccctctacctagacgacgagaagtcctacgcttaccgccagggccagcgcatccacgtgaactacgagttcgcccacgaccagctggtcaatagcttcgtgggcaagcccaagtacaagacccttgcctggatcgagcgaatcgtgatcgccggacttgagaaggtgcccagcagcgccagcatcacggtgaatggtgtcagccagcagctggaggtgctccatcatgataacaccgtcgtcgtgcgcaagccgggcgtcaagatggacgtcgacttcgccattaaactcaactttgcgtagtctgtagtcgcaacgtgcgccgtgtattattgttctcataaatattttaattgtgtgcaccctaaaaattgctattaaatgttttaagcctcctattccaggcaaacccaaataatagattccctaactaccttcgattagtatcccccgttccttctctcaattccatcaattcaacattcggagagtgtaactcaagttgaacgcaatttatgtttcaataaatataaaaacttctctgtacgaacgatttattattgctaaaatatttacccagaggtaaaatagcattaaaaatagaaatagccccattcaaagtataaagtatatatatatatat

SEQ ID NO: 29054 - DNA, 3156 bp, DROSOPHILA
cagaattcaaccggaggtgagctgtttgaaacttaaaggtttggagtcccacgaagacttaaaaacgaccaacgctatactggatccgcggatctcccaaaagtgaagcagtttgaaacacgggacaagccgccatgcgattcgctctggccaccgtggccatcatctgggctttattcgtcctggccgacggagtggaccccgggaactttaagacctgcgagcagagcagtttttgtcgacgctcccgaaagattcagggatcgggcagcaagtacgccttaattcccggcaccttgaacacctatgcggattcgttgaccgctgatctcgttaacaaggaaaaccatcaccagtttgcctttaagctagaggctctggtgggcagtaccttccgcctgcagatcgatgaaaagcagccacttcggccacgatatcgcgtcgagcacgctctgaagggcccaacccaggccggacgcattcgtgtccagcgggaaacagatggagagatcgttatcacatcggagaagaacaaggctgtgatccacggagacccgttccgcatcgatttcttcgagaacgacgtgctggtggtctcggtgaatgccaagaactggttgtactttgagcatctgcggcagaaggcccaggaaccgacctcccacccggcggaaaacgagaatcagcaggagcaggatgccgctgtcgaaactcctaaagcagcagatactatcgatgatcctggtgcatgggaggagaacttcaaatcacaccacgactctaagccctacggtccggaagctgtggctctggacttttcgttccccgcagccaaagttctattcggtattccagagcacgccgacagcttcatactaaagtccacctcgggtacggatccttaccgcctgtacaacctggatgtgttcgaatacgttgtggacagcaagatggccctgtacggctcagtgccggtaatctatggtcatggagcgcaacgcacagcgggcgtttactggcagaatgccgctgaaacttgggtggacattcaaacgtcggagaccaatgttgtatcttcgctggtaaattttgtatccggctcgcagaagactcctcctccggctgcccactttatgtcggagtcgggcatcgtggacgccttcatcatgttgggacccaagcccatggacacttttaagcagtacgcggctctgactggaacacacgagttacctcagttatttgctctggcctaccaccagagccgctggaactacaacgacgagagggacgtgacctccgtgtcagcgaaattcgacgagtacaatatacccatggacaccatgtggctggacatcgagcatacagatggcaagcgctacttcacctgggacaagttcaagttcccgcacccgctggcaatgatcaagaatcttacagaactgggtcgccacttggtggtgatagtcgacccgcacatcaagcgggataataattacttcttccaccgcgactgcacggatcgtggttattatgtgaaaacgcgcgagggcaatgattacgagggctggtgttggccgggagcggctagttatcctgatttctttaaccccgtggtcagagagtactacgccagccagtacgcgctggacaagttccaaacggtcaccgcagatgtgatgttgtggaacgacatgaacgagccatcggtgttcaacggccctgagatcacggcgcccaaggacttgatccactacggcaactgggagcaccgtgacgtgcacaatttgtacggtcacatgcacttgatggggtccttcgcgggcctgcagcagcgcgatcccaaccagcggcccttcatcctcacacgcgcccactttgctggttcccagcgttatgctgccatttggacgggtgacaactttgcggactggtcgcatctacagcactcagtcaaaatgtgtctcacggaggcggtggccggcttctccttctgcggtgccgatgtcggtgccttctttggaaacccagatactgagctgctggagcgctggtatcaaaccggtgccttcctgccctttttccgggctcatgcacacatcgacactaagcgccgggagccatggcttttcccagaacgcactcgccaggttatccaaaatgctgtgatcaagcgttattcatatctgcccctgtggtacaccgcattctacgagctggagctgactggcgagccggtaattcgcccattattagcccaatatccactggataaggaggccttcggcgttgacaaccagctgttggtgcaagatcgcctgcttgtgagacccgtcatgcagcagggcgtcagcaaggtggacgtgtacttcccggcaattgacgacaaaaagaatggcgactggtggtacgatgtggatacttaccagcgccaggaacgatccggctatgtgtcggttccagtagatgatttcaagatccccgtttggcagcgtggtggcagcattgtaccgaagaaggagcgacagcgccgcgcctcaaccttgatgttgcacgatccgtacacactgataatctgcttagaccgtcagggcaaggcatccggttccctctacctagacgacgagaagtcctacgcttaccgccagggccagcgcatccacgtgaactacgagttcgcccacgaccagctggtcaatagcttcgtgggcaagcccaagtacaagacccttgcctggatcgagcgaatcgtgatcgccggacttgagaaggtgcccagcagcgccagcatcacggtgaatggtgtcagccagcagctggaggtgctccatcatgataacaccgtcgtcgtgcgcaagccgggcgtcaagatggacgtcgacttcgccattaaactcaactttgcgtagtctgtagtcgcaacgtgcgccgtgtattattgttctcataaatattttaattgtgtgcaccctaaaaattgctattaaatgttttaagcctcctattccaggcaaacccaaataatagattccctaactaccttcgattagtatcccccgttccttctctcaattccatcaattcaacattcggagagtgtaactcaagttgaacgcaatttatgtttcaataaatataaaaacttctctgtacgaa

SEQ ID NO: 29055 - protein, 924 aa, DROSOPHILA
MRFALATVAIIWALFVLADGVDPGNFKTCEQSSFCRRSRKIQGSGSKYALIPGTLNTYADSLTADLVNKENHHQFAFKLEALVGSTFRLQIDEKQPLRPRYRVEHALKGPTQAGRIRVQRETDGEIVITSEKNKAVIHGDPFRIDFFENDVLVVSVNAKNWLYFEHLRQKAQEPTSHPAENENQQEQDAAVETPKAADTIDDPGAWEENFKSHHDSKPYGPEAVALDFSFPAAKVLFGIPEHADSFILKSTSGTDPYRLYNLDVFEYVVDSKMALYGSVPVIYGHGAQRTAGVYWQNAAETWVDIQTSETNVVSSLVNFVSGSQKTPPPAAHFMSESGIVDAFIMLGPKPMDTFKQYAALTGTHELPQLFALAYHQSRWNYNDERDVTSVSAKFDEYNIPMDTMWLDIEHTDGKRYFTWDKFKFPHPLAMIKNLTELGRHLVVIVDPHIKRDNNYFFHRDCTDRGYYVKTREGNDYEGWCWPGAASYPDFFNPVVREYYASQYALDKFQTVTADVMLWNDMNEPSVFNGPEITAPKDLIHYGNWEHRDVHNLYGHMHLMGSFAGLQQRDPNQRPFILTRAHFAGSQRYAAIWTGDNFADWSHLQHSVKMCLTEAVAGFSFCGADVGAFFGNPDTELLERWYQTGAFLPFFRAHAHIDTKRREPWLFPERTRQVIQNAVIKRYSYLPLWYTAFYELELTGEPVIRPLLAQYPLDKEAFGVDNQLLVQDRLLVRPVMQQGVSKVDVYFPAIDDKKNGDWWYDVDTYQRQERSGYVSVPVDDFKIPVWQRGGSIVPKKERQRRASTLMLHDPYTLIICLDRQGKASGSLYLDDEKSYAYRQGQRIHVNYEFAHDQLVNSFVGKPKYKTLAWIERIVIAGLEKVPSSASITVNGVSQQLEVLHHDNTVVVRKPGVKMDVDFAIKLNFA

SEQ ID NO: 29056 - DNA, 2319 bp, DROSOPHILA
taatcaatatatataaatccgtatatatatatccgtatctatatatatatatatatatgtatatatatcgctatatttgatgatgaaaaaataagttttacttattacgttccttgctgtttacaaattctcaacgtgtttctgtaacggttaatgagcataaagtcgcagaattgagatttttctactgccacccataatgaatattgtaaaagaaatatgtatctaaataaccacaatttaatttttccagattttaaaccagcctttcgaagtggtgcatccttttagtttttttttttaatgcatatttcaatatgtgcaataatttttttctttcacttgttataaaaatggtttaaaaaacaattcgctataaaaaaaaggggttttgtgaacacatttttgtaggtcctccaaagttttgcgtctctatctaattaatgagcacaacaagtggaagcactacatctggaggaaataatactgaattgttagatgttcttgaaaaccaaaaatttttgttagagccacaagattaataatccgtactggcggtcgttgtaactttcccatttctgatattatgtaatcctagtaaaatttacttttattttccattatcactggataatttggcagccaaattgctgttccgcgtggagggcgttaagggcgtgttctttggcgccgacttcgtcaccatctcgaagcaggagggcgccgagtggagcctgattaagccagaggtgtttgccgtcataatggacttctttgccagcggcttaccagttctcaacgatgcccagcccaatgcggacaccgagatcctcgaggacgacgacgagacggtaatgatgatcaaggagctgctggacacgcgcatccgacccaccgtccaggaggacggcggcgacatcgtcttcatgggctacgagggcggcgtggtcaagctaaagatgcaaggctcctgctcctcctgtcccagctccattgtgacgctgaagaacggagtgcagaacatgctgcaattctacataccggaggtggagtccgttgagcaggtcttcgacgaggcggacaggatgatcgagagcgagtttgagcgctcgaaaagaacctcaagacgctcaagcagcaggagcccagtggcggcggtccccattagagggactcattttaatttccctgcttacgttgctaattcgctagtgaaaccaatagttagttgtatacataacgtacatgtagttgattacttaaataaatctacggctttaagcttaaccgttagtgcatgaaccgatgtacagaaactcatgttcgagtttgatctgtggggttacaaaggaaatttacacttgtttaaactattaaaatgtattatattatttgaagtttcactaagaacatatattcaatgctttcattctatactattgaaaatgtgggctggataaggataaggcccacatgctaatcaactgaaaaccaacagcctaattaattcggcaccaagcaaggtcaataattgagaaactaacttaaaggggcctgcggcctgcggcccagtctgacccccattggcaagtgggtcaataacccgtgtcattgccatcgattctacaactcgttgaagggaaccattaccaggcgataccgctgccaggctaccgtttaatcaataagcccgccggagaagaagccaccgaggactggcgctgggaccattctatccagaaccgcaggaccccacagacccaaagtaaagggatctccgaggaagagaagtggtaatatatcgagtccgtcgacaaatgctctgctgggccaacgaggatcactatctgagccaacgctacccgaatccgcagcaaaaggcgccagaaacgcttaagaacctgctgttgcgatccagtgtaccgatagtgggtgctccgaatcccgagaaggactcgcatttcgccggcaccatggcaccgctcaagggtcaggaggtgcttaagttccacaagcactcctacctcgagaaccgcatcttcgatcaccgcctggtcaaggacaacctgctggacaagtggcccaccgctgacatgaacgagtacaacgagcgcaaggaccaccgcaacctcatggagtcctatgtaccactaaccaccattgcaccactaccattacccattgcacctatgtattgtatgtatgtagtttcgtatcttggcattcatctaccatagtagcactgaaaagttgtggagcacctggccaagatgtagctggttgagatgtaggtaggcacccagaaggtgcatatctata

SEQ ID NO: 29057 - DNA, 678 bp, DROSOPHILA
gccaaattgctgttccgcgtggagggcgttaagggcgtgttctttggcgccgacttcgtcaccatctcgaagcaggagggcgccgagtggagcctgattaagccagaggtgtttgccgtcataatggacttctttgccagcggcttaccagttctcaacgatgcccagcccaatgcggacaccgagatcctcgaggacgacgacgagacggtaatgatgatcaaggagctgctggacacgcgcatccgacccaccgtccaggaggacggcggcgacatcgtcttcatgggctacgagggcggcgtggtcaagctaaagatgcaaggctcctgctcctcctgtcccagctccattgtgacgctgaagaacggagtgcagaacatgctgcaattctacataccggaggtggagtccgttgagcaggtcttcgacgaggcggacaggatgatcgagagcgagtttgagcgctcgaaaagaacctcaagacgctcaagcagcaggagcccagtggcggcggtccccattagagggactcattttaatttccctgcttacgttgctaattcgctagtgaaaccaatagttagttgtatacataacgtacatgtagttgattacttaaataaatctacggctttaagcttaaccgttagtgcatgaaccgatgtacagaaactc

SEQ ID NO: 29058 - protein, 178 aa, DROSOPHILA
MDFFASGLPVLNDAQPNADTEILEDDDETVMMIKELLDTRIRPTVQEDGGDIVFMGYEGGVVKLKMQGSCSSCPSSIVTLKNGVQNMLQFYIPEVESVEQVFDEADRMIESEFERSKRTSRRSSSRSPVAAVPIRGTHFNFPAYVANSLVKPIVSCIHNVHVVDYLNKSTALSLTVSA

SEQ ID NO: 29059 - DNA, 20213 bp, DROSOPHILA
aaccgaaaagcgtgcgatagcgacacaggacatcgctctatccttctcgcttgctcgcgctgccgcaagtcggtcgtagtcgtagtgggtgggcaatataactgtctatttatgctcgccttgcatatgaagtacattttatttgtttttatttatttgcactcgcttgcaattctttgtcctaccctaaagggcaggattctctgctgggataattgatttatttgactagtttaagtgagaataaaatctggttaggcgggcttagaaatgcacacttaaaaacggaatttataccataaaaaccaagggaattctagcaaaacgtttgcgatttccaagagaatcaggactttagtaaatttttgaacaactctacccgagtttgtgtctacaaatatcacacccacgaaataattagacttgaaatgatttacgtcattgtgtttttttccaatcttatcgtttttaaacatggtcagcttatacattaaacttaaacggattttacacatattgttgtcaacttattcgttatagacactggcattgaattcaaattacaaataataaattactttagaaataaacattgattttttgccataattctcgctcctgtatgtgtcgatttctctgtgcgtgtgtggcaggattgtcttatcacaaataaacatcactaaaaaacattcttatatctaaaattgattcgtcgattgttattacatggttagcttaacatttaaaataatttaattaaaagtacagttaagaataacatcgttttcgttttttatgttatattatcaaagttaaagtatgtgatctggtcaattataaaatatttttcatcctaatttgtgttgatttgttttgtttaaattaagaaattatcacaaaatgttttgttttaagatttcctctaaaattatttccaattagtcaagagttatgtaagcccaataaaaatagtcgatttttatggtttgtccaatggcaatcaccagtgatccatgtcacgaatacgctccactgggggattactgtagaaaaggaaattagaaattatattcaaaagtgtaattttttacacattatttcatgttttctatgtattattaatatttattccccccaataatgagaacgtgattttatgtaaaattgcgaacttacggcaacatccgcgccaaagcatgcttgtgcagcggggagatttgcacggctgccgaggcaatgctggatcctgaatcctgcgacatggtgcgctgcatatgatgcatgggatgctgcaccaccggaccgcccacaaactgcagctgctgctgatggtggtgctggtggtgctgatgatgctgctgcaacggatgctgatgcagtggatgcgaatgctgctgctgcgccatttgctgcgaccttcggaagggatatctccaaggactctttggtgcatccgactggaagcccttgttttcaactccaccgctgctggacactccggctggactatcgcgacgcggtgccgtgccaggttgcaagtcacgtgccttggagctgaggcggcgcaggatgcgggagcccagtccaggtggatcctctaagctgcgactgttgcgcggctttcgataacgcacatcactggactcctccagaatcacatggcgatcgtatggcgtgccgtagtatacctccagcacagtggagaaggtgtgcggccaaaccaagtcaataatggagatcagaactcccgcaataaagcagagaatgcctataccataaacgaaacatttcataagaaaaagtatctttaaaggcttaaaataatttaaactctctttaaatgttatatcttaaccccgttccgcataatatgaaatcaagtggatgccaattactcacctgccaccaagaccagccagtagcaccatccgaaatgaaactccaggcgtccgccttcgaggtgaatggacaaaggcctcttcgggagcaggcaatgatagcccaccgtggtgcagaccagcaaggcacctgtcaaagccttcatataggccccatatcggggtaccgctatcagcagcaggttcatcagcagccacgaggccagcgaggcccagagcattatgctcgcgaaatatcccgcagcccggtactgtccaccccacgagaatccctcacggcccaggctaaagtattcggcaacggtcaggatgggaaaggggagaccccgctggagggcgtgacgatagttggcactcatgtcattggctccctcccaggtgaagcgttcgttgtagtctatatccggcggtgtccagtttccaatgggaatcgctgttgacaaatgcaaagaaaagaaatatttgcacaacatgtagttttattattttaagtaaattaaagcaaaccaaataaaatattggtataattgcagagagaagggaatgaatatgaaattatttggtattcgaagtataaatcttttcaaatatatttaaacgcctacactttgccatatcttttcattaagtagcacaatgctaagtcaccaaggaaatcattttccaatatgcacttagacatgaccacttaacgaccactagacaatctatgtatacctgtgtacaaccatttgacagccagaaccttttattgcaatctgacaaatgccaactgccaacaccttcaaattgcactcaatcaaataaccttcgcagcaattacaggcagaaaactgacacaacaataagcaaaaatcaaataaacatttcctgttgcaggcggaaatgtctgctgcaattgcgcccaagcccgcggcacactgcgtatgcgtaatatgttgattttcatgccgctcctctcactcggccagcaattcattgtcaatggcttaaacgcgctaaccttacacaagcagactcaagtgagcggcttaaaagtgcaacaccaacaacgaagtcgcataatcaatgtgcaacaagtacacttttccgttttttttgttttttttttggctgtttgcacagtttattaagatttgtcaaaaatttttccggttagcagcgcacgcgcttttggcccgtttcgcattttgtttatttattttgcccactttttgaggagagtgagcgagataaatgcttaacaaatacgcaaaatcatttgcataatttatagacaactttgcacacctctcgtgcggccaaacaacttaaccatgtgattccgcattggttgattccattataaaatacaacaactgcaaccaaatatacactaagctatagaattgtgtgacgcatgggcatatacgaaacgaaatttgactaatgggcttttgtttggtattgttcgtgaatggtaaagaaactcaaatgtgatttcctttccaaaaactataaaacaataaaaggaacgaaatgcaaattaaagtttctgcccacccataatcgtaagaattggtgactttaaattctaaaagctctttaaacatttatgcaaaaaatcattaatcttaaattttttgctttgctttgaacagctaaaaggggtcttcgtcggcaagaaattaaaaatgatatatgattggtatggcatgcgaattatcaattgccacagtgtctggcaccggcttataaatatgcaaaacgatatataaaaatttataaaatctttcgactaaagtggtctaaaaagctgctcaacgttttttaattggcagctaacgaattaatatgcaaaaacaagaacaagcaaacaaagattatgttaatttacaaagctaagtaaaaaatgctttaacgaataaaattacaaataattccatacttatataatatgaaaagattatattgacctcggccttttaatacattatacatatatatttttttacatatatattttacatattgtgctcaaacaagtaaagttcttagtaattttatagttgtgagccgcacttccttgtttatttatttgttatttctttagacgtaagaaacgtaaaccagattatttatacaaatattcccacgctccatactattaaaagagtttacctaactgaatgactcaccagagagacctaagccggcaagcggtctaaatttatgaccaaaatttgctacccaccgccgaagtaagcttacaaattacaaactcagcgccacgagaaaaaaaaggaacataaattacataaatcgtcaaaagttgtcatataatatatgctttggggcttggccttcgacgcgggacaaggttttggcctgtcctccggttttcccctccacatcgcgattaaaactgcaccgaaaatggcaaccccgacctaagccaagtccgaaagacaacatgtctataagtctacgcaccgtctacgcacattgtgaatcgatggtggagtcattaaactgacaatcgttatgatttcccacttggtggtgaccggactgacttgtttcacctggggtctgttgaacgtggaaatgctgcaagttgaaccggttcaattcattttgaccatttgaaatggtaattgcagagcgcttttgatttaaatgtggtttatagtagcaccgatacagatctcgccaacgtggaagtaagagttgctggcttttaaatactacgaccaataaaatcacagattgggcaatgcggtaataaaatacttgagatcagatatgggaacaaactttttacgcagtcttataatatatgattttaaaactatactattctgtagatgcgagttttcctttcatcatttcatcatttatttagcagtatcattaaaccacttggatcattaacaacttacaatgccccattgttgttagcgcccagaacgaaaataagcttccgcaaacttctttaatggagccaaaacttgttgtattgaaaatgacgcgttaaaacaacaatagcaacattaacaaaaattaccatatctacatatacgaaattgacgttgccctacgagatacttgagacggatgacgatgatgttgggtagctcgcgcttaagtatgggcatccgtagcagcaacaaaaaatataaatatatgtaagcatttttatgccttttcataattttaagtgatgattatgctgattttcgtgtttacttttgtacacaacgtggacttgagagaagaggtggtgctgctggttgggactaaaaacaatttagcagcagtagctgcagttttaagaaaaacctaaattaatcatgacttaacaataggcaaaggcacacgacacacaagacacagcagaaagacaatgaataagctcaactggattttttttcttttcaaattgtttactcctcagccccatcaacttcaacagccgccatgtgtctgcaaaaaaaataaataaatgttccatttctgtcatgaactgtgaacgacgacgctcgagtgagtagcccatgtccatctatattaggaaataacaagaagtctctaaagccgatatagaaaatcaaatcactattaattttgtttatgaagagaatgggtttcgtatgcaaacatgtgctgtgagtgacaaaaaaaagggttagtgacatcttaataaaatttatagagattttgttggcccactatactcatttttatctagcttatttatttattctgcgttcttgtaggcctaccattttcccatattaattcaaataatacaataatgcataagtagctattaaccattcaatcgaacgttttcaatgagctatagagagccgagtgcattcagaattgaaacaaagctgctactaacaaagccaatcgtaattgcctgcaacacctggtacccttaatgccccacttcaattgccatctaagccggcaaataagttggctaaacgccgctgttaattgagcttgctgcacacacccacaacagacataaatgattgaagcatatacatacatatataaccataaatatgccgtaacctattcgagtcaaataaatgccagaccgcgactaagaaaaaactgcaactcaaatggaagtgcacaaaagtcataatgatatataattaagtgcacaagagtcaccgcagattggtccaaaaagtacaatgtataaaaaagcatgccacaagacaccaaaaagtgtaatcattattataaaaagatcatcatcattgggttatttgatgattggtccgaatcaaccactggtactcaagctttgacacccgaatttgacatttgtctgacttcgatttggcaatggaaaatgcttcagatcacaattgaaaaaccgcatgaaaagtgacttttagccatgctcataacgagtgcaacaattaagttgtcaggccaaagactaagccgtatattcaactaccactcaccaattgacatgcgcaattatcatattcaaaatcgaaatttataccaggaaaaaggcgtatggccaacaagaaatactctcgtaaagcagcagctgtcaacttggggctacatttgcccttttaccatccaacacagccgcccaccagcaacaatagggaatgaaaacatgtgaaacagttttggcaaacgtcattgacttagcatttgttgggggagcatgagttgggggcggtgtgggtggtgctggtcccgggaaaatgctaccgaaataacactcttacgattcagggaaaggggcaagcactccacaaatctgtattagtcaaaaccaatatggcaaccgacataatgcccacagccaacagttgaaggggcaaccgggcaaatatatattaatgcatacacatatgtgtacttctcagagtatctgtacacaacttttcgtttgcacttaacacttggaaaaatattactctaaattcgctagcaattcgttaaaaaataaaatttttttaatttcaaatttaccaaataataaataataaaaaaggtatttatgattgaacatatatttgaaaccacatatgatttcattgagattttaaagcttcagttgttttgaaagcaatagcttgacaaattataataaaatattccacagattgttattatatttccttaaaaattaactgaagtacataatcatgaaaccatatttatagcatctagagatattgccaaagtctaaaccctttataaatccaattaccctaccaccaaagccacaggcactgcaaatatttagatttctatgcaacaatcgtttgccctcgaagggcaacattaagtttaatctcccaatatggcaaacaaaaaattatagctaccggatcgaacaatttcaacctggcttgaattcaccgcattggcgcccggaccgttggcaagtggggtttaggatgtgataggattggatggctcggattattcgtgctcgagttgacttgaaactggcattccaattgattcagctggggtctaaggtagccacggctcaaacacaaaagcatttcaccttttcgatgagcccaagtagtgagtgagtgagtgagtaaaacgagcaaacaatcaaacaagccggcgaatatatgtttggatagatatgtatgtacatatatactacacataggtacctacctacgtacatacatacatatgtgtgcacagaggcctcctcaacgagcgtttgctattggaatcgaatatttccgcaggtgtcgagctgagcgcgagtcgagtggcatttcaatttgttgttgctgctgttggccactattgttgccaagaatcgtgacatgcaacttgacttggcacttggcaggagccaacaaacaaagcggcagcaacaaccgcatctgacgtcaccgcccacactgcgtttgatagccaaacaaaagcgaacggcaccaaaaaaaaattatcgcaaaaagatcaacgccaaagttttgaaatcaattagccagtagcctaagtcgagtcgagccctaaaactgcaactgctcgaaggaacgcaaaaccatgcagcgatttaattaaattttatatatacatccacattttacattttttctcaaaagctaaattactcaattgttcacgttgacgctcgctttttatctctcatcggggtttgcctcgaaaaatgggggcgtgcacggtgctgcctcaaaaactcaaaaatcaacaaacaaaacttgacgatcggggattattttgcctaaccattttaaaactcagttggacatgtgtacataaacatataacaaatttctacaacagctattcaatcaataatttagagaaagttcggaaaaagttgtaattaaaaacttgttgaacattaaatatatatgcaaaagattacgaaatttaaagaaacctgataacttgagttgccataatatattaaaataataaagggttctataacttcgatgttttaatggcaatctaaacgtcagaaaatcctcccccctatttatttatttgaatttttattcctataaataaagtgcagctatatttaccacaaaatttaaaaaccttcacagccgtacgagaatcgcatcggtgatgccgatataatcaaagatgacaacccattcacccatggcagaagtacctacttgttggcggattcgattggattggatcggatcggattgtattggatgggatgggattggattggcaaactcacccgtcagcgtcacattgacatgcatgaggccaatgtgggtgccgatgcgcgctgggagcttctcgcgtgagaaggctttgtatggcgcgatgatagttgcatgtgccacatgccacgcggatcccaggcgagtgactgttggataaagacgtggaacgttagcgtttcccaggttgttcattgttgttgattttaatgcaaatcaaatataatattgtgctgattgaaggtcacttctatactcacttaatatgactagacccacaaaaaggctcaatgtgactgtcgaaaacgttgtgaatttctgcgaacgggataatatttaagacaaattaaacttaatcaagctacaagacaaaatgcattcagagtttgcaacgctccaataaaacgaacaaataaatagagaccaatggacatgaaaaaagggcgcgcctatagaaaactggtttgcttttaactctctcattagaggtttatatatatatatatatatatatataagttaagaaccctcttcttgcgctcttcgtcaggactcaccagcgctcggctctcgtgttttcgggccccgtcagcaggcgactcggggcctgtctagtaacatgttcgtgtaagttacgaaccctcttcttgcgatcttcgtcaggactcaccagcgctcggctctcgtgttttcgggccccgtcagcaggcgactcggggcctgtctaggaacatgtttgtgtatgtgtgcattcggaacaagtgccgttggtcgcactcagggtgaggggtcaacgggggaagcggatataaaagcagcggggcgggagaagaggtcccagtctcgaacggacacataacggaaccgctagcagatcgcgaactgaatcttaaaataaagctaatcgtaaactcgaaccctcttaactatcttgactattatttggagaaccacagcattgttggttgtcatatcaaggtgaggtatgcggcaacgagtgccgagaaccctgattgcaagtggaacttgcgttaactggcgcccgaacagggaccggcaatgtccggccgataaaagtgatacgaaaaaattgtggaaatttgtgcgtaaaaatagtgggtggggtgcataagtcagattaagatctgaaatccataaatgaaaaagaagtgctgcgtgagctgtgtataaaatgataaaatagcaattacccgctgccggggggaactacgcccatcccggggcgcaacaaatattgcataattcaataaaaggtgtaaaatttctaaaataaaaatgtaaacctatgttgcgccaagacctaatttaaattaataaaacaacgacccgctaccggaggacgccacgtcgcccatgccgagcgcaaaagttgtacgatacctataacataattaaaacacgatcaacccactgcggcggtacggcttgtgggaaaattttttttttctctccttgccaattcgcgagtgcaaaagattgtgtataataaaccaataattaaccattgcagcagtttacctgcggcagtacgagtaatatgagcgcccagagtgataaggtggtgtgtggcagcttgttggatacgttaagtggtgtggaatgcacccaaaaaaaaccgcccaacaagttgtgtggcggccgtaccttagtaggcaaccagccaaaagggatactacggaaccaccgtgcccagtgccgaaataaattagaggtcatcaataaaaaactgtaacagcacgcacgcaaggaaaaaatattgcaaaatggaatagcgcacaaaaagaaatacaaaaaaaaactataaaaaaaataatataaaaaaatacagattataagaaataagaaataagaaatataaaaaaataaaaatataagtacacaaaatgtaccgtacccccacacactacgtagtcttagaacaaccttagacgaccaagatatttacgaattgtctttttgtaagcgcgatttctgcatgcggcgcaaatcccgctcactggactggctggggtcggcttggaaatgggtagctggatctccagatgctgctgattggaacgccgtcttggccgcgcaagcgacggcttcgaggaactgcaaaaactggaggaggctagctgtatccctcggctactgaagtaaccaacgagtggttaagcaagtcgacgatggaatgctcctcctgaccaacttcaacggaactctaagaacggctgcagagaactacgacctgatcggctcctttatcatccaattcgacaatgagacgataatggtcaacggtcaaaactatttccagttactcggtcagtcatctaatggcgatgccggccgtgttgagccacataacgggcagcaactttcaactttctctggaatacgtccacgacggtgagcatgaagaatttggaaaagatgtccaacatggcgagtgagctactagcctctcttctcaccgaggcggcactcgcaaatctgcatattcctaggcttttatttcctatggaagaagctgatgtccaccaaaggcatgccccgatgtccgcgagattgccgcaaacttagaagcattgggccaaaccgagctgaacaaggctcactaatctgcgggacgcagatcttgagggggggaggagttaagaaccctcttcttgcgctcttcgtcaggactcaccagcgctcggctctcgtgttttcgggccccgtcagcaggcgactcggggcctgtctagtaacatgttcgtgtaagttaccaaccctcttcttgcgatcttcgtcaggactcaccagcgctcggctctcgtgttttcgggccccgtcagcaggcgactcggggcctgtctaggaacatgtttgtgtatgtgtgcattcggaacaagtgccgttggtcgcactcagggtgaggggtcaacgggggaagcggatataaaagcagcggggcgggagaagaggtcccagtctcgaacggacacataacggaaccgctagcagatcgcgaactgaatcttaaaataaagctaatcgtaaactcgaaccctcttaactatcttgactattatttggagaaccacagcatgttggttgtcatatcaaggtgaggtatgcggcagcgagtgccgagaaccctgatgcaagtggaacttgcgttaacttatatctttatagtgacatattcataagtccctaagacttaagaacatgcctacatactaatacacacaacatgtacaccccaatacaacatacaccactccggatgtaccctgataccagataagaataagattgtatgattctcgagaatggaaaaaaaacccaattctagttaagtcacccactggtagactaaacatccgtcccctaatttaaacaattccctgcttaagccctcaccccatcgtcacgttcccacgttcaaagcttggactcgcaatcccgaaaaagaaaagtatcgatttcaataaacagagcaaatgcacttgaatccaagagaaacgcaaagctttttctcttcacgatcagaatactaatgtctaaagtccatattagaaaagctcgataccgaggcttgaacgtcaatcaaatcagaataattattcagagttcagtttgagacctaattgtaaaaggggcggtgttcttctcaaataaaaagttttataatcatttagtgaaataaatattatatgttttcacttataaatattgcaagaatttaattggcgcagtcggtaggatccaataaaataaaagagtccttttagtacggtactgatcaactgaaggatatgctataccgactagctgtccaagaacagcgaattaaaatagtgattcgtaaacattttagagatccgcaaaagattctacgtgaaagtaatattcaaaataaaatcccgtgcggtgggaaacaaaaattaattaaaattttttaattccgaaaaaaccaaacttaaacaaaatgtaaaccaagtttgaaacaaacttaaaactaaaaaccaaaaaaaaaaaaactcctgaaaataaaagacatcatggcagtcccgcaactctcagaacatctaagccaactactaaaccaaatcaaagaactgaattattatgatggcgcacctggcaaattatctggattcgttaaccaagtggaacaattgcttaatttgtacccaacacaggatgccagacaggcacatgtcatatatggagccttagaagtcgtaacccaggaaaaagctaacacagggctggacatgaagaaagctttggcaatggcattcaaagaccatagaccttatgtaacactcatcagacaattagaagacacatcatacccaggaagtatctgtaagtttatagaaaaactagaatcacaatactggattatgttcgataagttagaattagaaagtgaccccgttgatgaatcgaattataccgaaatgttaaacaaaacagttaaatcagtaatatatcgaaaactgccggatagaatttatatgtcattggcacgaaacggtattggcaccatttataaattaatacaagcatcaatggaactaggcctttatgatgctattccagaaaatcaccattctaatagaacagaaatgaacaaacgtagggaacagggggaacaataatcaaaataataatcaaaaatattacaataatagaaatcacaactaccagtaattattaacttaagcaggaatcagattcataatacacaaccacctcaaaattcgactcaacctatgacaaatcaaaaccagtattccccgcgtttcataccgaataatcatattattatgattattattattatgcatttagacgagacttaacacaagctcagcagaacaacccacttaacttccaaccttcgacatcaaataatattaacagacaaggggccagtaaaaagacaacgcgagagtcagagtgaccaaagcaggatggatgtaaattttcaccaagctgtctcggaaactcaaatgatagaaaaggacgcacaagtccctatgtaaaaataagtcactataataaatattacaaatgaatgatccgatacaggatcataaattaatatcataagagaaaatatcgagaatttagaagaaaaggaagaaaacctaacagtgtatactgttaaggaaccaataacactaaagaaaagtataataataaaaaatacctcagtatggtccgtctgcttaaaaattctatattcacaaattttctgatttcctgttaggtcgaaagaatctagaagatacaaaagctaaaaacgaaatagtggggaactctagcctcaaaagtagttaaatatctctatgaagaaaagaatggcgagaccgcatccaaatgccttgacccacaacaaaagaatgattccgctccagtggacagaatcaaaccaaaaatgcaaaaggttaagaaccttaaactaaagaatcaacagcagaagaaggagactgcattaccaaagtgcctcattttaaatgttggtaaagacacagtggacaatgatgtaacagatctcgatcccatgtcctttgacaacgagttacgcgaatgtaacgagtatagactcgaacacttaaatgtagaggaagttgaatgtttaaagaaggtcctatacgaatataaaaacattcagtacaaagagggcgaaaatttgaccttcaccagtactattaaacatgtcatccagactcaacacgaagacccagtataccctacaagtacccccaaagcgttgaccaagaagtcaacaaacaaattaaagaaatgatagaacaagggattgttcgcaaatcgaagtccccttactgttctcctatttgggtggtccccaagaaggcagacgcctctgggaaacaaaaattcaggttgattacaggaatctaaatgagataactgttaacgataaatttcccattccccgaattgatgagatactggataaattaggtagatgccaatactttacaaccatagatctagctaaggatgttcatcaaatccagatggatggaaattctattgcaaaaacagctttttcaactaagcatgggcattatgaatattcctcgtatgccttttggtttaaaaaacgctccagctacttttcagagatgcatgaataatgttctggaagatttaatctacaaagactgtttagtctatttagccgatattattgtttattccacttcattggaagaacccattttatccctaaagaaagtctttgaaaaactgagagacgctaatttaaagttgcaactagataaatgtgaattcatgaagaaagaaactgaattcctaggacacatcgtcccaacaaatggcatcaaaccaaatccaaataaaactaaagcaattacaaattttccattacccaagacccctaagcaaataaaatcatttttgggattacgcggattctatcgcaagtttattcctaactttgccaaaatagttaaacccatgaccctcaaattaaagaaaggtgctataatagacaccaaatgtaaagaatacatcgaatcatttgaaaaattaaaagttttgataacttcagacccgatattaatctatcctgatttttctaaataaataaataaaaataaactaaataaaaaatctgaaagcgaaagagaccgctctatgcgatgcaagatcgcttaaatacatagtgaattgttatcttaaataataccactatgagtcagaatgacactcgcgcccagcgtcagcgcgagcatgacgaacgcccgactctcaattcagcgcaacaacggcgtacttctccctacgtctcaccgacaatcccaaacgcagacatcgagcggtcaataacccatagcccaggaaaccttcttctaccaacaaatcaagaaagagcgcgctcctgctctcccgctctattggctccgacagaagccccgctacctccaacaacaacagctggagagggaccggcagcccgctctgcctcgtcatcggctgcacccgctcacggtctgactaagtcagcgaaagcaaaaccgctagcaataaacggtactgctgcactgccagcaaaacaaaacgaaaacgtaaacaaaaaagctgggtcgacctggcagactggaatggaccgctacattacaataaagcgaaagctcagcccagaaaattcagatttgggaaacaagccgaaaaatacacgcgataactctaccttgatcaaaaatgtagcccctgcaaataccaacagatttgccttgctggtagataccgctgagggcacgtgccgctgggatcccgttgatatcgaaccgaagaaaacaaagcctccgccaatatacatccgcgagaagagcacaagccgtcttgtaaatactttgattggccttattgggaaagatagtgtaataattgtaatgcatttttgtgttctttatattacttttattgaaatagagattcagtatgatatcagtaaaattgtaacttctgttaagactcattaatattcaattaggacatgttgaaggctctttgacgactcctttacgactgccttgtacttggtctagaagagtccaagctagccaaatgcaatccgtctgcgccggcagagaggccgtcggcagagacgttgctttgctcttatgtacttaactttggcagcgagagcgccgctgtctaagagagtcatgtggacataaagatcgagcagtcgcgcatgctaattatgctgactctgcacttctggtctgaatagcattcttgtgtggtcagattgctgagcactcaagatatgcctgggaactgaaaagtcttacataaacattgttgcaaaagtgctacaatgtgattgttcccaatgttctgatttgatacagtgcttattcgatatgtgtgcacattacatctccctccttttggaaaataacgtaattttatgaagttattttataattaaaaattttatatatatattaagaaccctcttcttgcgctcttcgtcaggactcaccagcgctcggctctcgtgttttcgggccccgtcagcaggcgactcggggcctgtctagtaacatgttcgtgtaagttacgaaccctcttcttgcgatcttcgtcaggactcaccagcgctcggctctcgtgttttcgggccccgtcagcaggcgactcggggcctgtctaggaacatgtttgtgtatgtgtgcattcggaacaagtgccgttggtcgcactcagggtgaggggtcaacgggggaagcggatataaaagcagcggggcgggagaagaggtcccagtctcgaacggacacataacggaaccgctagcagatcgcgaactgaatcttaaaataaagctaatcgtaaactcgaaccctcttaactatcttgactattatttggagaaccacagcatgttggttgtcatatcaaggtgaggtatgcggcagcgagtgccgagaaccctgatgcaagtggaacttgcgttaacttatatatatatattgctttaagatttatctgacttctgttggaaacgtgccggcgattacgacgatgccaagtagttggcacaattcaattaaacagaccagctggcaacagcgtgagaaaattgattccagtctgactagtacacgatacggtaataaatactcaataacgtggcatttttaaagtaatataaattgattaatttgaaccaacgagctttcttgacttttattaccaatattttacgtcaaattaagttagtcagatattaaatgcaatcttgaaatatgagccttattattaaatgtcttctatgggctctatactcacctgttttctgacacccggaaagatgactaaaaatgctacatagaatgtggcaaatagcactgagacggctacgattgagacatctccggttacgggtgttcgatttgagaaggaatatagcgttggtcccccatcgtctcgaaacgcgtcgaaccagcctttcatgctggttgctgttgctgatgtcggggttttgggatctatgcgagccaaaaaaattgagatattatataaaaagtattgcggcaaaaaacgccaaaattaatatgacggatatatctgcgtggagtatttggcaagagcacttaatttaaaagatttgcattgcaaaatcatgcgaaactcggcacaactgatctcatcgcatctggcagataccacgtatctgcaattcgtgactaagcttttaggtagcagatactttagattcaagtggcaggcatctcaatgcaaaattagtttggtaaacagacaaatatatgcaaatatttttgttaagttcattgggtatttaagagtatcacccggaaatgtaaaatgtataaaagttaagtaatctacacggggaacgacataatgttcttttagaaacagaaacaacccaaattgatttgaccgctctacaataatgtttgcaaagttaacaaaccagaaatgagacctagagccggatctaaagacaaacaaattaccaataaaacgctacgtcgaaatctttagatgccatgtggggggcttgaacaattaagaaaccaaaatagcaactgaaaccggcgagaaaccatcatcagcttcgattgttgatttctgcttctgaagcaatgacgtaggcaaaagttataattaagtgtcgataaaattgaatggatttaacacaatggctgcacggtcgtagcgattttataaataccctggcaaaaatgaaaaacatatgctaatggcaatcgagggaggaactcatgtattacgtataattcagtatatgttatcttggtaaatgaataaataaatacaaaattattaatctaaggaaaaatacccaagaatgtattactactttttcactaataaaataatgatttgatgacctgtaccatttgtagtctgtgtatatttttgactttaatggcccacagtatttcatcttcatatttgataaataataacctgtgttgctgaatttaatacttaaccccccacacaaacacacatctcttgattgaaggagtatggaaattgcgcatacgcaacgtgttacgtgcttaggcacgcggatgtaggtatcttatacagacattaagcttgccctcagtatgcttcaactgggttttcccactcagcacgagttctgacttgtgaaagttgagtggctcgagggtaaaccaacacgaggaataagaaagagaattatactcagatcgctggcttaaggctatgaagttggccagttccgcaatgattctattgttcctatttttaaatttgtttgcaaaccattatttcttcattagccggcgtttattgcggcaacaagtcatctaacatttattttatcattcagtctcattcatcaagtcttaaagttcacttaccaaacttgtcaagaagaaaccggcatacaaaataattgttattaacttttcgtgttcactttgttatttttttttatttttgtataatccaattttgatgtccaatttatagcttcgagttagccgttaagacgtatctaaacaatcaagaaatttgcatttatgattaatgaattaaataatatagacaggcacaaattttacacacacatcggttatgcttgttgaaatattttgccgaaaatattcttgttttcacagctgtgaacatgtattcaattatttgattttaaacggtttgatttattcgagataaatttattagagttatttttgaactacatgttcattaggattttttatacattgcacttagtagatttattgctgagttatataacgaagcttttgttttattatatagatgtaatttatagatttcaaataaatacatttggttaaattataattttttttgtcgaattcaccactgccgtaataaataaatgtttagaatttattaaagaaattatcctttgtttaacttctattaattaattccgtatatttaagaaaaatgttttccttgcagttgcaatttgctgttgctgactgcacccccattgagtcaatggttctttttccattttttttcattgctgctgctgctgctggcagtcaaccggtttaactagtcaagtccgccgccgccgccagactttgcacataaattgcattttattttaaaaacccggtaataaattgtttcatttataattagaatttttgccaagctgacagtccgtgaaatcatgtttgaaggtgcgaataccaaacatactcgtatgaaactccacttgcgggagttctcaactattttgttatggattcgatatcgttgtggttgttggtgctgcccctctggttgaccttcgcatatttttcggacaggaatttgtaagtcgctacgattcgcgtcagtttattggctcaattgcctgcaaaaacaatgaacgtcgacgtcggcgatggacttggcaccaaaacgtaaggtgcgacgcatcgcatgtggaaatcttcgagcacattacgttattacgttataagcgcaaaacaaaagcgacaaccagcaacaatcggac

SEQ ID NO: 29060 - DNA, 1602 bp, DROSOPHILA
tttagatacgtcttaacggctaactcgaagctataaattggacatcaaaattggattatacaaaaataaaaaaaaataacaaagtgaacacgaaaagttaataacaattattttgtatgccggtttcttcttgacaagtttgatcccaaaaccccgacatcagcaacagcaaccagcatgaaaggctggttcgacgcgtttcgagacgatgggggaccaacgctatattccttctcaaatcgaacacccgtaaccggagatgtctcaatcgtagccgtctcagtgctatttgccacattctatgtagcatttttagtcatctttccgggtgtcagaaaacagaaattcacaacgttttcgacagtcacattgagcctttttgtgggtctagtcatattaatcactcgcctgggatccgcgtggcatgtggcacatgcaactatcatcgcgccatacaaagccttctcacgcgagaagctcccagcgcgcatcggcacccacattggcctcatgcatgtcaatgtgacgctgacggcgattcccattggaaactggacaccgccggatatagactacaacgaacgcttcacctgggagggagccaatgacatgagtgccaactatcgtcacgccctccagcggggtctcccctttcccatcctgaccgttgccgaatactttagcctgggccgtgagggattctcgtggggtggacagtaccgggctgcgggatatttcgcgagcataatgctctgggcctcgctggcctcgtggctgctgatgaacctgctgctgatagcggtaccccgatatggggcctatatgaaggctttgacaggtgccttgctggtctgcaccacggtgggctatcattgcctgctcccgaagaggcctttgtccattcacctcgaaggcggacgcctggagtttcatttcggatggtgctactggctggtcttggtggcaggcattctctgctttattgcgggagttctgatctccattattgacttggtttggccgcacaccttctccactgtgctggaggtatactacggcacgccatacgatcgccatgtgattctggaggagtccagtgatgtgcgttatcgaaagccgcgcaacagtcgcagcttagaggatccacctggactgggctcccgcatcctgcgccgcctcagctccaaggcacgtgacttgcaacctggcacggcaccgcgtcgcgatagtccagccggagtgtccagcagcggtggagttgaaaacaagggcttccagtcggatgcaccaaagagtccttggagatatcccttccgaaggtcgcagcaaatggcgcagcagcagcattcgcatccactgcatcagcatccgttgcagcagcatcatcagcaccaccagcaccaccatcagcagcagctgcagtttgtgggcggtccggtggtgcagcatcccatgcatcatatgcagcgcaccatgtcgcaggattcaggatccagcattgcctcggcagccgtgcaaatctccccgctgcacaagcatgctttggcgcggatgttgcctaatcccccagtggagcgtattcgtgacatggatcactggtga

SEQ ID NO: 29061 - protein, 363 aa, DROSOPHILA; identical to SEQ ID NO: 8904

SEQ ID NO: 29062 - DNA, 3331 bp, DROSOPHILA
aatgtttctgctgcttataacatataaatctttgtaactttattctaggatagtaacaactcttagcggtccgttcgaaatgactgctgaaaatggctaaaatacaaaaccatgaagtgtaatatatataatgtgaatttttgtaaatgttactgttatatttatctgcccgaataccaatgacttagttatgataagcacaaatctgggttgaaaaacataaggtgtgcttatggttgaggtaagattctaatttacttatttagttgtagttttttagctttgacgtttaatcgccaaaaatattttttattccaataaaaatgtatcgaagaacacgaacacatacatattttacagtatgtagattttagtgagaacaacatataaagcaattcagttttgatttcaaattgtttcaaaacaaaggaaaacacttatctcaagtacatgattatcggtttgcgacgaaaccttttgtgcttccggtgttcgtgtcttccttttctcgtgtgcttcgttggaagaggttagtgagcggtaaatgatctttggaaatctaatatgtttcatgtttatagaagtttatattatcttaccaagtttctgttttgtgctgtgatgttagcatatattttatttatttgttttatttttcaggagtcgaaatgggccgacgaccagctagatggtaagcaaatcagtaattttgtatgaactgtccgtttagtaaaactcttatttcatcctccagctaccgctattgcaaaaataagccgtaccctaaatctcggttttgccgtggtgtccctgatccaaaaattcgtatatttgatttgggaagaaaaaaagctacagttgaggattttcccctgtgtgttcatttggtttctgatgaatacgaacagctgagtagtgaagctttggaagctggacgcatttgttgcaacaagtacttggtgaagtactgcggtaaggaccagttccacatcagaatgcgcctgcatccattccacgtcattcgcatcaacaaaatgttgtcgtgcgctggagctgataggtaaataatatttcatatctgtgttaactactgtattcttatgacctcttttgcactaggcttcaaactggaatgcgaggagcgtttggaaaaccgcagggcacggttgctcgagttcgtattggtcaacccattatgtctgtccgctctagcgatcgttacaaggctcaagttattgaagctttgcggcgtgctaagtttaagttccctggacgtcaaaaggcaagtatagcgagtcacttacaatagtatttaacccaatagtatattaacccattttttcaaacatcgaagtctgaacaaaccacatggaaaattagtaatcgcttttatttcatgtcatgggcgaggctattctaatatcgccacagttaatttgttgggaatgagctaaaaataatattactagcgaacctaaatcaatatctaaagaactttaaaatagtattataaattatttataactatatacctcatttaaaagaaaaaagtgttgaatcttaaacttcttattttcgttcaaattggtgacaagattttgggtaacacgtcgaaatcggcgttaactaaggcaaagattttatgattgctagtgtaacccgcaagaccctcgacaaaaatttaatgcatttcgctagggataaaaaggagaaatgtggaatcttccgcgcttgtcgagcatacgcttaggtctttgttgcaagctgataaccactcgatacttcctactatttttcttaacttaattatttccgtttccgctaaactctcctagtaggtataaaaaaagcattaaaggatgtttattctttagtccgttagcggtcatttggtaagactacgactatggttcgtgcaggtaaagaattttgaagacggttttggaaaatcgtattttggtccattaggtacatttgtttaaatttttaagcttcggtgcgcacgaacttaagatggtttacagaaattacgaaaaactaagaaaacagattttgtaaaacaatgtttttcttaaatatatttttagatctatgtttcaaagaagtggggattcaccaaatacgaacgtgagcgttatgaagaacttcgcgatgacaaccgccttgagcctgatggttgcaatgtgaaataccgcccagagcatggcccgattgccgcatgggaaaaagctcagcgtgatgtttatgcttaataacacattgaaataaaatgtcacttaaagtttcgtaactcagaaacaatatacaaaattaccatttcctgagcacatatatatatgcgttgctttttggtaggaagctcagaatgccctttgtattgttttaactttattatttcgcagcagcagatttgctttcgtagaaagaaaaaaagaaagattgttttaagcgtgtagaaaaggttaattagattaaaagcaaattgaaggtaatacgggtccgactagaatgggtactccttttctcgtttttattgcgtttctatatacataattatatacaattttatacatctttttacaatctcaagcaacaacacgattgtaggtattctctgtcgattcggaaacattttattacccagtaatttggaatttattttttgagtctctaatttctttggaaaccaattaaccaaagacagtttcaaaatatacgagcgtgatctacatttcaaaacgggcgctctaaaagtatccaacttaaattgtatttgaagaatacccacataatgttgcaatataaattcctatttgatttcatgcctcttcaaacaagcacaaacattgtaatatagtggaacgtgtgtgggctcgtatcaagctctgtattaaattcgggcggagatattaaagcgtgcctagcaaaagctgcatccgcactcaagcttcgctgacgccatttctttcactgttcgctgaaggcaaagctaactggctggacttttattctatgttcacgacgataatagatagccattctggccttatcgatggtagcatcataaggaagccgccgacctttgggaatccagttaggcgatctggccgttaatgtagtaccgtttcgctccggaattatcaaatggccaaaattatgtcgaatgacccaaggcggagaggattggtaatatggcggtgagcatgaaatgcaaatcagatcagaaatggcagctgagtttgaaagtttagtctcgcgcaaagatatttatttatagatttgtcctgtccctaaaatgaccgttgtggcaatataaaattgctgtacttca

SEQ ID NO: 29063 - DNA, 467 bp, DROSOPHILA
cctgcatccattccacgtcattcgcatcaacaaaatgttgtcgtgcgctggagctgataggcttcaaactggaatgcgaggagcgtttggaaaaccgcagggcacggttgctcgagttcgtattggtcaacccattatgtctgtccgctctagcgatcgttacaaggctcaagttattgaagctttgcggcgtgctaagtttaagttccctggacgtcaaaagatctatgtttcaaagaagtggggattcaccaaatacgaacgtgagcgttatgaagaacttcgcgatgacaaccgccttgagcctgatggttgcaatgtgaaataccgcccagagcatggcccgattgccgcatgggaaaaagctcagcgtgatgtttatgcttaataacacattgaaataaaatgtcacttaaagtttcgtaactcagaaacaatatacaaaattaccatttcctgagcacata

SEQ ID NO: 29064 - protein, 117 aa, DROSOPHILA
MLSCAGADRLQTGMRGAFGKPQGTVARVRIGQPIMSVRSSDRYKAQVIEALRRAKFKFPGRQKIYVSKKWGFTKYERERYEELRDDNRLEPDGCNVKYRPEHGPIAAWEKAQRDVYA

SEQ ID NO: 29065 - DNA, 3673 bp, DROSOPHILA
taagaacaatagacctgatttcaaattcacaaagtgaattagtcgataggccaattggaagagactactattactgtctgttttctgtctgtctgtaaattacagaaaaattaataaaaaatctttgatatccaattctgtaagctgccttcgaaatgttcagttaaaagactagaccattccagccttttgccgattatgttactacgtaaaatatctggtgtgcctcagaaaatactctcattcctactttggatatccaaaacgagattggccacctagtctgattcggattatctgagtttgggtctataataaatgaagcaatacaattgtaagctcaatgtttctgctgcttataacatataaatctttgtaactttattctaggatagtaacaactcttagcggtccgttcgaaatgactgctgaaaatggctaaaatacaaaaccatgaagtgtaatatatataatgtgaatttttgtaaatgttactgttatatttatctgcccgaataccaatgacttagttatgataagcacaaatctgggttgaaaaacataaggtgtgcttatggttgaggtaagattctaatttacttatttagttgtagttttttagctttgacgtttaatcgccaaaaatattttttattccaataaaaatgtatcgaagaacacgaacacatacatattttacagtatgtagattttagtgagaacaacatataaagcaattcagttttgatttcaaattgtttcaaaacaaaggaaaacacttatctcaagtacatgattatcggtttgcgacgaaaccttttgtgcttccggtgttcgtgtcttccttttctcgtgtgcttcgttggaagaggttagtgagcggtaaatgatctttggaaatctaatatgtttcatgtttatagaagtttatattatcttaccaagtttctgttttgtgctgtgatgttagcatatattttatttatttgttttatttttcaggagtcgaaatgggccgacgaccagctagatggtaagcaaatcagtaattttgtatgaactgtccgtttagtaaaactcttatttcatcctccagctaccgctattgcaaaaataagccgtaccctaaatctcggttttgccgtggtgtccctgatccaaaaattcgtatatttgatttgggaagaaaaaaagctacagttgaggattttcccctgtgtgttcatttggtttctgatgaatacgaacagctgagtagtgaagctttggaagctggacgcatttgttgcaacaagtacttggtgaagtactgcggtaaggaccagttccacatcagaatgcgcctgcatccattccacgtcattcgcatcaacaaaatgttgtcgtgcgctggagctgataggtaaataatatttcatatctgtgttaactactgtattcttatgacctcttttgcactaggcttcaaactggaatgcgaggagcgtttggaaaaccgcagggcacggttgctcgagttcgtattggtcaacccattatgtctgtccgctctagcgatcgttacaaggctcaagttattgaagctttgcggcgtgctaagtttaagttccctggacgtcaaaaggcaagtatagcgagtcacttacaatagtatttaacccaatagtatattaacccattttttcaaacatcgaagtctgaacaaaccacatggaaaattagtaatcgcttttatttcatgtcatgggcgaggctattctaatatcgccacagttaatttgttgggaatgagctaaaaataatattactagcgaacctaaatcaatatctaaagaactttaaaatagtattataaattatttataactatatacctcatttaaaagaaaaaagtgttgaatcttaaacttcttattttcgttcaaattggtgacaagattttgggtaacacgtcgaaatcggcgttaactaaggcaaagattttatgattgctagtgtaacccgcaagaccctcgacaaaaatttaatgcatttcgctagggataaaaaggagaaatgtggaatcttccgcgcttgtcgagcatacgcttaggtctttgttgcaagctgataaccactcgatacttcctactatttttcttaacttaattatttccgtttccgctaaactctcctagtaggtataaaaaaagcattaaaggatgtttattctttagtccgttagcggtcatttggtaagactacgactatggttcgtgcaggtaaagaattttgaagacggttttggaaaatcgtattttggtccattaggtacatttgtttaaatttttaagcttcggtgcgcacgaacttaagatggtttacagaaattacgaaaaactaagaaaacagattttgtaaaacaatgtttttcttaaatatatttttagatctatgtttcaaagaagtggggattcaccaaatacgaacgtgagcgttatgaagaacttcgcgatgacaaccgccttgagcctgatggttgcaatgtgaaataccgcccagagcatggcccgattgccgcatgggaaaaagctcagcgtgatgtttatgcttaataacacattgaaataaaatgtcacttaaagtttcgtaactcagaaacaatatacaaaattaccatttcctgagcacatatatatatgcgttgctttttggtaggaagctcagaatgccctttgtattgttttaactttattatttcgcagcagcagatttgctttcgtagaaagaaaaaaagaaagattgttttaagcgtgtagaaaaggttaattagattaaaagcaaattgaaggtaatacgggtccgactagaatgggtactccttttctcgtttttattgcgtttctatatacataattatatacaattttatacatctttttacaatctcaagcaacaacacgattgtaggtattctctgtcgattcggaaacattttattacccagtaatttggaatttattttttgagtctctaatttctttggaaaccaattaaccaaagacagtttcaaaatatacgagcgtgatctacatttcaaaacgggcgctctaaaagtatccaacttaaattgtatttgaagaatacccacataatgttgcaatataaattcctatttgatttcatgcctcttcaaacaagcacaaacattgtaatatagtggaacgtgtgtgggctcgtatcaagctctgtattaaattcgggcggagatattaaagcgtgcctagcaaaagctgcatccgcactcaagcttcgctgacgccatttctttcactgttcgctgaaggcaaagctaactggctggacttttattctatgttcacgacgataatagatagccattctggccttatcgatggtagcatcataaggaagccgccgacctttgggaatccagttaggcgatctggccgttaatgtagtaccgtttcgctccggaattatcaaatggccaaaattatgtcgaatgacccaaggcggagaggattggtaatatggcggtgagcatgaaatgcaaatcagatcagaaatggcagctgagtttgaaagtttagtctcgcgcaaagatatttatttatagatttgtcctgtccctaaaatgaccgttgtggcaatataaaattgctgtacttca

SEQ ID NO: 29066 - DNA, 665 bp, DROSOPHILA
aggagtcgaaatgggccgacgaccagctagatgctaccgctattgcaaaaataagccgtaccctaaatctcggttttgccgtggtgtccctgatccaaaaattcgtatatttgatttgggaagaaaaaaagctacagttgaggattttcccctgtgtgttcatttggtttctgatgaatacgaacagctgagtagtgaagctttggaagctggacgcatttgttgcaacaaaatgttgtcgtgcgctggagctgataggcttcaaactggaatgcgaggagcgtttggaaaaccgcagggcacggttgctcgagttcgtattggtcaacccattatgtctgtccgctctagcgatcgttacaaggctcaagttattgaagctttgcggcgtgctaagtttaagttccctggacgtcaaaagatctatgtttcaaagaagtggggattcaccaaatacgaacgtgagcgttatgaagaacttcgcgatgacaaccgccttgagcctgatggttgcaatgtgaaataccgcccagagcatggcccgattgccgcatgggaaaaagctcagcgtgatgtttatgcttaataacacattgaaataaaatgtcacttaaagtttcgtaactcagaaacaatatacaaaattaccatttcctgagcacata

SEQ ID NO: 29067 - protein, 191 aa, DROSOPHILA
MGRRPARCYRYCKNKPYPKSRFCRGVPDPKIRIFDLGRKKATVEDFPLCVHLVSDEYEQLSSEALEAGRICCNKMLSCAGADRLQTGMRGAFGKPQGTVARVRIGQPIMSVRSSDRYKAQVIEALRRAKFKFPGRQKIYVSKKWGFTKYERERYEELRDDNRLEPDGCNVKYRPEHGPIAAWEKAQRDVYA

SEQ ID NO: 29068 - DNA, 4191 bp, DROSOPHILA
cttcaagcgcctcggcccgattgcaatattctcggcgagacgccactggacagcgcccagatgtgtgcgtctccagaaaggttcctccctgtatcacagcgtgcccagcaatgacaacaagtgcccattggataacgatgatgacgaggagcacgatggtggatacaatctgtacaaggaggagtttgagaactttggcttccatgtgcgcggcgatgctccggtgatcattgcccacgttgagattaattctttggcagacgtaagtaaatgctacttccatcgattcgtcgtatactgtaggcattattttcagcttggcggcatcaaggagggagacttcatagtcgagatagccggcgtggacgtgaagtggtactcccatcagcaggtggtgcagctcatacaatcctgcggctctacactcgagctgagagtgataacgcccatggatcgcaactacttgaaggtgcattttgtttattaatcatacgtaaaaaatcagcaaacaaattcaccttgtttacgcacagccattgtcgtcgaagggctcattatcaacgctatcggcggccagttcatcgggcatttcatccggatttcccagtcccacaagtattgcggccaagcccaagctccacctgaaaacatcctctagttcgcgacccgctggcagcgtttcatccagttcgtggaatccgtttcggcgaacgcctagcttagctaaaatattttaagtagccatcagttttattttgtgttttatttttttgctcttaaggcaatggccatttcaagttaaaaagaatgttgtgcagtttaagttaagcaataaacttaatgattttttaaaagcccctctattatacccataatttattttattcctattgattcaatcgctcccaatcacccatcgataataatctacacggaaaatgaattgaaataaatgtttttaatgttttatcgaatttaaaatatatatttatacaatttttgacatctacatttgaattaaatcattacgatccaatgatttcgaaatttcagttttttatgctggagtcgtagggtatcgcggactttttgaaatagtttgggatccaatccacttctgttttgcgaatcctcaaattacaattataaccgaatgctaacaatttatgttaattaatcacaccaacgactattgcccaacgagtttaagaatattgttgatttaactggaggatactgctatatgattacttcgcacgctttccatacacatttgaacataggttcttcttatcggggtgatgtctttatgcgttcgcagattgctatgcatagaacagccacaatatccacacaacggccaaatacgaaaacagcttggacagggtctgttcatcctcgtattgccttgttccccgattagcagctaaatacatgggcaaatgttatttaatatcaatctcagaactattgagatggcatgtaacctaccaggtggacgtggttcgccaaagttgagcgtagatgttatgaacccgaaaggaaaagctccaataccgaaagacatgtgaaatccgtcgccgaatccgaatccagggaacccgggaacaggatctggttctgtacgttgtccagcggggcgtggtggaactttgttactgcaaaacacatataagttgggttattgaaaaatactcatgttgaaagcggttcaaacctaccgtggatcttcctggtgtgtactatttcttccgtacagcggtatgaccttatccttatcaacggcagccttacaaacgggacagagtttgcgattgggacgcgtcaggagccactgatgcaggcacggccagcagaacagatggccgcacatgctgaccacagcatccttggcggtgtccaggcatatgttgcactcgtagagtgagtcgtctgcggtatgttccttctccttgtccttttcgttggcttttgtgtccgtatcggtgccgccgaatggatagccacccttcagatcggccttattgccaccagatagatagtctccagtaaaggaatacgaagtgttggacttcttcagttccgatgccgtcgaattggttggaatcgaggtacccagcgggcgcaattgacttgtagatgactcctcagccaagggttctgtgatatcccgagtccaggctatcttgtcgtagctcacgttgttggacaaagtcgatgaggacgacgatgccccggttgatgtgctgggaagctccgctgtgggtacacttttcggttcctccatggtttgcccaagatgcgggtaaagttttagtcgttcaagctgcaacgtaacgttggatgatttagaaacccaaatttgctaagtaagtctgtgttcaccctattgacaagtgcctagattgcttagatgattttcctaggccatttctggtgtacaactaaggtccgcactttcttgaatatgacttaatttaattaaatacttcaagcgcagtttgaagggggtttcccccgagttccgcagcattcagcatttgtccgaccccatggggtggtgtttatggctacgaaaaccgcccaaagggcgtatttaccaccaagtcttcaaggataatgcaccgaacattcccattggctgcacccacataaattaaacaaaaaagtcaaattttgtttgaattgcgttggcaaacaagacggtatacctgcatatgtacctggacttatgtgcgtacttatgtacacatctacacactcaaacactcgcgtgtatatagggctagaaggtttccatctacctgttacatatgtacattggaaccgattatatgcttatttatacagtacgtatagatgtcaaagatgtcacatgatgttttcatggagcacttcctattggagtcaaggggaattatatgctcatatacatcgagttccagggattgcgtttaaacgcattataacttaattaaactatatataacttcctggggcacagcaaatagtataacttctcgaaattacatacattgtaagtgtattgtttgcaaaacctgacttgtttgccctcattttattgtttgttttcgctcacagtttgcttctacttgccgtgctaagtattgttaaaccgaatcagagaatgttgctaaattgattgtgtggacaagtgtgttatgttacggtaaaattgggaatttatcaattgacgtcttagcacctcaaaacaactgcactgacgatacctgaccgaggccgatagacctttaccctatcggtaaatagctgcctgtataacagcccgtctccaccggaccaaagtccacgctcgcgttcgataactatcgagttaggtgaaaaatctcggatctcaatgaatcatttgaaaagtgatcagtgatcagtcctcgattgatttgtaaacaaaataaactactaaatacatttacaagactaaatactattcattaacagctgttgtgtgccatggacaatcgataccaggactcactcgactatctctagttcctaacgatctggtcacaacaaagctcaagaatttaataatattgatattagactaaaccaaaacaaggaacagctgatttttagaacgctaatgcgtttaagtcgtaatcgatagctcacccactgtacactgtacaccatccctaattagaactggcttctttcaaaacaaagcaaacgaaatttgaaactttttcaatttatatgttccattggtgactctggttgcaatgagctgctttggctgcggtcgcaaatatggcctattctgcaaggaggcaagtgccatcaaaccaaagcaaaccaacatatatcacctacttacattgtgttaaatccgaaattttagtatggatgccccaactgcggctactcattctgctccaagtgcttgaagagaccaatgcccgtgccccgtcatgcaggaaaggtgcacaatgtgtgcctcatatgctacgacaaactatccaaactccaggcgagcgccgatgccgagaaagttatagactgtgatgctttgccggggatcttagtcaccaaaatgaacctggctcctccatccaaaagttcagatggcgccgatgccctattcaagtaagtaaaataccacattaaaacaccgattctgaaactataattcgattaattgcagcgaca

SEQ ID NO: 29069 - DNA, 1356 bp, DROSOPHILA
ccgtaacataacacacttgtccacacaatcaatttagcaacattctctgattcggtttaacaatacttagcacggcaagtagaagcaaactgtgagcgaaaacaaacaataaaatgagggcaaacaagtcaggttttgcaaacaatacacttacaatcttgaacgactaaaactttacccgcatcttgggcaaaccatggaggaaccgaaaagtgtacccacagcggagcttcccagcacatcaaccggggcatcgtcgtcctcatcgactttgtccaacaacgtgagctacgacaagatagcctggactcgggatatcacagaacccttggctgaggagtcatctacaagtcaattgcgcccgctgggtacctcgattccaaccaattcgacggcatcggaactgaagaagtccaacacttcgtattcctttactggagactatctatctggtggcaataaggccgatctgaagggtggctatccattcggcggcaccgatacggacacaaaagccaacgaaaaggacaaggagaaggaacataccgcagacgactcactctacgagtgcaacatatgcctggacaccgccaaggatgctgtggtcagcatgtgcggccatctgttctgctggccgtgcctgcatcagtggctcctgacgcgtcccaatcgcaaactctgtcccgtttgtaaggctgccgttgataaggataaggtcataccgctgtacggaagaaatagtacacaccaggaagatccacgtaacaaagttccaccacgccccgctggacaacgtacagaaccagatcctgttcccgggttccctggattcggattcggcgacggatttcacatgtctttcggtattggagcttttcctttcgggttcataacatctacgctcaactttggcgaaccacgtccacctggctgctaatcggggaacaaggcaatacgaggatgaacagaccctgtccaagctgttttcgtatttggccgttgtgtggatattgtggctgttctatgcatagcaatctgcgaacgcataaagacatcaccccgataagaagaacctatgttcaaatgtgtatggaaagcgtgcgaagtaatcatatagcagtatcctccagttaaatcaacaatattcttaaactcgttgggcaatagtcgttggtgtgattaattaacataaattgttagcattcggttataattgtaatttgaggattcgcaaaacagaagtggattggatcccaaactatttcaaaaagtccgcgataccctacgactccagcataaaaaactgaaatttcgaaatcattggatcgtaatgatttaattcaaatgtagatgtca

SEQ ID NO: 29070 - protein, 246 aa, DROSOPHILA
MEEPKSVPTAELPSTSTGASSSSSTLSNNVSYDKIAWTRDITEPLAEESSTSQLRPLGTSIPTNSTASELKKSNTSYSFTGDYLSGGNKADLKGGYPFGGTDTDTKANEKDKEKEHTADDSLYECNICLDTAKDAVVSMCGHLFCWPCLHQWLLTRPNRKLCPVCKAAVDKDKVIPLYGRNSTHQEDPRNKVPPRPAGQRTEPDPVPGFPGFGFGDGFHMSFGIGAFPFGFITSTLNFGEPRPPGC

SEQ ID NO: 29071 - DNA, 4189 bp, DROSOPHILA
cttcaagcgcctcggcccgattgcaatattctcggcgagacgccactggacagcgcccagatgtgtgcgtctccagaaaggttcctccctgtatcacagcgtgcccagcaatgacaacaagtgcccattggataacgatgatgacgaggagcacgatggtggatacaatctgtacaaggaggagtttgagaactttggcttccatgtgcgcggcgatgctccggtgatcattgcccacgttgagattaattctttggcagacgtaagtaaatgctacttccatcgattcgtcgtatactgtaggcattattttcagcttggcggcatcaaggagggagacttcatagtcgagatagccggcgtggacgtgaagtggtactcccatcagcaggtggtgcagctcatacaatcctgcggctctacactcgagctgagagtgataacgcccatggatcgcaactacttgaaggtgcattttgtttattaatcatacgtaaaaaatcagcaaacaaattcaccttgtttacgcacagccattgtcgtcgaagggctcattatcaacgctatcggcggccagttcatcgggcatttcatccggatttcccagtcccacaagtattgcggccaagcccaagctccacctgaaaacatcctctagttcgcgacccgctggcagcgtttcatccagttcgtggaatccgtttcggcgaacgcctagcttagctaaaatattttaagtagccatcagttttattttgtgttttatttttttgctcttaaggcaatggccatttcaagttaaaaagaatgttgtgcagtttaagttaagcaataaacttaatgattttttaaaagcccctctattatacccataatttattttattcctattgattcaatcgctcccaatcacccatcgataataatctacacggaaaatgaattgaaataaatgtttttaatgttttatcgaatttaaaatatatatttatacaatttttgacatctacatttgaattaaatcattacgatccaatgatttcgaaatttcagttttttatgctggagtcgtagggtatcgcggactttttgaaatagtttgggatccaatccacttctgttttgcgaatcctcaaattacaattataaccgaatgctaacaatttatgttaattaatcacaccaacgactattgcccaacgagtttaagaatattgttgatttaactggaggatactgctatatgattacttcgcacgctttccatacacatttgaacataggttcttcttatcggggtgatgtctttatgcgttcgcagattgctatgcatagaacagccacaatatccacacaacggccaaatacgaaaacagcttggacagggtctgttcatcctcgtattgccttgttccccgattagcagctaaatacatgggcaaatgttatttaatatcaatctcagaactattgagatggcatgtaacctaccaggtggacgtggttcgccaaagttgagcgtagatgttatgaacccgaaaggaaaagctccaataccgaaagacatgtgaaatccgtcgccgaatccgaatccagggaacccgggaacaggatctggttctgtacgttgtccagcggggcgtggtggaactttgttactgcaaaacacatataagttgggttattgaaaaatactcatgttgaaagcggttcaaacctaccgtggatcttcctggtgtgtactatttcttccgtacagcggtatgaccttatccttatcaacggcagccttacaaacgggacagagtttgcgattgggacgcgtcaggagccactgatgcaggcacggccagcagaacagatggccgcacatgctgaccacagcatccttggcggtgtccaggcatatgttgcactcgtagagtgagtcgtctgcggtatgttccttctccttgtccttttcgttggcttttgtgtccgtatcggtgccgccgaatggatagccacccttcagatcggccttattgccaccagatagatagtctccagtaaaggaatacgaagtgttggacttcttcagttccgatgccgtcgaattggttggaatcgaggtacccagcgggcgcaattgacttgtagatgactcctcagccaagggttctgtgatatcccgagtccaggctatcttgtcgtagctcacgttgttggacaaagtcgatgaggacgacgatgccccggttgatgtgctgggaagctccgctgtgggtacacttttcggttcctccatggtttgcccaagatgcgggtaaagttttagtcgttcaagctgcaacgtaacgttggatgatttagaaacccaaatttgctaagtaagtctgtgttcaccctattgacaagtgcctagattgcttagatgattttcctaggccatttctggtgtacaactaaggtccgcactttcttgaatatgacttaatttaattaaatacttcaagcgcagtttgaagggggtttcccccgagttccgcagcattcagcatttgtccgaccccatggggtggtgtttatggctacgaaaaccgcccaaagggcgtatttaccaccaagtcttcaaggataatgcaccgaacattcccattggctgcacccacataaattaaacaaaaaagtcaaattttgtttgaattgcgttggcaaacaagacggtatacctgcatatgtacctggacttatgtgcgtacttatgtacacatctacacactcaaacactcgcgtgtatatagggctagaaggtttccatctacctgttacatatgtacattggaaccgattatatgcttatttatacagtacgtatagatgtcaaagatgtcacatgatgttttcatggagcacttcctattggagtcaaggggaattatatgctcatatacatcgagttccagggattgcgtttaaacgcattataacttaattaaactatatataacttcctggggcacagcaaatagtataacttctcgaaattacatacattgtaagtgtattgtttgcaaaacctgacttgtttgccctcattttattgtttgttttcgctcacagtttgcttctacttgccgtgctaagtattgttaaaccgaatcagagaatgttgctaaattgattgtgtggacaagtgtgttatgttacggtaaaattgggaatttatcaattgacgtcttagcacctcaaaacaactgcactgacgatacctgaccgaggccgatagacctttaccctatcggtaaatagctgcctgtataacagcccgtctccaccggaccaaagtccacgctcgcgttcgataactatcgagttaggtgaaaaatctcggatctcaatgaatcatttgaaaagtgatcagtgatcagtcctcgattgatttgtaaacaaaataaactactaaatacatttacaagactaaatactattcattaacagctgttgtgtgccatggacaatcgataccaggactcactcgactatctctagttcctaacgatctggtcacaacaaagctcaagaatttaataatattgatattagactaaaccaaaacaaggaacagctgatttttagaacgctaatgcgtttaagtcgtaatcgatagctcacccactgtacactgtacaccatccctaattagaactggcttctttcaaaacaaagcaaacgaaatttgaaactttttcaatttatatgttccattggtgactctggttgcaatgagctgctttggctgcggtcgcaaatatggcctattctgcaaggaggcaagtgccatcaaaccaaagcaaaccaacatatatcacctacttacattgtgttaaatccgaaattttagtatggatgccccaactgcggctactcattctgctccaagtgcttgaagagaccaatgcccgtgccccgtcatgcaggaaaggtgcacaatgtgtgcctcatatgctacgacaaactatccaaactccaggcgagcgccgatgccgagaaagttatagactgtgatgctttgccggggatcttagtcaccaaaatgaacctggctcctccatccaaaagttcagatggcgccgatgccctattcaagtaagtaaaataccacattaaaacaccgattctgaaactataattcgattaattgcagcga

SEQ ID NO: 29072 - DNA, 1271 bp, DROSOPHILA
gtaacataacacacttgtccacacaatcaatttagcaacattctctgattcggtttaacaatacttagcacgcttgaacgactaaaactttacccgcatcttgggcaaaccatggaggaaccgaaaagtgtacccacagcggagcttcccagcacatcaaccggggcatcgtcgtcctcatcgactttgtccaacaacgtgagctacgacaagatagcctggactcgggatatcacagaacccttggctgaggagtcatctacaagtcaattgcgcccgctgggtacctcgattccaaccaattcgacggcatcggaactgaagaagtccaacacttcgtattcctttactggagactatctatctggtggcaataaggccgatctgaagggtggctatccattcggcggcaccgatacggacacaaaagccaacgaaaaggacaaggagaaggaacataccgcagacgactcactctacgagtgcaacatatgcctggacaccgccaaggatgctgtggtcagcatgtgcggccatctgttctgctggccgtgcctgcatcagtggctcctgacgcgtcccaatcgcaaactctgtcccgtttgtaaggctgccgttgataaggataaggtcataccgctgtacggaagaaatagtacacaccaggaagatccacgtaacaaagttccaccacgccccgctggacaacgtacagaaccagatcctgttcccgggttccctggattcggattcggcgacggatttcacatgtctttcggtattggagcttttcctttcgggttcataacatctacgctcaactttggcgaaccacgtccacctggctgctaatcggggaacaaggcaatacgaggatgaacagaccctgtccaagctgttttcgtatttggccgttgtgtggatattgtggctgttctatgcatagcaatctgcgaacgcataaagacatcaccccgataagaagaacctatgttcaaatgtgtatggaaagcgtgcgaagtaatcatatagcagtatcctccagttaaatcaacaatattcttaaactcgttgggcaatagtcgttggtgtgattaattaacataaattgttagcattcggttataattgtaatttgaggattcgcaaaacagaagtggattggatcccaaactatttcaaaaagtccgcgataccctacgactccagcataaaaaactgaaatttcgaaatcattggatcgtaatgatttaattcaaatgtagatgtca

SEQ ID NO: 29073 - protein, 246 aa, DROSOPHILA; identical to SEQ ID NO: 29070

SEQ ID NO: 29074 - DNA, 4024 bp, DROSOPHILA
aagatatagtatccgtacattatacatatgtgtaaaaccctaactgcaactatggaacgacagcacaaattttgttgaacgcggggtggagagcgccccgaaaaagctgacaagtggaaaacaaaaatcaaatactgactaaagcagaaaaatcgtttttaagtccaattctcaacacacacacacacacacacacccatacacactcacgcagcaacatgaaatcaaatatatactaaatatataaacatttatgtatatatttagcagacgagtaaataaaccacacccgcgcacaaatcgctcacataaacgaattacgaattaactatgctttgtaagcccaaatagggtcaaaacccaaattcacgacccgcagccagcgaggatctctagcggaaatgtccacaatcttagccagcgacagcgatttttgtatgagcaaagaactaaaatttgtaaatatacatatatgtatttcttgattttatcgaaaggaaaaagcgacacactgagatcattcgagtccttatagtttttagttttatcctaattgcaaccgaaactcttttctatctatatctagccagatatcggagtacataagcgagagcatactttaaatggaaaattatagcaagagtaatgaacaatgtcaactacaataaattagcaaaatgaaggcgggcgggcggaagtgaaggaaagggaatgaaattaaatattagtgcaataattaacaaattattcggtaaaattaaaatggaatacatctaagtaaacgctttgtaaaatacatataaacaatttattaaatggaaaacggaaaatggaaaacaataaaagcgaataaaacccaagaggaaaatgaaacactattgagtaattaataaaagcattgacattgacattgacacacgtgattcgatatctcatcttataagcataaatcaataagataacaataaagagaaattaaagaaaatgcaaaacgaacgtcttgttctttacgcttgcgctacttaacgagttacatttatttaacaataaaattggcattgtcattagctttagattttgagcatcacgaagctcttcgcatacttaagtgctacaattgacattacggctgctgcatgacagtgcggatatatttgaggacgtccggattggacaggatgtgcaagtggtccacgttctggagagcgagcgtgtttataggcgctttagaatagcccgcccaatatttgcaggctcgcagagaacgctggttaacggtgccgtcgccgagacccattatcaacttgggcgtttccccactaatgtccgatttcttgtactgcagtctattgtgtgagcaaaaaggtaaattagttagattcctttccgctacaactgtggctcaactcacctctcgaccgtgtcgatgccttcgccatagagccagtgcagttccacattcggtggatcgaagtttcggttgtaccgaatcgtgtccttgcgcatttcccagcccgtcatgtagtcgaggtctttgaagaactcttccagctgtgccatcgtatagtttctgcttggagtcatggcgagcacctcggatggcttccaaaacagtggcgagggcagcaaccaggccgtggatgggtgtgttatctgttccgccttgaggatcttggcactcagggcgaacgagtcgagatcatcgcccatggcaaacactttcacagccttaaaacttcccgcccaaactcccgccaggctgatcatgcgcttcacgtatttcgccttccattggagggtttgctcctgcaagaaaaccagggtcatgagactgcccatgctgtgcgagatgaaggtcacagccgactgattgttggcctcataggagtcctccaccagctgcttgagatcgatgaagaactgttggttctcatctggaatgggaggaggaggagcaagatgtgaaagtagttcgtcagccattcgggtaagctaagctcacttggcgctttgcggaagtcatagggtgctccatgaatattttgtttgcgaatatatccaagtttcaccagctcattggctatatccttgaagtaggctccggcgctgttcttggtgggatcgatccactcgaccacctcgggattgccccagccgggtatcctcgtctccacaccaggagtgttgtgggtggtcctcgtgaccttgtcgtagtacagcttgacattgtctatccaacagtagaccatggggatgaccaactgctccagatccagccacaggttgtaccaatcgtgggtcttttggcaaattaaatagggagagttgggcttatttagccgagcatccatttgggagcctccgtcaccgggtactgcaatacaatagcgatactgtgaagctggatgaccttaaaaattaatcgtgtccattgtacttaccgaatatcactggcgacagcttgggttcagggggggcagaaggattatcatttcttccatgccatttgctaaatggccaaaagcactcgcccagggccaagaaggtggtcagcaggagcagcgaaagcactcccgatttgagcctcattgtggttgcgttgtaaacaaagcaggagtggcgactgactacttggagtatatagctcgcaggttatcggatcgcgctactcaattgacgccagataaaggcctcctgcgcataaacaagtgaatcagcctgccgagctttcttttgtggtaattgtaatgcatttatatggagcccttgtggtctgcgcactttccgtcagctgagatttgacctttaaactatgtgtgtgtgcgtatgtgtgtatgcggaacttcggcggtcgcacttccctcgcaaaacgacgtcaagagtggctgttattgttttaacaaaagcgttggctttgcaattttgttgttttctgcctaatctgtattgttgttgttgcgcagtttgttatggtcagcgtttatttctcccctcttagtaaaccatccctctaggtgtgaccaggtgtctgcacacactctgttatctttgtgaaccagtcacggttttcataatgttattcatattataaaaaataatttacggaagtacatattcgcacaactatagaagtaatctaatcttttgcctgtaaaaaccactccatatttgtaattcaagcagagctcattactaacctactagctatctatctagtgactggtcacctaaggagcacccccacgcacttatcgatacacacgaatatcaatgtccgatagtttagttagcacaccactaggcgaagcgcgccggcaaataaaattgttttcatagcctttccaaacaaatccggaacaatggcgatgcagaagttcttcagcgtgctgctgccggatgtgaagcgggagctgcgccgcgggatcatcgagtgctccaagcggggcctcctgcacagcaccaagtggctggcggaaatgcatcacggactggccgatgtgcacatagacaatgaggcgcctgatgaggatcgcacattcagcgagtgtcagctggaggggattgcgccggaggagtacagcgactacttcctggccaagagctactacgacgtgagggagtacgacagggcggcgcatgcggtcaggaactgcgagtccagtgttccgcgcttcctgcacttctattccagctacatggccagggaaaagcggcgactggactcgaccacggaccaggcgaatctgcacgaaccgaatcagatgcgcgatctcgccgacctgctggctacgttgcgcatggaatacggcaaaagtcggctcgatggctacggaatatacttatacggagtagtcctgaaagcactgaatctcaaccaggccgccgagcaaatgctggtccaggccatcagactggtacccatgctgtggagcgcctatctgaagctctcgcccctcatcatgaagaagaagaaactgctgagcctgcagctgggtggtcactggatgcggcacttcttcatggc

SEQ ID NO: 29075 - DNA, 1824 bp, DROSOPHILA
ctggtcacacctagagggatggtttactaagaggggagaaataaacgctgaccataacaaactgcgcaacaacaacaatacagattaggcagaaaacaacaaaattgcaaagccaacgcttttgttaaaacaataacagccactcttgacgtcgttttgcgagggaagtgcgaccgccgaagttccgcatacacacatacgcacacacacatagtttaaaggtcaaatctcagctgacggaaagtgcgcagaccacaagggctccatataaatgcattacaattaccacaaaagaaagctcggcaggctgattcacttgtttatgcgcaggaggcctttatctggcgtcaattgagtagcgcgatccgataacctgcgagctatatactccaagtagtcagtcgccactcctgctttgtttacaacgcaaccacaatgaggctcaaatcgggagtgctttcgctgctcctgctgaccaccttcttggccctgggcgagtgcttttggccatttagcaaatggcatggaagaaatgataatccttctgccccccctgaacccaagctgtcgccagtgatattcgtacccggtgacggaggctcccaaatggatgctcggctaaataagcccaactctccctatttaatttgccaaaagacccacgattggtacaacctgtggctggatctggagcagttggtcatccccatggtctactgttggatagacaatgtcaagctgtactacgacaaggtcacgaggaccacccacaacactcctggtgtggagacgaggatacccggctggggcaatcccgaggtggtcgagtggatcgatcccaccaagaacagcgccggagcctacttcaaggatatagccaatgagctggtgaaacttggatatattcgcaaacaaaatattcatggagcaccctatgacttccgcaaagcgccaaatgagaaccaacagttcttcatcgatctcaagcagctggtggaggactcctatgaggccaacaatcagtcggctgtgaccttcatctcgcacagcatgggcagtctcatgaccctggttttcttgcaggagcaaaccctccaatggaaggcgaaatacgtgaagcgcatgatcagcctggcgggagtttgggcgggaagttttaaggctgtgaaagtgtttgccatgggcgatgatctcgactcgttcgccctgagtgccaagatcctcaaggcggaacagataacacacccatccacggcctggttgctgccctcgccactgttttggaagccatccgaggtgctcgccatgactccaagcagaaactatacgatggcacagctggaagagttcttcaaagacctcgactacatgacgggctgggaaatgcgcaaggacacgattcggtacaaccgaaacttcgatccaccgaatgtggaactgcactggctctatggcgaaggcatcgacacggtcgagagactgcagtacaagaaatcggacattagtggggaaacgcccaagttgataatgggtctcggcgacggcaccgttaaccagcgttctctgcgagcctgcaaatattgggcgggctattctaaagcgcctataaacacgctcgctctccagaacgtggaccacttgcacatcctgtccaatccggacgtcctcaaatatatccgcactgtcatgcagcagccgtaatgtcaattgtagcacttaagtatgcgaagagcttcgtgatgctcaaaatctaaagctaatgacaatgccaattttattgttaaataaatgtaactcgttaagtagcgcaagcgtaaagaacaa

SEQ ID NO: 29076 - protein, 421 aa, DROSOPHILA
MRLKSGVLSLLLLTTFLALGECFWPFSKWHGRNDNPSAPPEPKLSPVIFVPGDGGSQMDARLNKPNSPYLICQKTHDWYNLWLDLEQLVIPMVYCWIDNVKLYYDKVTRTTHNTPGVETRIPGWGNPEVVEWIDPTKNSAGAYFKDIANELVKLGYIRKQNIHGAPYDFRKAPNENQQFFIDLKQLVEDSYEANNQSAVTFISHSMGSLMTLVFLQEQTLQWKAKYVKRMISLAGVWAGSFKAVKVFAMGDDLDSFALSAKILKAEQITHPSTAWLLPSPLFWKPSEVLAMTPSRNYTMAQLEEFFKDLDYMTGWEMRKDTIRYNRNFDPPNVELHWLYGEGIDTVERLQYKKSDISGETPKLIMGLGDGTVNQRSLRACKYWAGYSKAPINTLALQNVDHLHILSNPDVLKYIRTVMQQP

SEQ ID NO: 29077 - DNA, 2016 bp, DROSOPHILA; identical to SEQ ID NO: 27178

SEQ ID NO: 29078 - DNA, 419 bp, DROSOPHILA
tcccacttttcaattctcaattccgcgtaacgtcggctgtaatttgtaccggattgcattggattatccgcctgggcgcgaacagtaactccccaaaaatggaggcagctattctggatataatcaccgggatcctggccatagacacggaacgaatccgtgagtccacagccaagatgctaaaggcctacgagaatcccgattctctgctggttctcacccagatcgtgatgtcggacaggccggtccaagagcggcaggtcgccgccgtgctcctcaagaggcgggtcaaaaagttacgccactggcagttggttcccgccgagcaccaggcagaatcaaatcgaacatgctacaggtcctcatcgcggtgaaggaaaagaccgtgaagggcacggtggcctttataattggatcgc

SEQ ID NO: 29079 - protein, 91 aa, DROSOPHILA
MEAAILDIITGILAIDTERIRESTAKMLKAYENPDSLLVLTQIVMSDRPVQERQVAAVLLKRRVKKLRHWQLVPAEHQAESNRTCYRSSSR

SEQ ID NO: 29080 - DNA, 6728 bp, DROSOPHILA
tgagtttcacggactctgtgctaaactcaacggattttcgtcatttgcagcagagcatttcgcgcaagccgctcagtccaaatcctgccgcagatccaatcgtcacgcgctggaagcgtgacgaccaaggagcaattgtggccaacccgacaaccggtaagttggcccaatagcccattaactgtgatgacatcacttcctctttcctgcaggaatatcatacagatggttgccatacagcggtccgacaacaagttgtgggccattcccggtggaatggtcgatcccggcgagaatgtcagtgtcacccttaagcgggagttcaccgaggaggcattgaatttcacggacaaagccaacatggttgagcgattttttcaagcgggaggcgttcaggtataccaaggctacgtagacgattttcgaaacacggacaacgcttggatggaaaccactgcgctgaacttccacgatgaagacgggagccaggtgggacaattggagctaatggccggtgacgatgcctccaatgtgcgctggacggacgtcgactcgaatctcaagctgcacgccaatcatgccgacatagtccgtgagggtgtcatccgacgaaatgcacactggtagaaactagactgaaactattagagttaagatcaactgcctaatggttgaagaaaaaccaattttaaataataacatagccttcaatgaaacaagtaatccctatattatttcaatgcatattaatgtctcactggatgtggttataagttagaaaacattttcctccgttttttggcgcgtagaaaccttcatcttgcccttttaaagatcgctcatcttgaatgatttaactccacagaagcacaactgaaatttaagactatttcgaaagtattcgtataaaaagcttgcatcacttccaataaatgaatctgcgggcggaggacgttgggtgttctgagctgtttggtggttttcacacggatatgtgggcttacagggcttgcacataattgaacacttctggattcatgttcgatactttgctgaacagttccgggtagttggcgcgaatctctttgatgagggccaccgcgctctcggttgtctcgacgtcaggcatctgtttcttgtaactcgcctctatggtgatggccaggatttgctcaagatgtgcctcaatgctggggcgggccttcaagtatagcacacggaacgccttctgaatcacatcgttctccacggtgtcatccttcagtggcaaatggttgagccacacgggcagcacctggccaagcggcactgaatctgggttggtaactatgagacgagcaactgctccgcaaatgttgtccatggcggcaggaacggattccctgacaattgcttcggaaagggcttgcaaaattgtcggataagacctatggatgcaaaaaaaaaacaaaaaacatatacatcaaaactagattctgcagaaaagttcatttccgggaaacccactcgaatgatttttcctcggaatggaagacaatttcgcctagtgcaaaataggagttctgtcgcgctttggcatcagatccctggaaccggcgataaaaatgggacgtagggcatcgaaataagtagcacagcaaccttttaacgccttgcagcagtcagcaagtgcgccatagatgtatgcccgctgttctggtaaatcgcgctcctttaccttcgcctgaaacgaaataattgaatttcagtaagccgttcggaatatcgatggttgtatgaattattgccaagagaagatcgacctctctcctttgccacatcatgttcggtatttcgtgcaaaacctaccagcctttgaatatagaaatggtaaaggcgtccaaaataaagcgagaacagctccggctgaagggttaagccaaacatggggaacagattggcagcgttctcgaacagcatctcgtcgttctcgctttcctccgaacactcatcatctccgccgccgctctcctcgttaaactgacaggccattttatttgtgaagatgtccctgatgcaaccgaatataagttcggcgtgctcctggctgtttatcgccggcacgtacttgaagacatcgtagaggacgtcaagcatgcggagtacgaccgcaacctggtcgtcggtgcgcattatatgtgcaaactttggaatggcaatctcgcaggcgcgcttcaggccggcggcatcatccaacttgtggagagccgtaatgaacgagcaaatggagtcaatacatgccatacgaacgtcgccttgcggatgatcaatcatcttgtagacgttctcgaatgcagattgcaaatagggcgcgaaggcggcgccggtatgggtagcaaactccttgagtgacagaatggcctcctccttttcgacgatataatcattctccaccgggtaagcgtcttggtcatcttcgtcgtctgtgtgctctaaatcaatctctatgtcgggggcatctactagggccaaatcatcgtccgcattgtccgacacatttggcaccatgtcctccgaaaaaatcacagactccattatgcgatcaatgaacttggggaacacactggccatgctctcgttgacaactgatgacagggaggacatcaggttgtatatactcctgcggtactcgggatcatccggaccgtcttccagcatcatcaggcagaagttcattgtatcgtcggcaagaggaataatattatccttgcccaattcgcgacacagcgcggccagagtgtcgatagcttggatgcgctgactgtacatttcttttgggcaatccttcaccagacagccctgtagtacggtcatgatcctggggaaatatggcatcaggttttccttagctgctgctgacaccgctgctatggccgacaaagccatttcacgcatttgatttgagttctgcggttccataaccccaaacagactgcacaataagtttatcagggagtggactcatatttccgtagtatagtctagtcttaccgatccataagtgtgggtaaataaggaacaatatcctcatccagattctcgcaaaaggtctccagggcataaaacatacgatccatatgtttcgaatccggctcaccaacctgaaagaaaatacatttagtatgtttctgccaaacaatttgttggctttgttggtgcaaaacggaatgcagtcctcaaaaaacgtgaaaagaaccccatttgaagacaccttctttatgtaaccgacgaacttattactcatttaaataacaattaagaaacgagtcaatgaacatttaacatacgccaaaaagttaaataaaccagtgcgaaatgatatatctacaacagagctcttaatgtaatcaatctggcaaactattcaacaaattttaggtgtttgatgtgcaatcaagtacatagtaaacagtaagacatcgaaaaagcaccctatatttggcgaggaccgatcttcgcttgatctgtatcttgtctaagtacattatggaatctttggcaggtacggaatcgagatttggcccattgctgttatggccagcctttagaagcagcacaaacaaataaacgagaatgtaaaatatacaaattccaagttggtcgaagatggccacaatgattacctaccttgagttccagtaccagctggtttagatagtcgaacaacacgggtagaatttggggagcaaacttgcagatcgtcggctgaagaaactcggaaaactgaccgagggcgaagaatgcggcggtccgcacgaacataacagagtccaacactccagctttgatgatatttagcatgacctcgagatactttttcccaatggcctcggaacagccctcggcaataacgcccatgcaaataaaagaggaacggcgaagcacaggttccgggctctgcaacgcaggctccagcaaatccagtagtggcggaataaacttgtccggcaccatgtgaagggccatcaggtcgagtgtctgcgcagctgcattggatggactatttaggctctccgaggaaaagtaatcatcgtctagaataggaatagggttagcaagcatggcaacagaaatataaaggagcagttaccaccttccttgaggtcgtcctggcaaatcacttcgaaaagaacagatagtgtgggctgtagtagtttctgcttcataataattttcttcttgaggcgaactaggctgcctacaaaggtaagcacctgaacccgaatcgaagcgtcgaactgcttgtttctcgcaatcatcagacaaaactccagaagcagcttcacattaccggtcagcaagtggggcacatactcggccatgctgtcgatgatatcaaaggcacccatgaactcaatactgtaccccttttcgacaaaggcggccagggccttgagtatgagcggcacagccttaaccataatctgctcagcatcactatgtccacttacgaaaggcaacaagacgcatgaaccggtcagcatgttatgcacggtgggtgtggccatgttcccattcgcctcggcggtaactagaatgccggcaagcaatgggaacatagtatccgtgtggtccgaaaactgatcgggagcagcgtccatgagcgaggaaaagattgagctgccccgctcgctttctattggatcggggctgctgcaacgttcgtaaataaacttcagtatttcctccctccaggagttttgctcgccctcctcgtggcgcaccagcgatccaattataaaggccaccgtgcccttcacggtcttttccttcaccgcgatgaggacctgtagcatgttcgatttgattctaaaaaacatgcatccgttactgtatcatagtcattaaaaggtaaccagttaactcacgctgcctggtgctcggcgggaaccaactgccagtggcgtaactttttgacccgcctcttgaggagcacggcggcgacctgccgctcttggaccggcctgtccgacatcacgatctgggtgagaaccagcagagaatcgggattctcgtaggcctttagcatcttggctgtggactaaggaagcgaaagaaatggaactttattagcgacttttatggccctatgctatcatgctatcaacataagtaatttttcaattaggaagcgacgaagtgtgcgtccattcgagcaatgtaatggtatatccacgagtttaatgcaaataaaaatataatattaattaattattattaattataattatttttataatttttataataattttttttaataattattataattattatttatatataaataattatttctaaaaaagtgcaatagttttcggaagtttgttctgatcaaatagaacattaaacattaaattaaaaaaaaaaaaaatattatacacctatttttacagctaagtgtggattcaacttaactgatcagacaaacgtgaagcagtcagaaaggaaagcatacatgaaagacatccattggcgcccaggataacctcctttcttattgccggatggcccgctttgctcacctcacggattcgttccgtgtctatggtcaggatcccgttgattatatccagaatagctgcctccatttttggggagttactgttcgcgcccaggcggataatccaatgcaatccggtacaaattgcagacgacgttacgcggtattgagaattgaaaagtggaataccggggagaaatccccgtcgcacgttttgcgcttgttgcagtttacagtttatcgtaagcttattttacattctactcttgaattggctagcggttatcattgcggtttaacgagtggggatgtaacgtaaatttatctcgcgcagttaattggtgacttgtgttaacatttttctttaatatatgtatttatgtttttttgtttattatatatgtgtatttatgtttttttgtttattgtggagttttgatatatgcgctagcagcagtgatgcagtagaatactaaaaatatttacatttttgacatttgatcgaccggacaagtaagcaaaggccgcttcgacactagtatgcagccctggatcttttatcatttatcgacgtccatttttgatcgaagcgacgcgccttttttttgttttcgcgttcgcactgcaaactgtaactgtttaaggacaaagcggaatggacagtagcagtggaagccaaggaaatggcagtttcatggaccagaactcgctgggcatcctgaacatggacaatctaaagggtaagcaggtggagcacgccggaaataagccgaagcagcaagtaatcctcattccctacagtcttcggcgacttgtccagcttcagcaaaagtggaaggaggagcggcactggtcgggactctcccgccgtccacgagcggctccgagaagaacgactgcgtgcgctggagacactggaaaagccccgaccgtcgcgttccagccaagcaaagagcactgccctccagatgcgcttgtccacaaacatctcggagctggtaacagacgacaccatcgatctgaacagcagcagctcctttgctttggtcacgcccgccaccaagggcacaaacatctcttttgagcctgcggagatcaccggcaggtccacactctgccaggcgggaaaacagcgccgcagggagaagccatccctgtcggtggccgaaattctaaagtcatc

SEQ ID NO: 29081 - DNA, 3251 bp, DROSOPHILA
cacttttcaattctcaataccgcgtaacgtcgtctgcaatttgtaccggattgcattggattatccgcctgggcgcgaacagtaactccccaaaaatggaggcagctattctggatataatcaacgggatcctgaccatagacacggaacgaatccgtgagtccacagccaagatgctaaaggcctacgagaatcccgattctctgctggttctcacccagatcgtgatgtcggacaggccggtccaagagcggcaggtcgccgccgtgctcctcaagaggcgggtcaaaaagttacgccactggcagttggttcccgccgagcaccaggcagcaatcaaatcgaacatgctacaggtcctcatcgcggtgaaggaaaagaccgtgaagggcacggtggcctttataattggatcgctggtgcgccacgaggagggcgagcaaaactcctggagggaggaaatactgaagtttatttacgaacgttgcagcagccccgatccaatagaaagcgagcggggcagctcaatcttttcctcgctcatggacgctgctcccgatcagttttcggaccacacggatactatgttcccattgcttgccggcattctagttaccgccgaggcgaatgggaacatggccacacccaccgtgcataacatgctgaccggttcatgcgtcttgttgcctttcgtaagtggacatagtgatgctgagcagattatggttaaggctgtgccgctcatactcaaggccctggccgcctttgtcgaaaaggggtacagtattgagttcatgggtgcctttgatatcatcgacagcatggccgagtatgtgccccacttgctgaccggtaatgtgaagctgcttctggagttttgtctgatgattgcgagaaacaagcagttcgacgcttcgattcgggttcaggtgcttacctttgtaggcagcctagttcgcctcaagaagaaaattattatgaagcagaaactactacagcccacactatctgttcttttcgaagtgatttgccaggacgacctcaaggaaggtgacgatgattacttttcctcggagagcctaaatagtccatccaatgcagctgcgcagacactcgacctgatggcccttcacatggtgccggacaagtttattccgccactactggatttgctggagcctgcgttgcagagcccggaacctgtgcttcgccgttcctcttttatttgcatgggcgttattgccgagggctgttccgaggccattgggaaaaagtatctcgaggtcatgctaaatatcatcaaagctggagtgttggactctgttatgttcgtgcggaccgccgcattcttcgccctcggtcagttttccgagtttcttcagccgacgatctgcaagtttgctccccaaattctacccgtgttgttcgactatctaaaccagctggtactggaactcaaggttggtgagccggattcgaaacatatggatcgtatgttttatgccctggagaccttttgcgagaatctggatgaggatattgttccttatttacccacacttatggatcgtctgtttggggttatggaaccgcagaactcaaatcaaatgcgtgaaatggctttgtcggccatagcagcggtgtcagcagcagctaaggaaaacctgatgccatatttccccaggatcatgaccgtactacagggctgtctggtgaaggattgcccaaaagaaatgtacagtcagcgcatccaagctatcgacactctggccgcgctgtgtcgcgaattgggcaaggataatattattcctcttgccgacgatacaatgaacttctgcctgatgatgctggaagacggtccggatgatcccgagtaccgcaggagtatatacaacctgatgtcctccctgtcatcagttgtcaacgagagcatggccagtgtgttccccaagttcattgatcgcataatggagtctgtgattttttcggaggacatggtgccaaatgtgtcggacaatgcggacgatgatttggccctagtagatgcccccgacatagagattgatttagagcacacagacgacgaagatgaccaagacgcttacccggtggagaatgattatatcgtcgaaaaggaggaggccattctgtcactcaaggagtttgctacccataccggcgccgccttcgcgccctatttgcaatctgcattcgagaacgtctacaagatgattgatcatccgcaaggcgacgttcgtatggcatgtattgactccatttgctcgttcattacggctctccacaagttggatgatgccgccggcctgaagcgcgcctgcgagattgccattccaaagtttgcacatataatgcgcaccgacgaccaggttgcggtcgtactccgcatgcttgacgtcctctacgatgtcttcaagtacgtgccggcgataaacagccaggagcacgccgaacttatattcggttgcatcagggacatcttcacaaataaaatggcctgtcagtttaacgaggagagcggcggcggagatgatgagtgttcggaggaaagcgagaacgacgagatgctgttcgagaacgctgccaatctgttccccatgtttggcttaacccttcagccggagctgttctcgctttattttggacgcctttaccatttctatattcaaaggctggtaggttttgcacgaaataccgaacatgatgtggcaaaggagagaggtcgatcttctcttggcaataattcatacaaccatcgatattccgaacggcttactgaaattcaattatttcgtttcaggcgaaggtcttatccgacaattttgcaagccctttccgaagcaattgtcagggaatccgttcctgccgccatggacaacatttgcggagcagttgctcgtctcatagttaccaacccagattcagtgccgcttggccaggtgctgcccgtgtggctcaaccatttgccactgaaggatgacaccgtggagaacgatgtgattcagaaggcgttccgtgtgctatacttgaaggcccgccccagcattgaggcacatcttgagcaaatcctggccatcaccatagaggcgagttacaagaaacagatgcctgacgtcgagacaaccgagagcgcggtggccctcatcaaagagattcgcgccaactacccggaactgttcagcaaagtatcgaacatgaatccagaagtgttcaattatgtgcaagccctgtaa

SEQ ID NO: 29082 - protein, 1051 aa, DROSOPHILA
MEAAILDIINGILTIDTERIRESTAKMLKAYENPDSLLVLTQIVMSDRPVQERQVAAVLLKRRVKKLRHWQLVPAEHQAAIKSNMLQVLIAVKEKTVKGTVAFIIGSLVRHEEGEQNSWREEILKFIYERCSSPDPIESERGSSIFSSLMDAAPDQFSDHTDTMFPLLAGILVTAEANGNMATPTVHNMLTGSCVLLPFVSGHSDAEQIMVKAVPLILKALAAFVEKGYSIEFMGAFDIIDSMAEYVPHLLTGNVKLLLEFCLMIARNKQFDASIRVQVLTFVGSLVRLKKKIIMKQKLLQPTLSVLFEVICQDDLKEGDDDYFSSESLNSPSNAAAQTLDLMALHMVPDKFIPPLLDLLEPALQSPEPVLRRSSFICMGVIAEGCSEAIGKKYLEVMLNIIKAGVLDSVMFVRTAAFFALGQFSEFLQPTICKFAPQILPVLFDYLNQLVLELKVGEPDSKHMDRMFYALETFCENLDEDIVPYLPTLMDRLFGVMEPQNSNQMREMALSAIAAVSAAAKENLMPYFPRIMTVLQGCLVKDCPKEMYSQRIQAIDTLAALCRELGKDNIIPLADDTMNFCLMMLEDGPDDPEYRRSIYNLMSSLSSVVNESMASVFPKFIDRIMESVIFSEDMVPNVSDNADDDLALVDAPDIEIDLEHTDDEDDQDAYPVENDYIVEKEEAILSLKEFATHTGAAFAPYLQSAFENVYKMIDHPQGDVRMACIDSICSFITALHKLDDAAGLKRACEIAIPKFAHIMRTDDQVAVVLRMLDVLYDVFKYVPAINSQEHAELIFGCIRDIFTNKMACQFNEESGGGDDECSEESENDEMLFENAANLFPMFGLTLQPELFSLYFGRLYHFYIQRLVGFARNTEHDVAKERGRSSLGNNSYNHRYSERLTEIQLFRFRRRSYPTILQALSEAIVRESVPAAMDNICGAVARLIVTNPDSVPLGQVLPVWLNHLPLKDDTVENDVIQKAFRVLYLKARPSIEAHLEQILAITIEASYKKQMPDVETTESAVALIKEIRANYPELFSKVSNMNPEVFNYVQAL

SEQ ID NO: 29083 - DNA, 2284 bp, DROSOPHILA
cctttctcaattgctgaatcacagtttcgcattaaatccctcatttagctctaaccaactgaaactacagtgcaatatacacaaaaaaataaaaaacaaaaacaaaaggagcgcgagaaatgaaaaagcaaacaaaatgtaagcgtgatgataattaaaaataaatacaaagaagaaaaaaacgaaatttacgcgtggctacaactccgaaaccgaaaaccgcagcaggatctcagcggatctgatcgcactcagctcctggctgtgtctgtgtgcgagtccgtgtgtgtgagagtgtgtacccagagcaagccaaatcaataaataaaaaccaattacaaaaggaaaaaaagcgaaataagaaagccacgacgaggaaacaacctgtacgacagacgagcagaaggcagcagaagacaacaacgaaatattgatacgaaaaataataagagttaaaatcattcacgacggcgaccataacgaactccgccctagcaatgagccagctgggcaccgtctacgccaccaagcgaaggcgacgcaacggcaagaggtgagtccaagccccagtccaatcccacaaaccaataccgatccgaatcccaagatacagatacggatacggatacagattcagatataaatgcacagcgggaggcggaatgtttgtggagcgggttcttgggtgctctgttattactgaaagatttcaatcaatgcgattggctgcacttaccacttaccagcttgccaccttgtggcgccacccgctgacgatccatcaatctccgtagctactggtcttgaataccccagattcgattattaatgatccggtggccactttgttgacaaattgccatcgccattgacttttgacttggccctcggatgaaatgaagggcggtgaattccccctttgccgcccgatagcctcaaattgatttgcattatgcatgtcggggcaggttaccgtgaaattacagtagccaaacagttgatggagatgatgatgaacggtcatgctgatgatgatgacgatgacggcggcccctccggctgttcgctgggggagatcggaatctgcctgtcccaaggtgcacataatttctgataattttgtgtacttagctgctgcaaccgcacaaagcataatgttttcaatataaatatatgagaactcacgcattatcatgagcagcactgctaaatatgcagaaggcgaggagcggcaactgcagcccggccacgccccctcgccaagtgcagaccaccgatcgctaatgttgcgacccccataatcaagagccactgatcagcttcagcgcctcagtcttgaaagggtgcagaacggggcagctcaggtctgcgtagattatcttcggaaaagcgaagaaccaggatctatttaggataagcacgcagttgatagattggttatccaactcatctaatatggcgtgtaatgttcgtctacttagttgtagtcggattagtaaaccagttattaacagtatagctccatttcaaagatactctacggggaatatttactattaaccgcttagctttagtattaaaattttacattagatgttttaaaagatttcgatatagaccttatagataataataactttatatgttattatgatattatttctattaaaactttaccaacttaaactgaaacatttgtttgtacaaggcgttgtgcacttcagagtaagttccttgtgtgcaatttaattccccttctccttgaatttcgtttttattaaagttcccgactacgccgtaaaacttcaacttaatacgtttcaccatcgacaggcagtcgcgtaattcgctgttcttgctagtctgataaagaacaaaaaacgacaaaaaaaaaaaacaattacgctttactgcagttggctgaagaaaaaaaaacagcagggccttcgaagtgccaccccgtggacctggttgtgggcctggctcaaagctgacaccgactctgactcgctcgactgacgcaaaattgtcaccttgcctctccctgctgcaatgcacacctgcaattattcgagtggcaggtcgagagcctcactcttttagggttttgcgccgagcgttgcatttgcccctcgatcatagtttttatattttaatgcctttaatgaactgatcaaaatgtgctcgccttagcttcaagcggctccgttttttagtgcaatttaattgagctcccaagtgctgggaagcagctgccctttgaattgggcttctcacccctagg

SEQ ID NO: 29084 - DNA, 180 bp, DROSOPHILA
atggagatgatgatgaacggtcatgctgatgatgatgacgatgacggcggcccctccggctgttcgctgggggagatcggaatctgcctgtcccaagcactgctaaatatgcagaaggcgaggagcggcaactgcagcccggccacgccccctcgccaagtgcagaccaccgatcgctaa

SEQ ID NO: 29085 - protein, 57 aa, DROSOPHILA
MMMNGHADDDDDDGGPSGCSLGEIGICLSQALLNMQKARSGNCSPATPPRQVQTTDR

SEQ ID NO: 29086 - DNA, 2210 bp, DROSOPHILA
caacattgttgctgcgtcgcctccaacagctgttatcgctctgttgttgttgataaaccagagcgagtcgcactcacacacgcacatttatgatgcgcgtatgcgtgacaagtgctctgtagatttggttttgtttttttaactgcgtagtattttatgctgctctttttttcaatgctgcccccgtgttttatgctctatccatccagtgatggcgtcatagttatattgttgattagctactgcgcacttagatagcataaatatatgattttccacttctttgggtgttctgttagtcgtggaaattgcagtttccctctaacatttttatgctgcgggaaggcctcacactcgcacacaaacacacatgtgtcttatttggcttttccaaacgcaggtagatgccttacatgcatatatacatacacaaaaacaagagagagagagtcggagagggagagcgcgtcggtgtgtgtgtgtgtgtgtgtgggtaactgtaactggccgtttgcttttcgtttcgtttttcgtgcgctcagtctctgatagccaactctcggaagcagaccgataagcgcttttcgggcaattccgccaaaccaaaacaactgaaaaatacccaacagccaagtgaaaagccaagcaaactaagttgtagccaaaaacccaagacaaacgggccctcttctggtgttccgtttagtttttttgggcaattttgaagcaaaatagccgcattcacaaagcgaaacgcaaaaaacctaaaagtcaaaacaaatcagtgcagcagccgccaattgcatcgcatattgctctctgtgttgtgtcagtgtgttgtgtgtataagtgtgcgtgtgtgtgtgagtgctggtaagaaaactgagagaaaagtgaaaagtaacgaccggcaaaagcgcgaaaaacgaaaaacaaaaaaaactttccccgcaggaaactcgaactgcaagctgacgttacaagcggtcaaaattggattatgcttaggcacaaacgcaactgccacgccattcagacgcccagcgacgccgagcatgtgaagttaaagccgcattttcatccgccccagtggctcctgcaccgcgtcaccttctctttggagctgtatcacaagaatatcatcaagaaactgcccagtcttggccaatttcacgtttaccggctgaccaagaacgtctgccagacttaagtaatacccataacaaatatccccatatagtccgcaataaactccacaaaaaagacaaagtgcgtttaataaccattacaaaaaaagtgtaactgattgggaagaagtgtgcaacaaatatccacaaaatcaaatactcaagtgcaataaaaaaagtaaaagtgattaaagtgcgaaaagaaaatgtggccaaccattaaggccaagatcaagttctaagttcaaataaacagacgtaaaaaaagactagaaaatctagcgtgttttaaagcgctggaaactaaaataaccccccctgaaagtagtataaccgaacgtacaaaaatgtccaccggccgccgtttggccaagcgctccatcatcggcaccaaggtgtgcgccaagggtccggatggcctctggtactccggcaccatatccgacgtgaaaacgccgccctcgtacagcggaccgctctcgccgccgccgccgcccacttttgtggtgcccggcgaggcaccgattaatgccgatacgcgctacctggtccgtttcgatttcaagaccgccgtcgagtccccaaccgctaccacgtcgtccgcggcctcgacctcgtccacatcctccacagatccgtcggtcatcgtggaaacgcgtcgcgctgccaacgtacacatcagtcccgctcaggcactgcgtcgcagcgccatgatcaaggagttccgcgagtcggatcttattggacccggattccggtccatcatggacaccgaactgcagcctggccagcgggtctacttcacctacaatggacgcgagcagagcggcgatgtcgtcaaacacgacgctaccaaggatgaggtgattgtcaagatcacaacagttggaaatgaggtgagtgggcacatcctttacgaatgtatattatctagaaaattgggtatgggtattttcaaccttcgagaaactcttcttgaatgaaggcggaggatatagcaaatccaagcgggagtttctgcat

SEQ ID NO: 29087 - DNA, 210 bp, DROSOPHILA
atgcttaggcacaaacgcaactgccacgccattcagacgcccagcgacgccgagcatgtgaagttaaagccgcattttcatccgccccagtggctcctgcaccgcgtcaccttctctttggagctgtatcacaagaatatcatcaagaaactgcccagtcttggccaatttcacgtttaccggctgaccaagaacgtctgccagacttaa

SEQ ID NO: 29088 - protein, 69 aa, DROSOPHILA
MLRHKRNCHAIQTPSDAEHVKLKPHFHPPQWLLHRVTFSLELYHKNIIKKLPSLGQFHVYRLTKNVCQT

SEQ ID NO: 29089 - DNA, 2636 bp, DROSOPHILA
gcgctcagtctctgatagccaactctcggaagcagaccgataagcgcttttcgggcaattccgccaaaccaaaacaactgaaaaatacccaacagccaagtgaaaagccaagcaaactaagttgtagccaaaaacccaagacaaacgggccctcttctggtgttccgtttagtttttttgggcaattttgaagcaaaatagccgcattcacaaagcgaaacgcaaaaaacctaaaagtcaaaacaaatcagtgcagcagccgccaattgcatcgcatattgctctctgtgttgtgtcagtgtgttgtgtgtataagtgtgcgtgtgtgtgtgagtgctggtaagaaaactgagagaaaagtgaaaagtaacgaccggcaaaagcgcgaaaaacgaaaaacaaaaaaaactttccccgcaggaaactcgaactgcaagctgacgttacaagcggtcaaaattggattatgcttaggcacaaacgcaactgccacgccattcagacgcccagcgacgccgagcatgtgaagttaaagccgcattttcatccgccccagtggctcctgcaccgcgtcaccttctctttggagctgtatcacaagaatatcatcaagaaactgcccagtcttggccaatttcacgtttaccggctgaccaagaacgtctgccagacttaagtaatacccataacaaatatccccatatagtccgcaataaactccacaaaaaagacaaagtgcgtttaataaccattacaaaaaaagtgtaactgattgggaagaagtgtgcaacaaatatccacaaaatcaaatactcaagtgcaataaaaaaagtaaaagtgattaaagtgcgaaaagaaaatgtggccaaccattaaggccaagatcaagttctaagttcaaataaacagacgtaaaaaaagactagaaaatctagcgtgttttaaagcgctggaaactaaaataaccccccctgaaagtagtataaccgaacgtacaaaaatgtccaccggccgccgtttggccaagcgctccatcatcggcaccaaggtgtgcgccaagggtccggatggcctctggtactccggcaccatatccgacgtgaaaacgccgccctcgtacagcggaccgctctcgccgccgccgccgcccacttttgtggtgcccggcgaggcaccgattaatgccgatacgcgctacctggtccgtttcgatttcaagaccgccgtcgagtccccaaccgctaccacgtcgtccgcggcctcgacctcgtccacatcctccacagatccgtcggtcatcgtggaaacgcgtcgcgctgccaacgtacacatcagtcccgctcaggcactgcgtcgcagcgccatgatcaaggagttccgcgagtcggatcttattggacccggattccggtccatcatggacaccgaactgcagcctggccagcgggtctacttcacctacaatggacgcgagcagagcggcgatgtcgtcaaacacgacgctaccaaggatgaggtgattgtcaagatcacaacagttggaaatgaggtgagtgggcacatcctttacgaatgtatattatctagaaaattgggtatgggtattttcaaccttcgagaaactcttcttgaatgaaggcggaggatatagcaaatccaagcgggagtttctgcatcctttagatactttttcattttggggggttgaccactgcagctgagaaaggctgctggctgtgctgtcgacgtcttcatcatcgccagcatcatcatcatcaccatcaccatccacatcatgatgagcatcatcagctttgtggggcggcgaaaagtgtgtcaaggttggcttggccgcaccacagcatgcccctccccttttttgggggcggcagcagcatacacatgcacatagacagatgtacatacatacatatgtatctatgcgcctatgtaatgggttattcagagcatatatttacttgcaccccagtgtacagtactgtacgatatacaactgtgcaactatgcaacgaataaaaaaagagaaaagcacaaaaaatacttgtcgagggtcgcattccgctttttggcacgtaattgggttacgctctgggttggccttcttgctcgtgcgtttcgatatagagaacccctctcgcttgagggccagttcgagcccccgagattagattgaccagaagctaaagcgacttcagatttaattacgtatcttcgatgcacagcgaaagcgggaaatgtgtggcacttttatgttgcatctgattcccaacgagccttttttgatcccatgctaaaatagaatacgaaattccgtattccatatatctctccagaaatgcaatcgtttataaattttattgcttagctcttactacacatcctatatcgctcagtcgtgagtttattcccccaattcgatcccacacacatgatctagctaatcctccagtcacagcccctttgccattacgtcactcgaatcgttgaactgctcaactgctaagcaaacacaaaaaaaagttaataaataaaagcagcgaaaaataattcaagagtgaaacatcatcggttgcggcatttatagaatcgccccgaatccgaacgcgcaaacccaa

SEQ ID NO: 29090 - DNA, 636 bp, DROSOPHILA
atgtccaccggccgccgtttggccaagcgctccatcatcggcaccaaggtgtgcgccaagggtccggatggcctctggtactccggcaccatatccgacgtgaaaacgccgccctcgtacagcggaccgctctcgccgccgccgccgcccacttttgtggtgcccggcgaggcaccgattaatgccgatacgcgctacctggtccgtttcgatttcaagaccgccgtcgagtccccaaccgctaccacgtcgtccgcggcctcgacctcgtccacatcctccacagatccgtcggtcatcgtggaaacgcgtcgcgctgccaacgtacacatcagtcccgctcaggcactgcgtcgcagcgccatgatcaaggagttccgcgagtcggatcttattggacccggattccggtccatcatggacaccgaactgcagcctggccagcgggtctacttcacctacaatggacgcgagcagagcggcgatgtcgtcaaacacgacgctaccaaggatgaggtgattgtcaagatcacaacagttggaaatgaggtgagtgggcacatcctttacgaatgtatattatctagaaaattgggtatgggtattttcaaccttcgagaaactcttcttgaatga

SEQ ID NO: 29091 - protein, 211 aa, DROSOPHILA
MSTGRRLAKRSIIGTKVCAKGPDGLWYSGTISDVKTPPSYSGPLSPPPPPTFVVPGEAPINADTRYLVRFDFKTAVESPTATTSSAASTSSTSSTDPSVIVETRRAANVHISPAQALRRSAMIKEFRESDLIGPGFRSIMDTELQPGQRVYFTYNGREQSGDVVKHDATKDEVIVKITTVGNEVSGHILYECILSRKLGMGIFNLRETLLE

SEQ ID NO: 29092 - DNA, 2318 bp, DROSOPHILA
aagatcaagcgaaaatttgaataattaaaaataaacacgcgccgtgcgagagagtgtgagtgtgcgtgccgtgtatccgtcagatacgcaaagcaaagcataagcaaatcgctgacgtattttcccccgaataccgttatatagccggccggctttttgtgcccaattaacgcacattcaacaaattgcccagacgcgaaaaacaaattgtaacattgtatcggaatatcgaattaaagcccagtgtatccatccacccgtaataaattgaagcaaaaaataaaaaagaacagaaacaacataaaaccgaaaagggaaaccatacacttacctttcgtctcatttaatttcgttgcggttcgttctggtgcagtgtaatagagaaaagtttataaataaaatatacaatatacaaataactgaatgcagatgtttggcataataagtgtcacaatcaattgctaagcggcgagatcttgaaaaatacgctaaaaggtgattgcataaggatatatggctatatcgcaactgttaccaagtgacctcattcaaggttatcctcccccgtttgcccacagatattgcaattttactttgtttctcaataagcgcccacggtctatttaatttctcaattttttgcatactcacccggttaaggtagtttcatacatatgtatataaggactgcttacgatggtctgtaattaagcttgaatcactcgttgaatttgtacttagtttttgccccgtgaactataatttaattggtttttcacttctcggaaatagtttttgcctattatcaaatcagatttccagggatttcgccgcggaatagatactacaattattgggaaacactcgccttgcgtgacggatgtcgatgcaacaatgttagatgcagataccccccccaggaatatgtgttccatgtcgccgttttctcaattaggaatcgctctaaagtgcccacactgggtcattaatttgtaatgggatgctcaataaagttgtgcgctttaattgttccagcgggtgactcatggcgaccgttgaacagcaccaggccagccgataagaagcttctgactaacccaagtccgttctctttttcccattccgtttgcaggaacccattgagctgaagaagcgactggaggaagtgcgtctgctggaatcgcgacgctccgcccgtctggcagaccaggatcgcgacacggactttgccagactcgccgacatgagtggcgaacgccgcagaaccaccacacacagtattgaggtgccatcgcagctgacggcgcagcacaagtgagtacagacgctaagtttctcaaatatagtatagtaaaccagcataggaaacagaaatcatgccagattaatcacaattcatgatggttggccccaggaatagagaaacctaatggcgaaacctcttggtttaagcttaaggtaaacactcagaatatctgtttacctgagtaagaacggccaatcattttgccggtcctacccggtttttaatcgcagttttattcgttcgttttgtgtgcttcgactttggcttacggcttttgcataaatatgcaacgattggcgtctgtggagactgggccatatcaataatttataagtggcgacaaattagcggaaccggccaccaagtcacggacatcgaccgatccatgtataatatctataataaaattgtgtctccgtcttgtcggccagctgcgccctcgaccggccacgcccagctatttagcatagacgccgctttaactgcacttacataaagagttctcagcagcacccccgcgtttcgctgactttcacaatgctccattccactgggacgacagctgattgcaaaataattcaaattttcaattactacccgctcagacgtcgcgacgactacgtcgaacttaaagacggcggcgacgacaaaaagtacaaaatacgaaacactaacatttgattacgcaggcaggcggtcgggggccgggtgtcatagtctaagtgagcgctctaatcaaacggggaacttttatttctgaccggactgggtatcctgaattcttttgtaattccaagcaaattaaatgtgaccaagcaaatcaaattagcgtcccttttgtagtgttaccatgcaacggaaaatgaggtcagaagtaggttcattttgggcaaaaacatatctgtctatgcatgcatatatcacagatatcacagctagtcccttggccccattaatgtgacgacaagtgtagagcattaaatttccgacttacaattggagcgtttgtcac

SEQ ID NO: 29093 - DNA, 201 bp, DROSOPHILA
atgctcaataaagttgaacccattgagctgaagaagcgactggaggaagtgcgtctgctggaatcgcgacgctccgcccgtctggcagaccaggatcgcgacacggactttgccagactcgccgacatgagtggcgaacgccgcagaaccaccacacacagtattgaggtgccatcgcagctgacggcgcagcacaagtga

SEQ ID NO: 29094 - protein, 66 aa, DROSOPHILA
MLNKVEPIELKKRLEEVRLLESRRSARLADQDRDTDFARLADMSGERRRTTTHSIEVPSQLTAQHK

SEQ ID NO: 29095 - DNA, 2720 bp, DROSOPHILA
atttacttttatgcgattagcaacgatctgcggcagaaatttatcgttgagtttagtaaatttaattgggacggaaatccaggcaaaaggtgatggtgccagcgctagtgctgttgcattagacaaaaggctaaaacctggtagccgagtaataaagttgtacggcccagcacagctcttttggccaaggaggcagcatttggctaagtgcagacttggccgcgattgctcgcggcttttcacattgcacaatggtgatagtgagtcggttggcaggcacgagttggttgtgttttctgttttctgttttctgtttcgtattttgtgctttggcccaaagcagatggccaaaagataagcacagttgaggagttctgaccgaaattctgagcatcaataattgcttgcttcactagcactccatcttctgaggaaaccgccacctgcttttcaactttaatcctggtacgcagcaagtgctggaatcctttgaagagtcttaaaccacttgtctcaatagccgccatttggcttaaatgatttggctagaaggggggtagcactctgcttgattatggcaaatatgccaaatcagtttttccgtttcaaatgctttgaatttatgagagcgtcgcgtctttatggtcatcccccgccatggtcatatggtcatttggccagcgaaggttgcgccaaggttagccaacttaaagccaccttaaagccatcttgaaactgcatggaaagccatcggaactgggaaatctacgggctgatattcatttgacgtctgttcgaaaaatgtgaggccatcggaaggaggccaattaatgacgaaacaataacacacacacaatgggcggcggaatttggtggccacagaaattagttaaatggaaaaatagttttgcgatgttttgcattgaaatgccgctcgaagcgattatcgctgaaaagacctcgacggattgttgttgctgttttgcgaattacaacaacgatgggcggtcgctttgatgtgtctaagcaaatgccgccaatgtctgtgtgtgtatatctttatcgcccagtttctagcttctctatatgtagatgactgataaaatcaagaatgataatctgggtcaatgtttgaagcgggaattgagttgtttaaaatgtgttatatatagaactaggccatgagtacagctctgtttcaatgcaacgaagaggtgctttcttacaaataatatatattatttatttactaaatcctctgtttttcccatcttatttttttttgcagttcccggaaacgtccgcccagcgatcaccaggactacggcaactatctggaaacatgccgtgccgccgagattctgtcatcgatgaagttgcagagtccgcatggctgtaggtcatcctccttttccgaccctgtcacacccccttttcgatcacgcctacatataagctaattaattctatccatttcaccccagcaatggccgacaagtgctcgagtcccggcagcagctcttcggcttcctggagctccggttccccgtcgccgccattgagtgacgacggccacgcccaccacagcccacacaatatcatgtcgccccacgatgcggacaacgcacgcacacgcacagcatccgtgtccacgtcggacgagggcattgtcatcgactacaaggaggagcgcaagaaaaaggtgggtgattcgatctaaggccccaacatctagatataagaaacatatagagattggtgtacaagaatgcggtcagaagaatctgggctaacggcggtggagcgtgacattttgttgcattttaattgcaactttgtgtatagattttaattgctataattatgtaaatgtcggtctgttcttggcacggccacacggcgtatgcttgatgcccaatactcatacgcaatgtagcgctgctgctgccggcgaaagaatacagaatatatagaatatcaaataaatgtcgacaatgattcaagcacaggagaatggcaacgcatcaatcacacaaaagggcaatgtcagcagctcgttaacttgtcaaacacacagacacacacaaacacacacaccgcacacacggcgaaatccaacaaaatcaataacccccagccatacgataccgattttcaggcatactccgagagttctagctctttaattaattatgtttgaactttaagggtctcagaccgagaaaccgaaacaaccgaaacttacgcaactgaaaaccagcacggaaacgaacagcaacgcccccatccagaaaacttctgcccgtctgccttttgtttgcccaactagttacgctttctcacccgctcgtgtgtttggctatttcgtttagagcttttaagggctcttaatagcaaacaaacaaaaacctaaaaaacgagcagccggcaacgacagaaataacaacaaccatagccgagtacaaatatcaaagtgagcagcagccgcggtagaatatgttaaccttgaaagtctgattagattttcatatggtggctatatgttttatttacacaacgtcaagcccaaagcaacaacgaaaaaataatacacttgaccaaaagagtttgattggtatattttatattggaaaatattcaacacttgatccatgatgtaaatcatttaaatatattcagcccatcagattgctgtttagaatatacaatgaccattgccc

SEQ ID NO: 29096 - DNA, 384 bp, DROSOPHILA
atgggcggtcgctttgatgtgtctaagcaaatgccgccaatttcccggaaacgtccgcccagcgatcaccaggactacggcaactatctggaaacatgccgtgccgccgagattctgtcatcgatgaagttgcagagtccgcatggctcaatggccgacaagtgctcgagtcccggcagcagctcttcggcttcctggagctccggttccccgtcgccgccattgagtgacgacggccacgcccaccacagcccacacaatatcatgtcgccccacgatgcggacaacgcacgcacacgcacagcatccgtgtccacgtcggacgagggcattgtcatcgactacaaggaggagcgcaagaaaaaggtgggtgattcgatctaa

SEQ ID NO: 29097 - protein, 127 aa, DROSOPHILA
MGGRFDVSKQMPPISRKRPPSDHQDYGNYLETCRAAEILSSMKLQSPHGSMADKCSSPGSSSSASWSSGSPSPPLSDDGHAHHSPHNIMSPHDADNARTRTASVSTSDEGIVIDYKEERKKKVGDSI

SEQ ID NO: 29098 - DNA, 2774 bp, DROSOPHILA
accctgactgccatgacatttgaataatgcacgtagcaagtgaatgggcggacaggagcaggagcaggagaaggagcaggagcagaagtggaaccaaaggtatgggtggcgggggaaaaagaccaccaattcattatcgattgaatcgatgtgcaatgagtactgaacactgatggaaatttcctcgaaaaaatggtagtaaaatggaaggcaaaacaatggcacagattcgataatgctgcaattcaataaaaacaggcattaaagaccagctggagcaatggacttgaagtttgatgaatcaatgggcttttgttttctattcacttgctggtcaaatgtaattgtcgtacacccctcagtccaaattccattagcagtcgatgggcggagacaacctcaaaccccggcggctctgtcaacagctcaacatatcaatcatacgcagtgtggtgcgtgtttgttgcgtgctctaatgctttgactgcgctgtgctgggtggcaaatacatgcgacgcctggtcttataaataatttagaccgcatattactccaaaataacaacaccccccctccgttgacacgttcactttgcctccaaaaaaccccaccactcgcacacacacacacacacacacaaacggaagaactgtcattagtgaattatttaaattacgccgacgccaggaaagcaaatattgcagacaggaaggaatttcccgctgagagagttttgttaaattaacttactggccaaagaagacaacgtacatgcgataaaaagcgttttaaattcatgtgtatttgaataatacaattgggagaatgggtggcaagtttagttttattaaaaatttaaaaatacgaaaatatacattcatgaaaatgcaagaaactgatagacaaggcgagtaattcattccttcatattgatatccttatatcttattgaaagaactccttgggattgttagatatagcgaggagaattcgtcaccactcacctgagattctcgatgcgcggccttcggcactgcggccgattgcgtcggtggctgcgatccttcttgcagcggcagtcgcagtgcatgatgcacagggcaatggacgagatgaccgttatcacaaagggcaccgcgaagaagtgaatgatcatggccacctggtcgtcgtggttgtacgatgtcagcaccaccgtcttgttctttcgcgaatagaagcacggaaagatggcaccctcgatgccgtagtaaccgttaaagttcttacacgtcaccgatggcggatagccgcatcccttgatattgacaagcagtgtcgcctcgccggactgctccatatcggacgtaaagttgctataatcggtcatattctccggtatcgtaatgttctgctcaatgaacgtcacatagatatgcacgcagcggtacaaatcggaggtgcagccctcgcgacacgaactccacgaacagttgaatatacccactagatcctcgcgacgcgtcgtcgtgcacagcgttggcttctcgataaaatcgtggctaagcgtcgatatcgccggatccacatagagcggtacgaggaagagcagcgatgccccggcggtcaccgagaagaaggccagtgtcgaggttccatagaaacgcgcacgttcccgccacgaacgaaagcgccgattgccatttttctttttcggagccagttctcggattttacgtaaccgtagctcttgttgttgctgctcgagtagtaattccgaactgccactcctcatattattgtcggtgcacacagggcgctgatgttgctgattgttgctgctgctgctgctgctggcgttgctgcggctgctgctgctgctgctgccgctgctccttgtatcactgatgttgctgctgtcgtcgctggctgcgcagcagcagctgcaacggcatcaacgctgctcctgctccgtcgccgctccgtcgctctgctgcgccccgctctgttgccgttgttgcacttgtgtgtgcaactgcgacgcctccgtccgcctaccgcaacatgcagagcgcggttttgtttttaggttatgtacacacgcttcggcgcaggagaaaagctagagaagcttacaccacagcgagagagggagagcgcgagagtgcgagagcgagtgaatagagatagagatggagaacagctgttccggcgaaagtccgcgaaggggagcgacagagacagcgacagggagagagagagagagagggagacagagaagggaagagacagcgagtgacagtcagagaaaagcgcgctttggcgttttcatttatcctggcttattgtttactccttttcgctggtttatgcacttttcaatcgcagctaaaacactgaaaaataatattacttagttggcttttaactacaaaacgatatgcggcttttatggcatttctttacacattttgcggtttgcgtgggtggcacttttttcacaactcacagctgttgatgtaggttagttagagaggtacatcttgcagagcgattgcaaatgagagaatgaatgggagagtgtgtaccgaagtcgacgtcggcgccagctgcgacgccatcgtcggcgttcgaaagtctactggtttcgccctagtgactgtgtaaccttttttgcctctgtgtgttgtgggtggaattatttatgctacacatttttgtgcggcggcttttcgcttttcgctttctggttgccagttgccagttgccagtgccttggcattttgcttattatt

SEQ ID NO: 29099 - DNA, 774 bp, DROSOPHILA
atgaggagtggcagttcggaattactactcgagcagcaacaacaagagctacggttacgtaaaatccgagaactggctccgaaaaagaaaaatggcaatcggcgctttcgttcgtggcgggaacgtgcgcgtttctatggaacctcgacactggccttcttctcggtgaccgccggggcatcgctgctcttcctcgtaccgctctatgtggatccggcgatatcgacgcttagccacgattttatcgagaagccaacgctgtgcacgacgacgcgtcgcgaggatctagtgggtatattcaactgttcgtggagttcgtgtcgcgagggctgcacctccgatttgtaccgctgcgtgcatatctatgtgacgttcattgagcagaacattacgataccggagaatatgaccgattatagcaactttacgtccgatatggagcagtccggcgaggcgacactgcttgtcaatatcaagggatgcggctatccgccatcggtgacgtgtaagaactttaacggttactacggcatcgagggtgccatctttccgtgcttctattcgcgaaagaacaagacggtggtgctgacatcgtacaaccacgacgaccaggtggccatgatcattcacttcttcgcggtgccctttgtgataacggtcatctcgtccattgccctgtgcatcatgcactgcgactgccgctgcaagaaggatcgcagccaccgacgcaatcggccgcagtgccgaaggccgcgcatcgagaatctcaggtga

SEQ ID NO: 29100 - protein, 257 aa, DROSOPHILA
MRSGSSELLLEQQQQELRLRKIRELAPKKKNGNRRFRSWRERARFYGTSTLAFFSVTAGASLLFLVPLYVDPAISTLSHDFIEKPTLCTTTRREDLVGIFNCSWSSCREGCTSDLYRCVHIYVTFIEQNITIPENMTDYSNFTSDMEQSGEATLLVNIKGCGYPPSVTCKNFNGYYGIEGAIFPCFYSRKNKTVVLTSYNHDDQVAMIIHFFAVPFVITVISSIALCIMHCDCRCKKDRSHRRNRPQCRRPRIENLR

SEQ ID NO: 29101 - DNA, 2396 bp, DROSOPHILA
ctgcccccagaagtctagccgcaaacgaattacgaccgcctactaattgcagcaagttaaaacgaaaatggtgtagtttccgcttttccaagtcaagctgctagcaccgcaccgaaaataaatgggattaaagatgataaaaggttattacattttattaacatatcccacataattttcactttagaacatcatgctaatccggtttattagatggtatcttagcaagcagtcctgaatatttctctctgtgtacgcatttgtttaactgcctggcaaccacgtgcgttaacaatttacgccgcttaagtagcgcaggatatttatgtttatgattgcgttgcggttcgcagactccgccccgaaaatggcattcagcttttcctgctctcagctcaaattacgcatacgccatgtgcgcgccctccgcaaactcagcttaagtgggccaaaatggcggcacaccactgcaattcataacaattgaagctcgctggcattctcaaaccacaaaagttgtaaacaaatcgttaatcacttggcccacaaggccgaaacgggaaaccgaaaactcagttttcaatttgttcagcagtcgtcgtcgcacaaggacaacatttgccatcacaaggacgcaatcagtggtttgctgtacccccgaaaaccgtgcaataaacatatgtatatagatataaacgggcatatatatacagtgagccagcatacttaaactgggtcaattgccggcgtcgctgctgcagcgctgtcctaaccttcagcataaaaacgcagcataaatgcaggcgcataaaaacgccaagagctgggcgccaaaagcgtgtcaaggcgagcgacaaacggagcaaagcgaccggaaggtgacccagtaaataaggggctgcacgggtggcagcgggtagcagcgtggtggtcggctgggggagttggcaaggacgcgtaccggacccgggccctgttatcagtgcaggcggcatcgagcatggccagccaggcagccagctcgttcgggcggcatcgtttgccgctcgggagtccaaggacttcgaatctggctttcagccaagcagccagccagccagccagttgcattgtccgcactcacacagtcgcacttggcaccgggccggcaccggttcgaatcgctcctgttcctgctactgctccacagctgcgactgcaaccgctaaagagccgccagttggagagctgctgcagaaccaccatcatgcacactatggcaatgaattactacgtggagcgcagtgactacgagggctacggtcgccacagtcccacgggggatagttgctcgcgctcctccacgtcttcctccgaggattcagtgatgcagccgtattcccgccaagtacgctagatattaaaggatatatttaattaatatttatattcaagagcaaactaataatatgtaatatgtaatcaatctaatcagaatcaccttctcttgtcattgcagtccaaaaagttccgatgcgtctatcgaggatgtgttggcgtggtagacgatctcaatggagtcgtgcgtcacattaggaaaacacatttggggtaagtgtacaagtgggaatggcactgctatcagaggattaggtggcgagcagcaagtgggcggggccttgacttagccacccgaccttctcgttccttccccgccagcacttccacacgcccggagcgggtgctgaaggtggtgttggtggtgcctcgaaagtagagcactcgagcacagtaagcaggtcacacgagtgcggcgtagcccctctccagcacgcagattactttgcaatgcgcacctgcagcagcaggccagcaatagcagcagtgggtggcaggtgcagtggtggtggcgcttttgaggccaaggtccaattcaaagcgcccacacacgatccgcgctgagctttgacacttgccaatctcgtttcctatgtaaatcgagaggggttccaagtgggggtgcacaaataaaagacgcggtggggctttgttttttgctgcttttgctttgacattgttctctcatctgcatacatgcggtatatctattcgtatatatatatatatatatataagtgtatatgttttgctttatatatatgtttgcagtgtattgggtgttgagtgtttttgtgtttctacttgctgctctataaagtacagtccgcaaacaggatacgaatgcgagaatgtcggggtgtgtataggttggcgtacctaacgcgtatatctaggtgtatatgcttatatagcgctcggcttgctggcagcgatatagttgggtctatgacaggatctgggcttggatgcgtaacttaggatcgaacgaggtgtgcctccactgaactgaattaatc

SEQ ID NO: 29102 - DNA, 396 bp, DROSOPHILA
atggccagccaggcagccagctcgttcgggcggcatcgtttgccgctcgggagtccaaggacttcgaatctggctttcagccaagcagccagccagccagccagttgcattgtccgcactcacacagtcgcacttggcaccgggccggcaccggttcgaatcgctcctgttcctgctactgctccacagctgcgactgcaaccgctaaagagccgccagttggagagctgctgcagaaccaccatcatgcacactatggcaatgaattactacgtggagcgcagtgactacgagggctacggtcgccacagtcccacgggggatagttgctcgcgctcctccacgtcttcctccgaggattcagtgatgcagccgtattcccgccaagtacgctag

SEQ ID NO: 29103 - protein, 131 aa, DROSOPHILA
MASQAASSFGRHRLPLGSPRTSNLAFSQAASQPASCIVRTHTVALGTGPAPVRIAPVPATAPQLRLQPLKSRQLESCCRTTIMHTMAMNYYVERSDYEGYGRHSPTGDSCSRSSTSSSEDSVMQPYSRQVR

SEQ ID NO: 29104 - DNA, 4776 bp, DROSOPHILA
ttaaaatggtccgtgaaatcaaacagaaactttaacgtcaggctgataaccgcgaagttgtgcaatagacggtacataaaaaggacgcggtatctgcgcaaatttcctgtcccaatatccgtattgaaatccaggattccattaagggcacaaaagtagcccaggctgcgttgaataattctccttagagaagccatgaccctgttcactaactttccgccaagcaactgggcttcaatcaggctatacataaaggtattatttattagggcctgtcatttcgattaccaaagataaaatcagttgggaatacaccccacgaagagcacttgttgcttataattaattgactttggccagaactcatcgatttctcttgccgccttcatatggaatcataatcgtggttgaaagggaagcacaacgaaagggttgaactcataatttggataaaatgtaccaatattgttaacaattttagttttttctttggttttttattcctgataaatcagctttcagctctgggagggcaaacattttccgcgtaacatcgactgtctgtctgatccacgaagccgagctcgactatgcgatccgatgccagttccatcgatcggctgcggtattttagccctctgctcagccagctttaacttcagtttggcagcagcaatcacgcgaatcagttcgaaacagtagcgagacgaccccatactattcgccatccgtatccgagtcactgcatctgaaaaactatgtggaaaacgctggggcttgacggttgacgaatttcagaatagtcatcaccttgagtgcagatcatcagctgggctaattgaatcgggatcgcaaaaaaagtggaaaataatgaacggactgcaattggggggatagcggataaagcttgccaatttttgttgctaaatagccgcgaacgcgacaatcagagtgctaagtgagctatcaatcagttcggaccgaggtcagctgcattgtcatggctggattggtgctactgttcacctggctgttggtccacctactccaggtggatgcccactatatacaaattgaccatgaagaatttcgtgccagcggctttccgcatccgcactttccgccgcctccgctaacgccgctggatcatctacctcaggtgctggccgccaaggagctgactcccgccgaggtgatggtggacctgaccaacgacctgacccaccgcctgctccactaccattccatcctgaaccgcaacaacttcgccttctcgcccactgccttggtcagtgtgctggtggctctgttcgagggttcggccgggaataccgccgaggaactgcgccatgtcctgcagctgcccaacaacagggatgtgacccgcgtgggctaccgcgacatccatcgacgactgcgggtgagattggattccaccaagtaggccattgtggcagctgctttgaacttaacccattgccatggggggtaatccgctcgagaacgccatccaaattaagtggccacgcacatttacacgcctggctaagcaccagtccgaaagtgaggtggttagaatggggagcaccaagtggtcattgataaagaacaaaatgaaaaaccagatatgcgtactgacaaacaaattgccccaggcccatgaccaaagctcaatcgatctccaatctggtttcaatagttcgtcgaccccattggatcggttaatctcccaaaaaactaaccagcatttgttcaagtgaatagattttttaattgtccatcgttgcgtacctattgctgatcagaatttgggtaatgaaattgatcagtaggctcgttggagggctaacttaattttagaaatttttttaattagcagagtctaaataacatatatattttacaacttgggactctataaaggacatactcagcatatatgctaaataatgattgataatctaatgttatagatttttattctattttccagacttacttttttggctccgacaatccactgaaaggactcagcttgaacaagggcaatgtcactgttctcaaggactttgagacggttcttatgttttacggatatgacttaagtgtagatatgctctcctccacaccagccaatctcacatcagatgccgagttggtcaacaccacaatggccagcaatacgacgaccatggaaatggatgcggaaaccacaacgtcaaaggatgcggagagcacaacagaagagccggccacaacaaccacagagccgccggcgacgacaacggcagagccaccaaccaccaccacagagactccagcggaaacggaggccaccacagaagcacctgctgcaacatcgggtgaagaggaggccgctgagcccgctggtgaggatgaagcagccgagttagtgtccgcttttgtagccgaggaggactccgagcctctcttgcgcatccagaaggctcgagtctccagattgcccaccagcaaactacaggcgccgctaaagcattcgaatccaatcactcccaagcccatttacctgcccagtgcgcgaacagtggccatgccaatgccaatgatggctcgccaggtggcggagcgaaagccaccaggaacacggcaagtaatttctattatagcgccatccgtgcaaccagcaaacatatcggtgactcgcaagacgaagacagcacgatacaagcgtcatgcgataccagcatacaaggatctggatgcaaatctctttctgaccctcttcaatccgcacacgcatgtcccgcaccacccgctgcactttccgccgccagtgcccgctgcctttgcacccatcacgaatgattttgagccacactatatcggagaggcggccgagggaaagtccaactataacacggatgtgatcagccacgtattctacttgggcaatcaacaggtggtgcacaccaccttcaaggtatataacgcagtgctgtactacaagtactttgagcacctgaagatgagcgtgctggagttggaattggacacaccggagtacaacctaatgatcctgttgcccgactaccacacggatattgttgcagccgccgcctccttgaaactgggaccaacccttcgactgatgcggaagcagttgaagccacgctgggtgcaagccatcattccagatttcaagctgcacggcaccatgtttttgacaaacgacttgcagaatgtatgtattcatttgtagagtgcatttttgtgtttttattgaggtgtctttggtttttgtgctctctgttgcagatgggaatgtaagcatgggtgtaatagctccagttcctggcttcattttactttcgttgcagctgcgacgtattcgaaccaaatcgcgccgatttcaggcccatgactgaggagaagggcgtctacgtgcgacacattgagcaatccatagacgtcaccatccgtacgcatcccatcaatcagctgaagcgtaagtgtctcgcattgcagcacacctgaatggaatggagtggaggcattgagccgcaacgcattgcgaatgcccaacctaatggtgttgcaacagttgcagcctctgcaacacgagacaaagtgcaataaacacttccttttactctctaggcaactacggcgcccaatcgaagcccattcagatctctgtgaatcatccgtttctgtttttcatcgtcgatcgcgacttggacgtggctgtgatgtcgggccgcatactgaatccgctgaacgtacgcatccaatgaagcacgacgaaggtcgactatcgaaagtgatgaaccctttgttcccggtgcctactaatacgagatgttagcattgcttagattaaaatgtaaatatacgggggtgtcacgagactctgggcagatgaaatttgaatggaagtaaagaaacttcatacttaaaattatcattaaattaaacaacatttgttgaatattttatctatataatatttttagaaaacacatctcgtgacaacccatttaatgtaagctcaccccattaaagtataatccttagtctaactagttctgtgggaaatcggttttagtactgatacgttccaaacactgtacagacgcaaaagagactggtgttgctgaagacctcggagacggaagtgtcgcagtcgcaatcccagcagcagcgcgagttgtaagtggcccccgcacccagctcctggcctagcatcacctggaccacgtgcttgtaccgcttcaccagggagctgctggctatctgctggttcacctcgtcggcgatctcactggtccacttcttggcgacgtccttgtcataggttttgtcttcaaatagtgaagttgctaggcaacgcgcagtatatttatggattttcacactaacctttgagtttctcggccataacgttgttcattatgctcttgatggtgggcaggggaaacatctccccaaaggccggtcgcatgctataggcggtgggctggtcgccgggcttttccgacttttcttgattttccaaaccatcggctgagccggagtgcagacttcctgacgccgacttttccgacttcctatccgctgggttgggcactgttaaagtctggacggatttggttgtttcctcagtggactgtttgtcagccatcttttgtcaaattcagcgtaattccctttcaaagtgtttaagaaagcaccaagaaaatcttggttgctatgtttgtttacttattgctagtgttaccagatggtaaaatggct

SEQ ID NO: 29105 - DNA, 1890 bp, DROSOPHILA
atggctggattggtgctactgttcacctggctgttggtccacctactccaggtggatgcccactatatacaaattgaccatgaagaatttcgtgccagcggctttccgcatccgcactttccgccgcctccgctaacgccgctggatcatctacctcaggtgctggccgccaaggagctgactcccgccgaggtgatggtggacctgaccaacgacctgacccaccgcctgctccactaccattccatcctgaaccgcaacaacttcgccttctcgcccactgccttggtcagtgtgctggtggctctgttcgagggttcggccgggaataccgccgaggaactgcgccatgtcctgcagctgcccaacaacagggatgtgacccgcgtgggctaccgcgacatccatcgacgactgcggacttacttttttggctccgacaatccactgaaaggactcagcttgaacaagggcaatgtcactgttctcaaggactttgagacggttcttatgttttacggatatgacttaagtgtagatatgctctcctccacaccagccaatctcacatcagatgccgagttggtcaacaccacaatggccagcaatacgacgaccatggaaatggatgcggaaaccacaacgtcaaaggatgcggagagcacaacagaagagccggccacaacaaccacagagccgccggcgacgacaacggcagagccaccaaccaccaccacagagactccagcggaaacggaggccaccacagaagcacctgctgcaacatcgggtgaagaggaggccgctgagcccgctggtgaggatgaagcagccgagttagtgtccgcttttgtagccgaggaggactccgagcctctcttgcgcatccagaaggctcgagtctccagattgcccaccagcaaactacaggcgccgctaaagcattcgaatccaatcactcccaagcccatttacctgcccagtgcgcgaacagtggccatgccaatgccaatgatggctcgccaggtggcggagcgaaagccaccaggaacacggcaagtaatttctattatagcgccatccgtgcaaccagcaaacatatcggtgactcgcaagacgaagacagcacgatacaagcgtcatgcgataccagcatacaaggatctggatgcaaatctctttctgaccctcttcaatccgcacacgcatgtcccgcaccacccgctgcactttccgccgccagtgcccgctgcctttgcacccatcacgaatgattttgagccacactatatcggagaggcggccgagggaaagtccaactataacacggatgtgatcagccacgtattctacttgggcaatcaacaggtggtgcacaccaccttcaaggtatataacgcagtgctgtactacaagtactttgagcacctgaagatgagcgtgctggagttggaattggacacaccggagtacaacctaatgatcctgttgcccgactaccacacggatattgttgcagccgccgcctccttgaaactgggaccaacccttcgactgatgcggaagcagttgaagccacgctgggtgcaagccatcattccagatttcaagctgcacggcaccatctgcgacgtattcgaaccaaatcgcgccgatttcaggcccatgactgaggagaagggcgtctacgtgcgacacattgagcaatccatagacgtcaccatccgtacgcatcccatcaatcagctgaagcgcaactacggcgcccaatcgaagcccattcagatctctgtgaatcatccgtttctgtttttcatcgtcgatcgcgacttggacgtggctgtgatgtcgggccgcatactgaatccgctgaacgtacgcatccaatga

SEQ ID NO: 29106 - protein, 629 aa, DROSOPHILA
MAGLVLLFTWLLVHLLQVDAHYIQIDHEEFRASGFPHPHFPPPPLTPLDHLPQVLAAKELTPAEVMVDLTNDLTHRLLHYHSILNRNNFAFSPTALVSVLVALFEGSAGNTAEELRHVLQLPNNRDVTRVGYRDIHRRLRTYFFGSDNPLKGLSLNKGNVTVLKDFETVLMFYGYDLSVDMLSSTPANLTSDAELVNTTMASNTTTMEMDAETTTSKDAESTTEEPATTTTEPPATTTAEPPTTTTETPAETEATTEAPAATSGEEEAAEPAGEDEAAELVSAFVAEEDSEPLLRIQKARVSRLPTSKLQAPLKHSNPITPKPIYLPSARTVAMPMPMMARQVAERKPPGTRQVISIIAPSVQPANISVTRKTKTARYKRHAIPAYKDLDANLFLTLFNPHTHVPHHPLHFPPPVPAAFAPITNDFEPHYIGEAAEGKSNYNTDVISHVFYLGNQQVVHTTFKVYNAVLYYKYFEHLKMSVLELELDTPEYNLMILLPDYHTDIVAAAASLKLGPTLRLMRKQLKPRWVQAIIPDFKLHGTICDVFEPNRADFRPMTEEKGVYVRHIEQSIDVTIRTHPINQLKRNYGAQSKPIQISVNHPFLFFIVDRDLDVAVMSGRILNPLNVRIQ

SEQ ID NO: 29107 - DNA, 4022 bp, DROSOPHILA
tttgtggccaaacactggatctaaggtcaggtagtgccttaaacatcatttaactgatctacattgattcaattcaactgctggactttccggttgaggtactggagatggtcttgaccaatttggacatacgcagtcatcaaatgataagcgatatgtccgaaaaattgaaacagattaataatgcgccggtacaggaggtatgaggatgacaatcgggaacgtcctaaggttcactctgcagatcctgcgcttaacatgcacttatttcgatgacgagtattctgagtcggactttgctctctgcctgctggtttacttcgattataaacatttccagtatgatctcaaagatactctgagctattgaggagttgaggaggggaatgcaaccatccaagtaacttggaagtccaacctacaatacacctacaatattcaaccaaacacggtagctaaatccgctcctcggattttgcttaaatttatagtggatggtccaccgttattaattaattttataaacgatttcatcacccgaaacgaagatcctaacacactctatcacttgctcccaaaaacgaactttaccattctaattgagggagagtcttttcaaggaattcaatttgtctatttcaaacatctgaacattgacgttctgaaattgagtgatctatcatacaggtgataaacggacatggagccacggcaattttaatactctttataagaaattccgtcaaataactaggttcattaaaacttaaacatatactattatataacttgacgaacttgactaatttataccttaatcactgtgaactatatacacacgtttttaggtgcagatgtactgggaattggccatccaaagcgattcaatgatgataacaattagccaaattattcgaaattaaaccaaagcactgtttaacattttgttgcccagtcatgatgtggaagagctatgaaaggatcccaagtttgttgcgaaatgaacttccgacggttcggttggatttcggctttcgttttgattcgactggccatcgaagtggtcggttcctactacatggaatacagcacgagtccaaaggtgatgatttgattgataatttttgattaataaatctatctgtctgtccataatacaatgtatagaaagcagtagtagctataaaacaaatacatgttttcggcgagtcgaactacatgaaggccaaaatatatatccacgaagatcgatcccacttcgatttacatgtccagttggtccatgagttgggaagtaaccacctcatcatgaatataaaggtgcgcgtaaaaccggaaggaagcaatgcctttgtgcaactgttcgaattgcggcgcatcaatttttgcgaatttctcagcgaatacaacacgaatccaatgatggagatgatgttcaaaaagaacgtcaaattgaacgatattattgtgtgcccagttcgagtaggaaactactcgcttctaaattccgacatagccgaaaatatccatgcagatggagtccagaatggcacctacaggttcttcgccgaaattgtcgaggaaatcggagagattgcgaaagtgttcgcactccaagtcacttcagaggtttatattgtagacaaggaactggactgtaaagttcgaggaaaagctttagaatgtttggacaatgatgcctaaaacgttgcaatctttaaacattctgtataaaagtagaaaaaaaattaaaatacaatataatcaagtattgcgtaaatgtttttcatttgttaaaacaattgggcaaaacccatcttgaatattgaatatttagccaaaaatcgtttccctaattttatgtaaataatataataggtattttgatcaaaacattgaaaatactggcccaaatatggaatgtcacacctcgctgtgtttgttttttcaattataatcgatttgcagtcgaattggggaattctacatttttgcatttttttgcaaattttgatgaaaattgatgaaatctacaaaaaatgcgaaatttgaccaaaaaatccgtcaaaaaatgatagggatggttattgtattgctaattaggagtaaaaaactgttattactttggcggtgtgaacacttttagtcaagttatacccgaaaaatccatcttgaatattgaatatttttcctaaaattgatcttgatctgatcttgatttctattacagttaatcgatgttttaaaaagtgcggcattcttgggttaatttatcagattgtttgagaatgggtcaatttattaataaatggcattaattgaaaatggttaatgggacatgaccatttgatgattgccagcagacgatttttgtcattgcggcatgaaattcgttcggctttcgatattttttccgctattttacatagtaaatggcaatggaactgaccataaatccttgtgggatgacgacgaggacaatgaagttcaggtattaagtggtacacctttacttacgatctatagctacaacgctttctagaaaccgatacttcgtattcatcatatcaacatctttggggactctcgctttatgaaggctttatcatacatcgatgagactcgcttgaagttcactatattcatatcgcttcgtgaagaactgggtagcaatttcctgacattcaacataaagattcgagtgagaccgacgggcagaacgaatttcgtaacgctgctccaaatgcgggatctggatctgtgtggcttcttcacggagttcagaaaaaaccccatgatgaagtactttctgcaatcggagatgcaactaagcgacattattgtctgtccagtgcgtgtgggaaactactcagtgaagaatgtgagtgtcaaggacatctatcctcaggttctacagaacgggatctacaagttctttgtggaggtaattgaggcaacagcggaaaaagtctttgccctgcaggttaccaccgaggtccgaataccaactgccgcagaataaatatttgccaacaaaggatatgtaattacaggatgtgtgtatgtctattccgttcggctcaccccccgtctgcaatgtaagcggattgctgtcgcctcgccctcatttttccgcattttccgacacatttcctccacctccgccgttttttttttccattgtgcgtcatgagctgcggagcaggaagcatattgaaaatcgcttaaagcaccgtccaagtgcatggccgattatggtgattatccccgaactaaagagacttgcgtgcgggctcttcttgggggggtttctttggatttcccgcgggatccttgcggttttcgccgaagccatatgcgcaatttagttataattaatagaaaaacaatatgttcaataggcaatcaatgacaatgtgcattaatgttactttgccataacttttggttaaaaacactgaaatcgtgtgccactaaaccctttccatcataaacgtgttaaaaaccgatggtaatatgatattttaatggagcttgaaatatccgtgcctccgttaattaaaatccgtcatgcggttttcatcgggtattattttccatggacttatttctttatcaggaaaggggtggcctgacaagggtcacaccctccgatgggcaatgcctttcttaacgcacaatcaaatcactttgcgaattcaatttggcaaaaataatgtgaatatagctatcttctatacggctagggcaaatggaaatcaaaatttcaatcacgccaggcgacgcagggaaaattccagcaagtagcaagtaagttggggaaaatttaaggggccggcattcacgtgaagtgccaatgcctgatatcgagtgtcgcacttatttgtgacctttgcaaattcaatttgtcgcctttttatctataaacattttctattagctttcaatttttttattttattattttatttatttttttttttgagggaaggttttcgatttggttttggcaactgggtgag

SEQ ID NO: 29108 - DNA, 811 bp, DROSOPHILA
atgaacttccgacggttcggttggatttcggctttcgttttgattcgactggccatcgaagtggtcggttcctactacatggaatacagcacgagtccaaagttggtccatgagttgggaagtaaccacctcatcatgaatataaaggtgcgcgtaaaaccggaaggaagcaatgcctttgtgcaactgttcgaattgcggcgcatcaatttttgcgaatttctcagcgaatacaacacgaatccaatgatggagatgatgttcaaaaagaacgtcaaattgaacgatattattgtgtgcccagttcgagtaggaaactactcgcttctaaattccgacatagccgaaaatatccatgcagatggagtccagaatggcacctacaggttcttcgccgaaattgtcgaggaaatcggagagattgcgaaagtgttcgcactccaagtcacttcagaggtttatattgtagacaaggaactggactattcgagtgagaccgacgggcagaacgaatttcgtaacgctgctccaaatgcgggatctggatctgtgtggcttcttcacggagttcagaaaaaaccccatgatgaagtactttctgcaatcggagatgcaactaagcgacattattgtctgtccagtgcgtgtgggaaactactcagtgaagaatgtgagtgtcaaggacatctatcctcaggttctacagaacgggatctacaagttctttgtggaggtaattgaggcaacagcggaaaaagtctttgccctgcaggttaccaccgaggtccgaataccaactgccgcagaataa

SEQ ID NO: 29109 - protein, 246 aa, DROSOPHILA
MNFRRFGWISAFVLIRLAIEVVGSYYMEYSTSPKLVHELGSNHLIMNIKVRVKPEGSNAFVQLFELRRINFCEFLSEYNTNPMMEMMFKKNVKLNDIIVCPVRVGNYSLLNSDIAENIHADGVQNGTYRFFAEIVEEIGEIAKVFALQVTSEVYIVDKELDYSSETDGQNEFRNAAPNAGSGSVWLLHGVQKKPHDEVLSAIGDATKRHYCLSSACGKLLSEECECQGHLSSGSTERDLQVLCGGN

SEQ ID NO: 29110 - DNA, 4279 bp, DROSOPHILA
ggtggcttaaactccaacgtagtgcaatgaaattcttcatctacaattcaatgacattccattctgggctttggacggggcgtggcaagttgcaggacgctgccaataagcgtgcccccagtggagcaacagatgatacatttatgcagcgccccctcgtgggcctgcatcagggggcgtggctgcgcatgcgcctaccgtgcgcgtgggtgaatcgggggtgggatggtcgagctatgtcatccgcccggcgaatcccagagcaggccgctcaggattccgccgcaaggtgcgagcgagagccgtacatccacatcccgttcaataatgcgggtgtccagtggatgagagagggtggttgggtggctgggtggtggttactgcctttcattggcttcgcattcaaacccaatttcagctagcagcattgcgacaggtgaccgtccgccgttcagttctctttgaagcctgccgcgggtcagttgcgtgtcacggaaaacccttaagttaactgcatagaccttgggctaaccaaacagttttcagtgattcccgattaaagttgaatatctaacgaaatttttgaaattgtgcaaaatacacattgaatatttgaaacaagagcaagccaacaaaaaatgatgtgaagtgctacacttaaaaacacaataaatacgacgatagttaaaaaataaattatcaaagtgcattaagtaatcaaacatatcaagtgttagatgaagcaaaaggtacatttttagaatagttgatgttttattaaaaatttaattttataattaaatacccattttatatatatatttatatatatatattggatttactatttatttgagaaactttatttaagttaacttcaaagcccaaagcccaatactataacacttgacactttattgtgcaagaataggagtgattactgacttcaaatgaaataccagaaagttgacgttacaacgcaatagaaaaggggagaaaaatgatgaacatgaatccgccgacgcacccgcacccgcaccatcacccacatcctcatccacacccacaaccgcagtcccatctccagtcggtgcagcatcttggccagcatcagccactgcccgccctgctccagggccacccagacaccactcacttcgtcgagtgtcgggcattaccagcaatcaacgagacatttccgcaatttggccagcatcgtccggctatttcgctgctctcccccttggatctttcattgcgcgccgcggccagtgtagtgccaattactccaccctcaacgccctcgccgcctcgcaagcgccagagattaatgtccgaggagaattacctgtggcgtccgcacatggcgagtcctgcagctccagctccagttgttccgtcgagcctggcaatgcagccgggctactttcatcatcatcagcagcagcaacatcaactaccacaccagcaacatcatcagccatatgccacacgcagcagcttggagggcgcttcctttaataaaagtcattttcacgggacgaaaaataactttgagcaaattccggcgggtcaatcgagcgtcagctcgcccatctacgtggaagatgagaccattgtgctgaccgaggacgaggatgaaacagttgtcagttcccatgactacaatgagtacgccacggacacggaggaagtcaacgagggcgacgatgagacgcagcaggtacaagtcagcgttaatggcgacgatgatgaggaagaggtgtttgtcgatgtcctgggcagtgacgatgacgaggatgaggcgacggacctggtggccacaagattgcaggcccaactaatagagaccacggccctgaaacgcaatgaacttctgtatgaggatgaggagctgcacaaccaggcggtaaatggtttggccagactctttgaccgggattttccagagccagatgtggaggtttccggtttggcggaactccagagcaacagcgggaagacatacacggatctgagtggcgtggcaacggcggagattaggactaccagttccgacaaccttccaccgcctcctccacctcctccgcctccagcgacttctacaatccctgctacacctccacttccgcctccacccatatctcgaccccacaaggcggaacgtaggaggtcgaagctacgaaaacacatggccatcgatgaggagaccataagtccagtttctggcaccatcattcgcaaattgcgcgacgacgaggagctggtggtgcgcaaaggcgacattgatccggcttttaacgtggtcgaaatcaccgaggaggccaaggccatcctggccagcattgacaacaagattggagactacatgtgccagctctgtcgcactgtctacgatgatgcctttatgttggcccagcaccgttgtccccgcatcgttcacatcgagtacaagtgctccgagtgcgaaaaggtttgtggtccgaaggaaggattcgctttccaggcaactaaaacactttttcctttgcaggtctttaattgcccggccaacttggcctcccatcgcagatggcacaagcccaaagcggaggcggctggagttaatcccgccaagaaacgagttgtggaaacgggcgatctggtacaggaggcgactaggagcggcgatgatgccagcgatggcatttatccttgccatatatgcggaaagacttttcgacggtgagttagtaagactttcggaaaaaaactatacaatttaattagttatttggtatttaaaaaagttgaaattttaaatatttttaagcagttaatttgaaatgtttatatttattttccacaaacaacagtcaagcttacctaaagaaacaccaggcctcccatcagatgttggataatctcaagaatctggatttcttcaagtcccagcagcagcagttgaccatcaatggccaccaattggccgatcatgtccagctgcagcatacaactggacaggcggtcacatctgccgctccctatgcatccttgccacgcccaccgcctggcatgcccatgtacccgccgccaagtggtaagaactatccgggtggacaacgctttccgggatttccctttcagtcattcgatcagcgtcgattctactctcttggggaattttacctatcgcagcacttggaacgatcctcggccttccaatacgtgcaggccaatcacctgaggcaactgtccaatgtggcccaaactttgatgcctcctctgcccgtcaaatgacccaatccgaatacgaatgtcctgcggccggtgccacgcattgcggcaacagcgacggcaacgggacctccagcggcagcaacagcaacaaggcaagcggcaactgccgcaggagtgtcctccgttggccacgcctttaattgggtggctccgtcgaccgcaggtgcaactgcaacgggaagtgcaactgcaactgccacggcgacgactgcagagtccggcggaaatgttatcatgtgacttaacaactattagcagcattgaatcaacgatctctagttaaagtttaataaatcaatcaaattataaggacgtcttttattcgggctgacagctaaagaaattttatttaaacacatttcattttacctaaacatttttattacatatacatgtgaatagtattctaaggtcgaactctacttctgctaaggacatgggatattgcatgtgccagaaaggtttcttttcgaacaccttgaaaaattgaggacttggggccttgaaatagttattaataaataaaattaataaatataactaggataccgtagaataggttactcaccctgtgcaaaaagtaagctttcagatggcatttggtgcagtcgtttttggatctcagattccgcctcattaaatatctccggaagaaggctgattgtctcggtttcttcgctgacatccaggcttggttttggataaatggcattggtcattaaaacaagagttaaagtatcctgatctttgtgaagattaaccaaagtatcattcaaaagctgcaactgctctcttttgtcaatacccgatggtataaattgctccactatgagtagatatccttgtttatatttagtaagaacattcaaagacttatcgaccatcaattttagacttggggcctttgaattaccactcaaatctccattggccatcacacccattaaataatcaaaactactagaatttagggactccagctcatcccttcgctgaatca

SEQ ID NO: 29111 - DNA, 2088 bp, DROSOPHILA
atgatgaacatgaatccgccgacgcacccgcacccgcaccatcacccacatcctcatccacacccacaaccgcagtcccatctccagtcggtgcagcatcttggccagcatcagccactgcccgccctgctccagggccacccagacaccactcacttcgtcgagtgtcgggcattaccagcaatcaacgagacatttccgcaatttggccagcatcgtccggctatttcgctgctctcccccttggatctttcattgcgcgccgcggccagtgtagtgccaattactccaccctcaacgccctcgccgcctcgcaagcgccagagattaatgtccgaggagaattacctgtggcgtccgcacatggcgagtcctgcagctccagctccagttgttccgtcgagcctggcaatgcagccgggctactttcatcatcatcagcagcagcaacatcaactaccacaccagcaacatcatcagccatatgccacacgcagcagcttggagggcgcttcctttaataaaagtcattttcacgggacgaaaaataactttgagcaaattccggcgggtcaatcgagcgtcagctcgcccatctacgtggaagatgagaccattgtgctgaccgaggacgaggatgaaacagttgtcagttcccatgactacaatgagtacgccacggacacggaggaagtcaacgagggcgacgatgagacgcagcaggtacaagtcagcgttaatggcgacgatgatgaggaagaggtgtttgtcgatgtcctgggcagtgacgatgacgaggatgaggcgacggacctggtggccacaagattgcaggcccaactaatagagaccacggccctgaaacgcaatgaacttctgtatgaggatgaggagctgcacaaccaggcggtaaatggtttggccagactctttgaccgggattttccagagccagatgtggaggtttccggtttggcggaactccagagcaacagcgggaagacatacacggatctgagtggcgtggcaacggcggagattaggactaccagttccgacaaccttccaccgcctcctccacctcctccgcctccagcgacttctacaatccctgctacacctccacttccgcctccacccatatctcgaccccacaaggcggaacgtaggaggtcgaagctacgaaaacacatggccatcgatgaggagaccataagtccagtttctggcaccatcattcgcaaattgcgcgacgacgaggagctggtggtgcgcaaaggcgacattgatccggcttttaacgtggtcgaaatcaccgaggaggccaaggccatcctggccagcattgacaacaagattggagactacatgtgccagctctgtcgcactgtctacgatgatgcctttatgttggcccagcaccgttgtccccgcatcgttcacatcgagtacaagtgctccgagtgcgaaaaggtctttaattgcccggccaacttggcctcccatcgcagatggcacaagcccaaagcggaggcggctggagttaatcccgccaagaaacgagttgtggaaacgggcgatctggtacaggaggcgactaggagcggcgatgatgccagcgatggcatttatccttgccatatatgcggaaagacttttcgacgtcaagcttacctaaagaaacaccaggcctcccatcagatgttggataatctcaagaatctggatttcttcaagtcccagcagcagcagttgaccatcaatggccaccaattggccgatcatgtccagctgcagcatacaactggacaggcggtcacatctgccgctccctatgcatccttgccacgcccaccgcctggcatgcccatgtacccgccgccaagtggtaagaactatccgggtggacaacgctttccgggatttccctttcagtcattcgatcagcgtcgattctactctcttggggaattttacctatcgcagcacttggaacgatcctcggccttccaatacgtgcaggccaatcacctgaggcaactgtccaatgtggcccaaactttgatgcctcctctgcccgtcaaatga

SEQ ID NO: 29112 - protein, 695 aa, DROSOPHILA
MMNMNPPTHPHPHHHPHPHPHPQPQSHLQSVQHLGQHQPLPALLQGHPDTTHFVECRALPAINETFPQFGQHRPAISLLSPLDLSLRAAASVVPITPPSTPSPPRKRQRLMSEENYLWRPHMASPAAPAPVVPSSLAMQPGYFHHHQQQQHQLPHQQHHQPYATRSSLEGASFNKSHFHGTKNNFEQIPAGQSSVSSPIYVEDETIVLTEDEDETVVSSHDYNEYATDTEEVNEGDDETQQVQVSVNGDDDEEEVFVDVLGSDDDEDEATDLVATRLQAQLIETTALKRNELLYEDEELHNQAVNGLARLFDRDFPEPDVEVSGLAELQSNSGKTYTDLSGVATAEIRTTSSDNLPPPPPPPPPPATSTIPATPPLPPPPISRPHKAERRRSKLRKHMAIDEETISPVSGTIIRKLRDDEELVVRKGDIDPAFNVVEITEEAKAILASIDNKIGDYMCQLCRTVYDDAFMLAQHRCPRIVHIEYKCSECEKVFNCPANLASHRRWHKPKAEAAGVNPAKKRVVETGDLVQEATRSGDDASDGIYPCHICGKTFRRQAYLKKHQASHQMLDNLKNLDFFKSQQQQLTINGHQLADHVQLQHTTGQAVTSAAPYASLPRPPPGMPMYPPPSGKNYPGGQRFPGFPFQSFDQRRFYSLGEFYLSQHLERSSAFQYVQANHLRQLSNVAQTLMPPLPVK

SEQ ID NO: 29113 - DNA, 2195 bp, DROSOPHILA
tggcggctttatcgagagcagcagctgctgcttccggcgaaccatgttgctggtagagacagcaagccctattggcatagtcctccacttcggacagtttgtccgtttctttggcaagcaggataatctgctcgtaggatttggctgcatggaaccatgacttgttgttttcgtaacagtcgatggccttcaaaagacaatccttgcgcttatcgaaacttttggcaattcgatatgcggttgctgccttgaaatacataccagctttggcatactcattcgcggcactatccgtctgtcctatcaaggcctccgcctcttctatctttttggcatcaagagtgctcatagtgctaagttacaacctttgcgtgttgaaaaaatcaattcaagtgacttatattcaaataagtgtgcccaagtgcgcaagtgccgagaaaaacacaaaaggccgctccttttctatgcgggtatgacactggtattatggtaatattaagtgctttactaaagttgcataaaatatatatttgtatttaattaaataaatgcataccatataatatgcgagcttggggggtgaaaagtaagctatatttacatttcatgtaagctggattttgaatatatttaaaaaattgtatcgatttggtttcaaatcgaacttttatcgcatccatagaactcctagttcgattaagtttgtagccctgtctggataaaaaaaaaacatcgataaaaagacacgtgctttgccttaaaagatcttaaagtgaggaggtagcaaggcgctttgatttaacttactttgatattgtaacttaatgcaattaaatattaacataggctttaccaatcgtgtgcgaaatcttgaaaagaaacccgtcgctcggttttatatcgaattcttaacggaagaaggtaagatcctttatatgcagatagctttttttgacttattatcctaacatctttatagttaatcccatattactgcaagatgaaagcctggagagatctgggtattacctatatccagtattccaacatcgcagcccgtgtggtgcgagaggccctgcgcattgagctccgtgcagacgccgccaagcgaaacatcagccatgtgaagttcactccgtgggtgaacggaaagcctgtgccgcgcaagaaggtagaacgtgaatccgaatcttaggcgcccatttcggtgatttgtacaccatgtttcatccagaataacagctgccatgattctacaataacatttcaaataaatctaattcactgaaaaaatgatgtatattagattttttgttgggtcaaaacttcatagctcattcttctaaagtacaacacagttctgtatttaaatatcatataaataataatatacacaacatttagcatacattctacacacgcgtatcaaatacatagattgtgactgcttaatttagactaagacactaaataggagaatctaagaatgagaaaacagtcagttctggagcacgagccacggtagcaggatgatgcacaaggaccaggataagcccatcgatccactcttcaagttggtataactgtccacgatgtgaatcttccagcccatattgccatgggtaaaggagttgtagtacacagtatccggccatgtgatattcggtgtaatttccaatagagccggttccccttctacacactcggtgatgagggatcgattgaacttcttgaaagtggggaagttatcatccagtcgacgatcactattttgaggatatctggacaggcacaggggaccagcagccgtgggcttgggcctgcctctccgggtgaattcaacaccggctaatacacgaatctcactctgctttgcatcagacagtcggtcatacccaccctggggatcatcggtgataaccaacggatgatagtgctccggcgagtgaggattattgccacccctaaccttaaaggtgtaggtcagaccacgctttaggtaaagctctggaatcatgtagccgttgatgtaccaggccaagccactggacacatgattcgtcaatccctgatagccacgaagtcctccagagggtcccaagtaggcgttgaatgtgcgtaccgttctgcaaaacaaggaactatattaaattttcattgcaggaagattggagtcttacgcatctgttatcctg

SEQ ID NO: 29114 - DNA, 195 bp, DROSOPHILA
atgaaagcctggagagatctgggtattacctatatccagtattccaacatcgcagcccgtgtggtgcgagaggccctgcgcattgagctccgtgcagacgccgccaagcgaaacatcagccatgtgaagttcactccgtgggtgaacggaaagcctgtgccgcgcaagaaggtagaacgtgaatccgaatcttag

SEQ ID NO: 29115 - protein, 64 aa, DROSOPHILA
MKAWRDLGITYIQYSNIAARVVREALRIELRADAAKRNISHVKFTPWVNGKPVPRKKVERESES

SEQ ID NO: 29116 - DNA, 2818 bp, DROSOPHILA
tgggacttgcaggaggacaacaccctaaagttgcgccacaaactaaaaggacatgccctgggagttgtttctgtggccgtcagttccgatggacagagtaggttgaaagattctgtacttgggagatagagaaatggacatcaattaatggtgccgccttccttccagccattgccagtagttctctggactccaccatgtgtttgtgggatgcccgttcgggcgacaagaaacacctacttagctttgggcctgttgatctctggacggtgcaattttcaccctgcaacaaatatgtgatatccggactgaacgacggcaaaatctccatgtacagtgtggaaaccggaaaggcagagcagacattggatgcccaaaatgggaaatacacgcttagcattgcctacgtaagctttatctggtaaataacccattttgagaatcctatagctgtattattctagagtcccgatggcaagtacattgccagtggagccatcgatggtatcattaccattttcgatgtggccgcgggcaaggtagtgcaaacattggaaggacacgcgatgccagtgcgtagcctttgcttttctccgaactcgcagctgctgctcactgcctcagatgatggtcacatgaagctttatgatgtgtaagtggcttaacacctatgacattttcaggcactactatctcctcgttttagaacccactccgacgttgtgggcaccctatctgggcacgcatcttgggtgctgtgcgtggcattctccgaggacggcaaacactttgccagctcctccagtgataacagcgtgaaaatatgggacacctcggaacgcaagtgcctgcacacgttcgccgagcacacagatcaggtgtggggcgtccgatatagccccggaaacgacaaggtggcctctgcttctgaggacaagtccctgaacatatactactgtccgcccaatgccattgtttgatttcatacaatagagcgtaggtttaaaacaaagaacaagaatgatttatttacggattaccctccgagctcgatttaacccgcagaaggggctgcgtggcttgagttagcatcgtgtctttgtacttctggtcgggtatgtacatattaaaagttttaaagtagtgcagtatgttttctaaaaagggaaaagttagactgaggtattctgagaacacattttcttttaggtttaccaactagaggctccttaagcttgtactcattggctatcttcttggctggccaggattcaggatccaactggtggtcattgatgaacttaagcgcctggcgcagtgtgcaatgaccggggctaatgcggttgggctccagatatccgtactcaaaatcatccggcgttttgcgttccaggggcagtggtcgctgttccacattgtccgccgccgcctcagctgcctggcgctcctgcactcgcttgatctagggaacatatagcaggttccatattagtattggtcgaaagtaccttctaaggtattaacccacaaatcgatcctgcgaggttacataaacgtctttcaatcgtccgtccaagctggagtctttcatattgagcttgtccacgaacttgggatccactgtaatggggaaaatgaagcattacactccaagggtgtttaattttacttacattccaaggtgcgctccatgtctctcaaattcgagtcaaatttgggcgccggcgttggcttctcgcgctcgaggacgcgatgtgcacgattctcgacattgaagcgattggcccggcgggcaaccattgaaaccacctgacccatgccaaaaatatattatgttttatttatgttgctaataattcacgtgaaatcgagaaaaaccaaaagaattataaaagcatggccagctgttatatgttttcgaatcagctgttcgttatgctatcgataagttattgggttttgcaacagttgactggccaattaccgggtagtgttgttagcaatacacagctgatgcttgtaaacaaacgaaaagttcacttaattttcaatttgttaaaaatcttaagaaatgctgcccctgcgatgcagttggtcctttgcccgggccaactatagcaccaaaaaggaactggtgactcgctacagcggcgatttccccgagaaactgctcaaccggaagcaaaaggttcccactcacatgtacattgcaaattcggaggctgctgcaaggattaaccagtacctggagccccatttccagagctccggttgcgataccgtgatggaactcaattccggtgctgggtactttacccggcatctgttggacagggaatcccagtttcgacgcataattctgcttgagagcatggatcactttatgcccaaaatccaggagctacacacgctatatccggaacgtgtgaaggtgcgccaaggagactttgtgaacctgtggaagttggtgtacatggacaaaatggacggtggttccagggtggcggatctcctgagtgatgtgccccagaaagcgtttacagatggtaagcccatattggctattcaatatatcctcgaacttatttttttcctatagatatcaacatgctagtcttcggcgccgtgggctcctatccattcttcaagcacttgatcaactccctcatttttcagaccagccttttcaaccttggacgctgtgagatgatcctcgccatgccgccacccatatacatagtaaataagcttattatccctgaaatatatcacgcttatatcactcatttccctccgttagcatctcacctgcaacaac

SEQ ID NO: 29117 - DNA, 641 bp, DROSOPHILA
atgggtcaggtggtttcaatggttgcccgccgggccaatcgcttcaatgtcgagaatcgtgcacatcgcgtcctcgagcgcgagaagccaacgccggcgcccaaatttgactcgaatttgagagacatggagcgcaccttggaattggatcccaagttcgtggacaagctcaatatgaaagactccagcttggacggacgattgaaagacgtttatgtaacctcgcaggatcgatttatcaagcgagtgcaggagcgccaggcagctgaggcggcggcggacaatgtggaacagcgaccactgcccctggaacgcaaaacgccggatgattttgagtacggatatctggagcccaaccgcattagccccggtcattgcacactgcgccaggcgcttaagttcatcaatgaccaccagttggatcctgaatcctggccagccaagaagatagccaatgagtacaagcttaaggagcctctagttgaaaacatactgcactactttaaaacttttaatatgtacatacccgaccagaagtacaaagacacgatgctaactcaagccacgcagccccttctgcgggttaaatcgagctcggagggtaatccgtaaataaatcattcttgttctttgttttaaac

SEQ ID NO: 29118 - protein, 203 aa, DROSOPHILA
MGQVVSMVARRANRFNVENRAHRVLEREKPTPAPKFDSNLRDMERTLELDPKFVDKLNMKDSSLDGRLKDVYVTSQDRFIKRVQERQAAEAAADNVEQRPLPLERKTPDDFEYGYLEPNRISPGHCTLRQALKFINDHQLDPESWPAKKIANEYKLKEPLVENILHYFKTFNMYIPDQKYKDTMLTQATQPLLRVKSSSEGNP

SEQ ID NO: 29119 - DNA, 3156 bp, DROSOPHILA
tcatttccctccgttagcatctcacctgcaacaacgagattggctacctcatttaccgatcgaccagcgtactgtttcaaattctgtttgagcacaaattcatagccaaggtgccgcgcgaggattttctacctcagcagatggcctatagccccaccaagagtagcaagttgggtaaggtgcagtccatcaatcccgagtacttgtacttggtgaaattcactccgcgccgcaatcttcatgagctgtgccagtcgcaggatctacccgctctctggttcttcattaagcagaactatgtaagccgacgaaacagaataatacccaatttagagtaggtaacacaatcaaatcatctggggttatttttataaattcaattattatttgtgtagaaagtgggttcccggctgtggacctcggcttatcattaatccgaagtcctccgagtccgtaacacccatctatccagatgaattgcccaagaaactaccacagtactcgtgccagagtactacaatgagcaccagaaactactatcccggcatcaacatctacacacagttcggagatctcctgcccagtcagattctgacgctatttagtcagtttcgtcagtggccggagtacggcgagagctctttcctcgcctcgctggaaaatgcgctgctcaagctggagactgccaatgacgaaccaaacctagaggatggcgtcacgttgccagaagaggatgatgccgaagcagatgaaattatcgaagaagaaagccctgtacccgccaccactcccgtcaagaggcgcaggaaagccagttcttagttgtacataatagcgttttgcttgtgcaagaaaaataaagaattgccttcattttgagaaatggtatgtaatcatattatatctgtcttaaacatggaacaaattcgctattcttcactggcctccacacattaccaaacagaacacaatacatttaagcacataatgttaaaatcctttaaggacactttccctgagccattaggcgactgccgcgtgcgcatttctcggccaaatcaacgtagtattccggcggagcctgctccgtgtccgaaatacgcgtctccagttgaacggacagcttcacacagtccaccatcaagttggtgggattcacgccaagtacaaaggaagcctcctggtaaggacacgggttttcttccttcttggtgtttccgaactcatagcatgtgtcgcgaatcataaagtgtccgtccctgttacatggatttcgtacgcacttcgggatgatctcctccttgtagagcaccagaatctgtccagcctcacagggtccctgtcggtaggccggatagcagccatcggtctccgggtaatacagtgtggctatcgaaggggaagtacccatacggagattattatgtcatcgccatggtagctccattatgaccgctcacctggcgcgcagtcgcaaacccagtcgttctgcttctgctggtcccccggataaagaagctggtgcttggggcatcgggctggcgaatacagtggcttgcgaccctgttgatgaggagaaagcggaggggtgtgaggcaggaattcgattgattattgccaatggggcttgcatacactaccaaaacagtccccgtattttgaaattcacttcaaacacacactttagaagtttaaaggtttgaaactctcaaagtcaccacagtgataaaataaatgtatttcttatttttaacaaaaaaaaaaatttttcaatcacgttcaacagtatccatacaattaaaagtctgttattataattatttaactagaaccttaagctagttttaaaatcaaagcaatcatgaaatgtttttgaacattggtcactacacaaaattcctaattggactccaacgactttcacttctgattgggaagggtattcggcgaaagatgttgcccagttccggctgggttttctcttccattttggcgtttcttatcacaaatgtggattgtgtctggctgcagcttaccgcaaggttggccttcttcttatcaatgtcttgatcctcaacaaaggcgatttgagcgtgtgccactttcccaataaacgcaataagcgcggcgatcagcaaaagttggggattgatcattgtccgtataatcacttgttcatgtgatactcacggcaattcaaacaagtatgaggctggccaatcttgacttaatcttaatcaatgggaaacgaagatcttcgataacgataacgatcttagttgggtccagttatgttattgttttacgttttctcggaaatattccaatattccaattggaagtttagtgcgaataaccagaaaagcagaacaaagtgaaattaaaacatagtccaataagggccagttccaattgatattgctctcccgattacatccgctcttgctagtgatgctcaatactcaatcaatgctcagctgtttctatcgatgagttgaaaaaaataactttctgatcatataaatttaagccaagagaaaagggaaaaacttaaaaaaaatatctgcacacttacgtttgcttttgaaatattggattaagaactccttgttaagtaatgcttagttatattgtcttcctatgagttgtggactaccaaattactaagtgtatcagaaattaaaattgaaaatcgaataatttgttatatagaacgataagcattacgagtctattttggcgcccaactaccgaacattttcaaaatgttgccattattggttagcactggttagccaatcgctaactatcgaaaagctcccatctcttattttcctttgtcaaaataaaaaccaaataaatatatataaaattcacctgcaaaacgaagcaacaaaagacactgtacggctcaaatggacgaagaggagaactcaggtgggtgtggcagcatcatagcactcgccaaatgttcccaataacatatgttcatcatatgaaactgcgcagaaatcaattctgtgcaagcacgggatgaagatgtgcaattggaggaccaacagtcacaggggctccaggatcggcaggtagacgtgatagaacaggcttggaacaatgcaatgccagacgagccgtcaccgccggcagaagatgcct

SEQ ID NO: 29120 - DNA, 612 bp, DROSOPHILA
atgatcaatccccaacttttgctgatcgccgcgcttattgcgtttattgggaaagtggcacacgctcaaatcgcctttgttgaggatcaagacattgataagaagaaggccaaccttgcgggtcgcaagccactgtattcgccagcccgatgccccaagcaccagcttctttatccgggggaccagcagaagcagaacgactgggtttgcgactgcgcgccagccacactgtattacccggagaccgatggctgctatccggcctaccgacagggaccctgtgaggctggacagattctggtgctctacaaggaggagatcatcccgaagtgcgtacgaaatccatgtaacagggacggacactttatgattcgcgacacatgctatgagttcggaaacaccaagaaggaagaaaacccgtgtccttaccaggaggcttcctttgtacttggcgtgaatcccaccaacttgatggtggactgtgtgaagctgtccgttcaactggagacgcgtatttcggacacggagcaggctccgccggaatactacgttgatttggccgagaaatgcgcacgcggcagtcgcctaatggctcagggaaagtgtccttaa

SEQ ID NO: 29121 - protein, 203 aa, DROSOPHILA
MINPQLLLIAALIAFIGKVAHAQIAFVEDQDIDKKKANLAGRKPLYSPARCPKHQLLYPGDQQKQNDWVCDCAPATLYYPETDGCYPAYRQGPCEAGQILVLYKEEIIPKCVRNPCNRDGHFMIRDTCYEFGNTKKEENPCPYQEASFVLGVNPTNLMVDCVKLSVQLETRISDTEQAPPEYYVDLAEKCARGSRLMAQGKCP

SEQ ID NO: 29122 - DNA, 3260 bp, DROSOPHILA
cgatggccagatttcgggatataccctcgatgcgcgacaagtatcgcaggttccagctaagcactaccacctggccatctgatgcctgccaagagtattcgttttcttcaattgtggagcgagcacgccagaggctggagtcccaaaagatagacacaatgccaaaatgccccattcagttgtccttctggttggtgcgtaaccttcacctgaccgagaagatgatgcggcttaccttcctcaccgactcggttaacactcgcctccaattgatcaaaagcacgttcaaggacgagacactcttcttttgccgatattgcaatagcagcttggccctctgctcggatctctttgccatgtccaaacacggtgtgcagacacagtattgcaatccaggtaagcataaggagaagtccaatgtccgtcttctataagcaatgaattcactgaaactaactactttacagagggctacatccacgagacaaacaccgtgtaccgggtgatatcccatgccatcggctacagcggcgagccgtccacaaagtttagctggttccccggctatcagtggcacattattctgtgcaagttctgcgcccagcacgtcgggtgggagttcaaggccgtgcatcccaacctaacacccaaggtgtttttcggtttggccggctccagcgtgcggattggaaaagccagcgagtactcgcccttcaatggaaccacctatgtggtgcggaatatgatgcggatgatctcaagcgatatggaatgaggctggcgcgttgtgaagcgatttttcagatgtcaactctgctgctggcgtcgtcaggagaatgatgcggtccatcaggtgggacctgtttaattcgtttcacaactacttttagcaaaaacacacggcgtttgatggcgtggatgtaaacctaattgatatttacgattatttgaataataagttactcttaaatatttgcttttaatattatggttacaaatttcaatcatttaaaagtgccgcaaatgaggtggacagcttctgaaaaagataaagcagttgtacattggcaatagatgaaatgataggcaatattaccgccttgcagaagggacactggccgaaggagacctccagaaaggtcttgccatccatcagagtcttaaaccactcctccaaacagacggcatggcactttagcacacatttggcattgtcgcaggagacgaggggcacctcgccaccatccaggcgataggcaaagcaaatgttacagcgcagctcttcgttgtcctcttcatccagcttgggtccatccgaccagtctggcatgggaaagtagcacaagtcgaacattcggagtaggttcttgtgaatgttcatttcggagtcccagttacttagaccatcgctgagaacgtggcgcaggcgggccacctcttccgtgggcccaatgatctttagcgacatggatgcaatgcaggcaaagggatccgcgatggtcagcttcaagtagacgcgatccttgagagggaacagtcgtgttttgtgtttgctgctgatgggcgatggttgcagcacatgacaaagctcgtcgatatccatgaagttgtcgtagaagggacgcagatcctcgagaagcttgcgaaagaggtttagggcctcctctaggtttccagcactcttggtcagcatttcacccagcgatacgcagtcgggcaaactgtgatcaagcaagagaagagacgggatcttaagctccagataatgctgctcgaagtcggtgaattcgctgaaacgaatcatggaacaggcctcgtccacttgcaggcagtactcgtttgacttgtacaaggccaggatatcgtaatatatgttcccctcccgacatagttcctttggcactgttggggctttttgggcaggaagaatctttggcaaatggtccagaaaatcctccagcagccaatcgtcctgtaacttgagattagccgatgtgtacagcttgtactccaagctttcctggacgtagagctggaaaccatgaagagctgggtggtgtggcagatagagtttaaggcggcgccatgtatccttaattatacaatcattattagtttggcgggaaaaattgaaatacggataacttacctcactgcccaaaactcctctgatgatgcacgctccacttggctgaagctccgctgccagaccaggatacttttgacacagaaggcgctctacatcttcgttactttccattatatttgattttggtcagattgtgcttgaatgacttttgtttacattttatgttttgaacggccatagttagagatgtgcagtcttcgatgacacaaagtcttcaatcacgatcgataggaaattaatcggccgcttttttaaatttgattgctcgatcaaaccttaaattatatgtttattaacccttcgagccaatattccgccttgcttacatattcaccctctggctgttttgtttactaggtatagccggcaacattgtagttcagcctctccctacttatcagccaaatttacgttatttactgattcgaatcggcattgtttgctcttcgtcagagcgcaacacctgcaggccacagtggttttcttttgtaacacctgcgtggcggccccgtatcaatggcaatagccaccgattttgataaactgctctctacaggcgttggtcatcgttcgaacacggggctatttaaggttctccaccagccccatcgattccactcacgattgtcatctgcgtgcgcgcgtactcaatgtatattgtattcttctgaagtaagattaaaaaagattccatccagaaaaatgctgcgaatcgttgtaactttggctctaattctggccacagtcaatgccaccaatgtccagcagtgtaagtagctaaaaactcttttattttgttggaaaaacatcaaatcattttaaatcgaccagtttgttagattggattcatgattctaacagatttctatgacgatgattcacttcgcagactttgtctcgaaaactattgccaaaaatacgttctgagagaaatttaaagtcctaacgtgtatctgttggccaggttgatatggcttatcaacaaacagctaatctcttagaaaaaaaaacatagccttcttttgagctcaccttttgattcttcgaaaacatatttccgctttcaggcaaaaataagccgtttccactggatgtgaatattaaggattgc

SEQ ID NO: 29123 - DNA, 1143 bp, DROSOPHILA
atggaaagtaacgaagatgtagagcgccttctgtgtcaaaagtatcctggtctggcagcggagcttcagccaagtggagcgtgcatcatcagaggagttttgggcagtgagctctacgtccaggaaagcttggagtacaagctgtacacatcggctaatctcaagttacaggacgattggctgctggaggattttctggaccatttgccaaagattcttcctgcccaaaaagccccaacagtgccaaaggaactatgtcgggaggggaacatatattacgatatcctggccttgtacaagtcaaacgagtactgcctgcaagtggacgaggcctgttccatgattcgtttcagcgaattcaccgacttcgagcagcattatctggagcttaagatcccgtctcttctcttgcttgatcacagtttgcccgactgcgtatcgctgggtgaaatgctgaccaagagtgctggaaacctagaggaggccctaaacctctttcgcaagcttctcgaggatctgcgtcccttctacgacaacttcatggatatcgacgagctttgtcatgtgctgcaaccatcgcccatcagcagcaaacacaaaacacgactgttccctctcaaggatcgcgtctacttgaagctgaccatcgcggatccctttgcctgcattgcatccatgtcgctaaagatcattgggcccacggaagaggtggcccgcctgcgccacgttctcagcgatggtctaagtaactgggactccgaaatgaacattcacaagaacctactccgaatgttcgacttgtgctactttcccatgccagactggtcggatggacccaagctggatgaagaggacaacgaagagctgcgctgtaacatttgctttgcctatcgcctggatggtggcgaggtgcccctcgtctcctgcgacaatgccaaatgtgtgctaaagtgccatgccgtctgtttggaggagtggtttaagactctgatggatggcaagacctttctggaggtctccttcggccagtgtcccttctgcaaggcggtaatattgcctatcatttcatctattgccaatgtacaactgctttatctttttcagaagctgtccacctcatttgcggcacttttaaatgattga

SEQ ID NO: 29124 - protein, 380 aa, DROSOPHILA
MESNEDVERLLCQKYPGLAAELQPSGACIIRGVLGSELYVQESLEYKLYTSANLKLQDDWLLEDFLDHLPKILPAQKAPTVPKELCREGNIYYDILALYKSNEYCLQVDEACSMIRFSEFTDFEQHYLELKIPSLLLLDHSLPDCVSLGEMLTKSAGNLEEALNLFRKLLEDLRPFYDNFMDIDELCHVLQPSPISSKHKTRLFPLKDRVYLKLTIADPFACIASMSLKIIGPTEEVARLRHVLSDGLSNWDSEMNIHKNLLRMFDLCYFPMPDWSDGPKLDEEDNEELRCNICFAYRLDGGEVPLVSCDNAKCVLKCHAVCLEEWFKTLMDGKTFLEVSFGQCPFCKAVILPIISSIANVQLLYLFQKLSTSFAALLND

SEQ ID NO: 29125 - DNA, 2589 bp, DROSOPHILA
tttttgcaccgaaagtctattaatttatttccactgattcagtggcacaattggctaataaaatcgtcgtgataatcatttattggccgccgtagatcgcattgaccatatggtcaaaagttgggctctcctgtgtgataaggcgataaacgtcttgctgggtgcaacagtacactcggagaaaatctgccttaaaaatgtctaactagtgatagtgattaccaccagattaaatcataatgagaagtgtttccaaagaagcctatcatttgcaaacatgatttatgggattactttcgaagatatacataaatcattgtattaaatttcagtgaactatagaacaacttatgaaagttattttccagatgctagattaaatagaattttagttaaaaaaaagatgccttcctatttctgttaaacatcaaagataaagaaaattttaaaaagattttaaaagattttctgttatttctaaaatttcattttcagttttcaaactttataaaccttttaaaaggtgagtcaattgtttacagtgtctacatacgttgaaaataaatctgatagtatagttaggttgccgggttttgaaaaatggtcattgataaccgagtacatttccctccatctccttgtgattggacatgaccaggtgtcctaggttaatcaggcgtaagatttgcgaattaacatttgattcgattatagcttttcgcccactcaagtgttacaccttgatggcagcgtgtgcagatagcgccattgtaaaatgagtctttgaaatgccagactacaaagtgggtttctgttttactcagcggtgagctgagatatctacttagggaaacaaccctcatatgtgggggtaaagcttttaaaattttattacatattcatgagacatcgttgggggagctcagcgatggattttggaaaataaagaattctatatcacagtaatttaaaccaattgatgaattaactaggcccaacttcagttgagatagtccagctcatagaccgtattgccgccgttgcccttgaccaccttaatatcgcacacgaagcacgtggcaatctcattgtcctgatcgaccagatagatctcgatcttcacgccaatctcgggatattcaccaatgggaaaggtgaacaaataggagacatcctcggtgggatacagcgggcaataggcgccgtactggagattcgggcacacggcagccacatccgcaggcagttcatatggcaccgtaatgattccgagtgtggtggcctttaccaaggtcgtcagctgggtgatgtacttgtccacggcgaaatcgatctcgaacttctgtgtcgttcccttcacaatctgacagggtggagtaacgcaattgtgcacacgcacctcaagcggaaaaggtttacttccggaacctaattagcatgggattgttgtattgtattacgggtactgtgctgtttgtttaaaaaatggacttacatttcttcacagatgtcgccggatgctcctgctgagcctcagccagcgatagtaataatcctagggagatcagaaccaacaccttaacttccatgtttctcaatgcgaattgctttcggccaacggtgcccacatcgtttttatagccagaaccgagctgtatctcggctaacgcgattggatttggactatctaatcgtggtcggtaacttcttttggatgaatgctatagcactcatatgggaaaacattagaaatttagcatttcaatcaatttgaatcccataatttactttatcaaatttgattcaaattgataccaattactcaataactgaatacttaataaataattgtatctgataaaattaaaatttccaatcaattcacagcattcatttactttatgaaatttgaatcaaattgataccaattactcaaaaactaaatacttaataaattattgtatctaattagatcaagattttcccaatcaattcacagcattacatctgcaatcactggcccctgcgaatggatcggaaaattatgaaaacggtttgcagaattttatcactttatcgccgagttcatgggatccgggcacaaaggcagtgctaaaataaatccctgagcactccgcaggcaggccactaagcccctgatggcaatggaaaacccacagacatttgtgccacggccaaagccactgacaatggaacttctgcggggcaggaaaatgtgcgagtataaaggaaacggacgcaagtaagctggaaaagataactccccctctacgactccattttacctacccggaactcaaatgttggtgaattttccaaaggtaaaagaagcgagggtcgcttaaggcgttgtaaagctaaaacattcattctgttttcgaacctcttctctatttctcaatccacgctcgtgcgatattttgcaaaatttcgcatggttggtggtgacttgccatgtggacagccgcagcgcagcatgagattttctcgaaatgcttttgaacttgccacccttctccccggcaaatgtatttttttctttttacccagagcaactgtcgttgctcc

SEQ ID NO: 29126 - DNA, 522 bp, DROSOPHILA
atggaagttaaggtgttggttctgatctccctaggattattactatcgctggctgaggctcagcaggagcatccggcgacatctgtgaagaaatgttccggaagtaaaccttttccgcttgaggtgcgtgtgcacaattgcgttactccaccctgtcagattgtgaagggaacgacacagaagttcgagatcgatttcgccgtggacaagtacatcacccagctgacgaccttggtaaaggccaccacactcggaatcattacggtgccatatgaactgcctgcggatgtggctgccgtgtgcccgaatctccagtacggcgcctattgcccgctgtatcccaccgaggatgtctcctatttgttcacctttcccattggtgaatatcccgagattggcgtgaagatcgagatctatctggtcgatcaggacaatgagattgccacgtgcttcgtgtgcgatattaaggtggtcaagggcaacggcggcaatacggtctatgagctggactatctcaactga

SEQ ID NO: 29127 - protein, 173 aa, DROSOPHILA
MEVKVLVLISLGLLLSLAEAQQEHPATSVKKCSGSKPFPLEVRVHNCVTPPCQIVKGTTQKFEIDFAVDKYITQLTTLVKATTLGIITVPYELPADVAAVCPNLQYGAYCPLYPTEDVSYLFTFPIGEYPEIGVKIEIYLVDQDNEIATCFVCDIKVVKGNGGNTVYELDYLN

SEQ ID NO: 29128 - DNA, 3893 bp, DROSOPHILA
caacagattgtgacatcacaacgttccccaccaatggagcgctagagatctgcgaccatcgaaggtatttgtgtatgaccactgcgatatgttgtgtttatttatttgctaactgctttaactggccactgaccaagctctaatcaagccaaacctcattcatcaaaagctttaataccctgacaagtggaggcgtacgattaaaccaataacagcgagttaatataaagtatttataaaataatagatttactcacccaagtatttactgacttccattgacacttatttactgggcaaagcaaactggtttaactgccagctggcgcaaaagtgacaaagaaacatgtactttttgtacatctctttttatggaaagctgttgcgggtcaaggtcgtgctgtaatattggaaataaaaatgcaaaaagcttcataacaaatgtattcaagctttaggcaacagttagagcaattacctcggaaaatcttggccagccgagcgcagagattcttggaacagttgcccatctgcagtcacattccgctgcacaagccagctgtagatgatattcaaaatgattctaaaataattaccgaaatccatgatagcatggccgtatctgagcaaaccaacagcagctgaagagcaatcagagtcagggaaaaactaactactaagctaaggagaaaataaacaactggaaaatgcgtcacacttggcggcattttgcatttcctcgttgtgcgattgcatcatgtgacaattaacatgccacaagtgcaagttgcaaccgtgctgttaaggcagccacctgcagtcaaagaaattttttgaaagatgcgtaaaattcaaaattcaaataatattgaacagtaaaatttgctctataaataaattcaagaaaaaatactttttctatattttgaatccaagttaagagcttaataagaaattaataaatccttcgaaatccttcgtacaaattacaacaaattatatgcaattgctggtatcgaaaggcaatcttagacacgtcgtttagaatgcatttttgcaagtgagttggctgaaacgaaatgctcctgttttatggttaaagcctaagcataaattgggacctaactcggcttttccaaccaatcaacattaacgtcatgggcataaagattttaataaccggcaattaaatgaactatccccctcatctatccatccatccattcgatacgtaatcccccgcagcgaacggaggagcgctccatccaactggccgtgcgtgtgcacaagaccctggaattggcggacgataagttttatgtgattacctgtggcaaatcgggctatgcgcggtaagtagaatccgaatgcgaatgcttaacctgtctagacaattgcacttaagtttggctccgatctgttctgtttcggcaacgatgtacaacgctgtgtgtgctgtaatttttggtcaagcttccgtcagtcccaagtgctggccaatttccagagactcgacggcggcaaatcaaatggcaaattgtgcttcgatttggctatgcaggcatgtaggtgttgctcttagcccaccatttgccattgttcgcatttctttctgccttttgcggaactagaactccaaggccattgagctttgggccacacaattcttaacgattttttcactccatcaccacttttgtgcgggctacaaaaaaaaaaaaaacggagagaaagagaattattccccaaaaatggcagaataatcaacaaatttatagtgctcactgggcagcagttcaattaacggtaaacggtcttgagaaggctcgataatcatcttgaggtgaacgaaaaacaatttaatttaccttctcgcctcgcggctcatttgcataatgccaatgactttgctcgactgcgattgcgattgcgtcttacgcaagtctttctcagctaaaattaatttaaaatccccactgagatgccactaatgctaataccatcacaaaaacctcggatgggaaataaaaatggcattaaaaacggttttccaaaacgttgcgctctgttaagtccggaaaaaaagcaaagaaattgttaacagaatctgtgtggtaaacgcaaacattaaaatcgtgctggcagccggtggtacaaggcgaacaacaaatagttttagacgtgtgtacacatacatatattattgtatctcggcttatctggcccacaacacaactgtccatagcgcaatgaccggcaattgcaattgcaattgcataattgcagaacttgcagttgcaattgaagcttcgcccaaagcttttgggtctattggctacgattttaattagccaccagccgtacggaacaattaaagagccacacataccgttaaacccaacctgcttgtataataaacctttatgaaaccaccgatcccactactttttctccagcgatgataacgcccatgtggtgctcaagttcctggagaacgaccatagagtgcgtgagacggtctacggtcacgagtacaagattcgcgccgagttctctaagccaaacggtgggtagtcccagcccctaggctttcgatacttaacgatattctcatattattatcgtccccagatacctatggcctgcgtgtgggcaactgctttgcctttgataagaagaacaggacccaaaagctcaccgacgacagcgggtaagcccatttacacctcgattattaaagaaaatattttaaaatgcaaaggtatacagtaaaaacgattaactcttgaaattacatggagtcaaacatcagcagaacccaaagtacagatattccgcaatatctttattattaaaaaattagcagttaataaatattatttccagtgtaagcacattccatacttatgatctctattcccccaaagctgcccctatgattcgaagatcatcagccgttttgtgcccacagccgatggacgagctgccgaggcggtgctctcctcgatgttcaagttccccgagggtaggacctggaattttcacccgattaggccagatactaactttctctgtaataattctaggatctgaggtgcatctgcagtgcgatgtgatccagtgctatggtcgctgtgtggagatcgatgactgcaacgacgtggctctggctggatttggcaagggcaccaatggaccccggaaatttggtccaaatgaggagggctccagcttggctggaaccactgtctttgtgctcgatcccgccgaggctagatgtgagtttagccgctgaaagtctgggttatttatgatatttattttattatatctgggcagtgatctcgggcaattgcgaggatggcatacggcccagttggctgctgtggctaaccatcaccctgggcgtactcttcctgatcatgttgctgatgaacatcttcctctgcacggccatgagctgcagttgtgccaatacagaggtaataaatctgacgtttataggtacacagagataaatcagagtttaatcagagttcataatatggttgagtacaggaacctctttttctctgcgtatacaataaaattccctcgttattctgttgttctcaaccattcaaaaacacttacagatcatcgagaaggagccatcgattatcgaggagtacgatccgtatcgcagttggcatggcagtcagtacggatcacgctactcgctccatggaagggatgcccacaagggctacaccagcggtggctccacgatacactcaaataggtctgatagatattaagctgcctccataaaacaaacaatcaaacagtaaacacacaccacacacctctattctacacttcaaaatgcatctgatctgctctcgcaaattatt

SEQ ID NO: 29129 - DNA, 903 bp, DROSOPHILA
atgcaattgctgcgaacggaggagcgctccatccaactggccgtgcgtgtgcacaagaccctggaattggcggacgataagttttatgtgattacctgtggcaaatcgggctatgcgcgcgatgataacgcccatgtggtgctcaagttcctggagaacgaccatagagtgcgtgagacggtctacggtcacgagtacaagattcgcgccgagttctctaagccaaacgatacctatggcctgcgtgtgggcaactgctttgcctttgataagaagaacaggacccaaaagctcaccgacgacagcggctgcccctatgattcgaagatcatcagccgttttgtgcccacagccgatggacgagctgccgaggcggtgctctcctcgatgttcaagttccccgagggatctgaggtgcatctgcagtgcgatgtgatccagtgctatggtcgctgtgtggagatcgatgactgcaacgacgtggctctggctggatttggcaagggcaccaatggaccccggaaatttggtccaaatgaggagggctccagcttggctggaaccactgtctttgtgctcgatcccgccgaggctagattgatctcgggcaattgcgaggatggcatacggcccagttggctgctgtggctaaccatcaccctgggcgtactcttcctgatcatgttgctgatgaacatcttcctctgcacggccatgagctgcagttgtgccaatacagagatcatcgagaaggagccatcgattatcgaggagtacgatccgtatcgcagttggcatggcagtcagtacggatcacgctactcgctccatggaagggatgcccacaagggctacaccagcggtggctccacgatacactcaaataggtctgatagatattaa

SEQ ID NO: 29130 - protein, 300 aa, DROSOPHILA
MQLLRTEERSIQLAVRVHKTLELADDKFYVITCGKSGYARDDNAHVVLKFLENDHRVRETVYGHEYKIRAEFSKPNDTYGLRVGNCFAFDKKNRTQKLTDDSGCPYDSKIISRFVPTADGRAAEAVLSSMFKFPEGSEVHLQCDVIQCYGRCVEIDDCNDVALAGFGKGTNGPRKFGPNEEGSSLAGTTVFVLDPAEARLISGNCEDGIRPSWLLWLTITLGVLFLIMLLMNIFLCTAMSCSCANTEIIEKEPSIIEEYDPYRSWHGSQYGSRYSLHGRDAHKGYTSGGSTIHSNRSDRY

SEQ ID NO: 29131 - DNA, 2213 bp, DROSOPHILA
gcgattgtcatgacatggcttacttaactttggcgcggcttatctagcgcctgcactcgaaaaaattatttttatttatacttcttcaatttcaatttaaatccttataagagtttaaagtctgcctgccagctttaacagacaagcatgcttgccagcaaacgagttcgtgtcttaagtctttcatttgtcaaacggaagtagacatatgtgaaataattctggcagccagtgacttttatatgcaaattaagaacacagctgaatcgttttggttctaattggtgccatagaagtttgagtattggtacaggattattattgaattcaacacaaatatgaaagtgcaataacctcctcctcgcttaaggaaattataatcccacaatatctttttaatcgaattcttaaaattgtggcttactattttcttaacttttttgggtgtacccacttcattctttgtaccgtcattccctaacgttctgcggctctaaagctagagcacaaattcaattatcacgacggagcgacagcagcccaagtcgagcacgccaataaattatcttagagccaaatgcctttgacagtgcgctcgactgtaagctgaaaactgacccaaaacgtgcagaactttggcagctgtgttctggcccaaagttctggccaatctccgggtccgtgtgcgatgcctttgccttttcgcaattaattgcgactacggctgactctttggctaaccatttaaaattaatttgaattttcctctttggctgctgtttccactgtgtttgtccaatgagttggcattaatttgcggtccgtgttagtgttagttcccagggtccagaaatcgggtcaaagttattaaccagagaagatggtagacatgcctaacgcttttcgcatttcatattcattgcaggtcacaacacaggaaccaccggcttccccatccgaatttgctccccatgttacggccacatgcaaggcgggcacaatgaacatcaaggtgaagatgagctccggctacacaggcgccgtccacgtccgggactaccgcactccgggctgcatggccatgggcgatggcagcgaccaggtggcttttagcctcaatctgtgggccaaacagggcgccagtgactattgtggcatcctggtcagcaacgtgagtgggagcaatgtaagcataacatccgcgcttctctaaccaatctaatcactaaactatgcacaacttaatgttgcggttgggaaaatatctttaattctgttaaaattttcaaaatatacttaaaatatttgttaggcagggggaaaagaaagaagggctaatagaaaatagaatgctattaaaaaaagtcaaagttcatgggagaaaagtagtactctacttttcaagcaaacaatgtggtaaagatggttcattaagagcattgcatactttttgctaatatcatataattaggtaatgttgtgtgtaaaattatacagaacacagtaaagatactttgcaagtaattgacgaaaaccaacttaaagagacccgctttatcagcaattgccatacagttaccaacacaaccagaaagttcgtgtcttaagtctttcgtttaccaccttcgcgttgacaaattgcaaattaatttcgtcaggcagccagtaaaattgccaaattaccaccaaaatacaggcagtgagttagtgcaaagaccctgccaaaaccccaccaactgtgaactatgaggcaatcctcgggcagctggaaaactgccgatccaagacaacagacaaaagagcttcagtctgaatgaaagaccaacaaatgggggactagagatacctgatgccaaggtctgagaccttgtctggctaaaaagggcacgcatgtgcataaattttagcccgcctatcggccatgtacttgagtcttggccccaaatcaacgcaaatcagctaagacgctaccctggtcgcctggcctggtcgacgttgcagtcaatctatatagtaacgatggcaataaaaatcaagtttaatcctacgtgcatcacaggcgttgacagccggcgactgcaattccgtgtgggtctgagatccggctttttccactcgtacacgcactcgaacaattgccagtcaaaggcaaatcgcattagccatagtgtggcccagtgcaatgcgttgaaatgcaaattatccatatctat

SEQ ID NO: 29132 - DNA, 213 bp, DROSOPHILA
atgaacatcaaggtgaagatgagctccggctacacaggcgccgtccacgtccgggactaccgcactccgggctgcatggccatgggcgatggcagcgaccaggtggcttttagcctcaatctgtgggccaaacagggcgccagtgactattgtggcatcctggtcagcaacgtgagtgggagcaatgtaagcataacatccgcgcttctctaa

SEQ ID NO: 29133 - protein, 70 aa, DROSOPHILA
MNIKVKMSSGYTGAVHVRDYRTPGCMAMGDGSDQVAFSLNLWAKQGASDYCGILVSNVSGSNVSITSALL

SEQ ID NO: 29134 - DNA, 2259 bp, DROSOPHILA
taaatgagttgatgattgatacaaaagtaaagacacaaattgttttccactcgacgcacaattttgcgtgcgtttacctgcggaattgagttagcattgacattagggaatcctttgggcggaaaaacgtctgcgccatttcccggctaatgacaccaggaaaaacactctcgctcccgatccgctttaccagtgcaacgaggcctgcagcctaatcttctcctcgtctacctgccaatccgcaacggtaagccataaaaacgcatcacttcccggtgcgaagactagtcttcattcgcgacacattcgattcagaccgactgacaatcacgcgatctttaagatggcacaaccaggcggagatcacatgatcatcgctatcaccacactgttggttttgatctgttccctacatctcgccaatgcagccagctatcagctacaatcttacgatcttgatacggataatagggctgcatcgaactccagcgaggaggtgttcaatggcggagtcacgtccctggaaagacctctttcttggctgcggaatgccaacagcgtgttcggcagtcccgctggtcatgtggtcatccaggtggccaaggagctgttacatcgatcagccggaaacagtcaagtgggttaaggatacattaccataacattacaattttgttcaaattttgttattttcactaaaggttctaagtctgaatctgaccaacctgcttatcatcatactcctgaaaatacttatcttctcagccggaatgctgggcgctgggcactggagtggctatggttatggacatggtcgctcagccggtcgtagtgataacttcggtttgggcatagcttctggcgatgactatcttataaccggatttctcgccgcccaaggagccggcagagatgagtgcctctatgcagcatcctgtgcctgccccacatcggcctatgagtacgcgaaagcaggacgtgctcttatgggcgccattgaagttttccaagggtaagaagacattcctaattgataagtgcaaactttattaaaaaaaatttgttaaaaactattacaggtgataacttgagatatcgctgtgttatattaagtattaatctggttctaactaatccacagagtgccgctggagaagccgcgctacaacgacctcatcgtcctgatggagcgagccgcctacgatggcttccgaggagtggcctgcaacacgacccagacctgtgacggattgctttaaagattccaaagcaaaatgcactcttatttatgtatctattaaaatgtatattaaatcattaggttgtattacaaacggggtgcagtcaagtgcttggttttcttttgcttgcggtattacagtctcaaatggttcagcttggaaatcagattagttgctacaaaatttaactatgctatgactattattgtgtctacttcggctgtttggttgagtactgttagtcgggatcttggagggattagcgcaggatattcctgtccacattcggctgctccttgccaccggtaattgccttcacgaattccgggtaatgcagcaggccatcgttattgtcgtcggcaatcagcagaaatttatcaattgcctctgtaagaaaatcattttgagatcatattcaaatatatttctatctataaaggggacaataatatctaaagtcaaaaaaaaaaactaagataggaaacgttaaaatacctataaagtgctccagctcatcggtggcattttgtaggtatgcatcccgctcgttgtttttgaaatagtcatagttatgatgcatggcagactgaatcatttcgaggccgtccagtgcattgttattatcattgtcatgggcctaaagcgataacacaaattagtacacctaacattttagtgaaaagccaacgacataccttaaacatatagaagattttctcctcctcactcaaatcatctaaatttgcctggacgcccatgtccttcaaatcgtcatcaatgcgactaaaatatagaaatattattcaaatttttacaacatttgcgttactgccccccacttactgctcctcatgggtgagatgctggtccactctcctggtttcgcccctcggatgatgtggacccctcttgaccgccagagttgcatcgaagttttggctgaagctggctatgcagatgatgaaattcagcagattcgatagattgcacatcctatacattgtgaagtgaattttgc

SEQ ID NO: 29135 - DNA, 723 bp, DROSOPHILA
atggcacaaccaggcggagatcacatgatcatcgctatcaccacactgttggttttgatctgttccctacatctcgccaatgcagccagctatcagctacaatcttacgatcttgatacggataatagggctgcatcgaactccagcgaggaggtgttcaatggcggagtcacgtccctggaaagacctctttcttggctgcggaatgccaacagcgtgttcggcagtcccgctggtcatgtggtcatccaggtggccaaggagctgttacatcgatcagccggaaacagtcaagttctaagtctgaatctgaccaacctgcttatcatcatactcctgaaaatacttatcttctcagccggaatgctgggcgctgggcactggagtggctatggttatggacatggtcgctcagccggtcgtagtgataacttcggtttgggcatagcttctggcgatgactatcttataaccggatttctcgccgcccaaggagccggcagagatgagtgcctctatgcagcatcctgtgcctgccccacatcggcctatgagtacgcgaaagcaggacgtgctcttatgggcgccattgaagttttccaaggagtgccgctggagaagccgcgctacaacgacctcatcgtcctgatggagcgagccgcctacgatggcttccgaggagtggcctgcaacacgacccagacctgtgacggattgctttaa

SEQ ID NO: 29136 - protein, 240 aa, DROSOPHILA
MAQPGGDHMIIAITTLLVLICSLHLANAASYQLQSYDLDTDNRAASNSSEEVFNGGVTSLERPLSWLRNANSVFGSPAGHVVIQVAKELLHRSAGNSQVLSLNLTNLLIIILLKILIFSAGMLGAGHWSGYGYGHGRSAGRSDNFGLGIASGDDYLITGFLAAQGAGRDECLYAASCACPTSAYEYAKAGRALMGAIEVFQGVPLEKPRYNDLIVLMERAAYDGFRGVACNTTQTCDGLL

SEQ ID NO: 29137 - DNA, 2413 bp, DROSOPHILA
tgccttcacgaattccgggtaatgcagcaggccatcgttattgtcgtcggcaatcagcagaaatttatcaattgcctctgtaagaaaatcattttgagatcatattcaaatatatttctatctataaaggggacaataatatctaaagtcaaaaaaaaaaactaagataggaaacgttaaaatacctataaagtgctccagctcatcggtggcattttgtaggtatgcatcccgctcgttgtttttgaaatagtcatagttatgatgcatggcagactgaatcatttcgaggccgtccagtgcattgttattatcattgtcatgggcctaaagcgataacacaaattagtacacctaacattttagtgaaaagccaacgacataccttaaacatatagaagattttctcctcctcactcaaatcatctaaatttgcctggacgcccatgtccttcaaatcgtcatcaatgcgactaaaatatagaaatattattcaaatttttacaacatttgcgttactgccccccacttactgctcctcatgggtgagatgctggtccactctcctggtttcgcccctcggatgatgtggacccctcttgaccgccagagttgcatcgaagttttggctgaagctggctatgcagatgatgaaattcagcagattcgatagattgcacatcctatacattgtgaagtgaattttgcaggaaattgttgtgtgttgagttcgggttttgtgtatattttctaaggggtgggttggccaggccacaactgtcacgcgagctgtcaaagcggttagacttgcgcaggcgctgactttttgatatctatgtagtatttccccactcggccaactgtcaaaattcaaacatagcaacctctttggcacttgtcccgttggttcaatagcattaggcatttattatttatttgagctcacataagcaaacatcgcttaaaacatttacaaattttcaacagtaaaaacaggaaaatgtgcgaacagtactgtgacaagtttgagaccttcaatccggaggttgagtttgccaagtttcaaaaacgcaagcctgtcgtaaggactgcccaactctatgagaatttgcacaagcgggaggatatcaagtgtccctgtgagtaacaggtttctagtttcgtatgaattctataatgttaaaaatgctaaatattttctaaacagacagcttcaaaggttatggcgtggagacggattccaatacaatgtaccgcacttgcaactccgaatatggttactatgcacccaatgcctataccatacccaagcgtttctatccattgccccagagtttctccaatgaagtcgtgcgtttcggcatgtatcgcaatttctccctgaacacacatatggatcgtaccttctattaggacagcaaatctcaatagcctcatattgttttaaggtttatacacaattttacgatttcttatgaaatttgaaattttattctggtcaccaagtaactgtatcatttattcgaaacccttgccttaataagcaaccttgagcaaatctatcaataacaaatttaaaactgtaaaacggcataaaaataaaaaaaaacatttcgaaaagcacccgaaactcgttttgattattatgttaatttaagttcttcagttagctttttgtaaaaaaataaaaagaaaaggtaaaaaactcccaagcaactcaagaccaatgcaagcatttaaattaaaagtaaaccaccaactgttgagtgttatcatatagtcagcaaaatgaggtgagttttattagcataaggtgataggtggaacttaggaataccattatctagtgaaaccaagaagctactcgatgcattgctatgcgatatctacggcaggcaagaagtgttggccaaacgaataaggcgttgttgccgcgatcctgtccataaacgatccccgaagaagaagaaaggacaactggctcaattggccagcggcatggtcggtgatcgatcctccctagagcgtttggatgtgcgcaagctcatcgatgtgtgcgccattctgaaggtcgagatccttatgctgggctatctactggagcgagtcctcgtggccagggatcgtctgcagaggcatcaggaggtcctgtgcgagttcgtcactgctgtgctcatcgtggagagtggtgagttttggactattgattccttatgatttgaatataaaatgtttattatttctatgtatatatatagtatttgaatcatttatccattgcttgagtgcaatgtccttatattcttaggcaaactagattgttggcttacgattctcaaaaatttatttggagtggtgtctttaatataagcaaagtagtatgtctttctcacctgttaccgactatgactat

SEQ ID NO: 29138 - DNA, 345 bp, DROSOPHILA
atgtgcgaacagtactgtgacaagtttgagaccttcaatccggaggttgagtttgccaagtttcaaaaacgcaagcctgtcgtaaggactgcccaactctatgagaatttgcacaagcgggaggatatcaagtgtccctacagcttcaaaggttatggcgtggagacggattccaatacaatgtaccgcacttgcaactccgaatatggttactatgcacccaatgcctataccatacccaagcgtttctatccattgccccagagtttctccaatgaagtcgtgcgtttcggcatgtatcgcaatttctccctgaacacacatatggatcgtaccttctattag

SEQ ID NO: 29139 - protein, 114 aa, DROSOPHILA
MCEQYCDKFETFNPEVEFAKFQKRKPVVRTAQLYENLHKREDIKCPYSFKGYGVETDSNTMYRTCNSEYGYYAPNAYTIPKRFYPLPQSFSNEVVRFGMYRNFSLNTHMDRTFY

SEQ ID NO: 29140 - DNA, 2733 bp, DROSOPHILA
tcaatggcggagtcacgtccctggaaagacctctttcttggctgcggaatgccaacagcgtgttcggcagtcccgctggtcatgtggtcatccaggtggccaaggagctgttacatcgatcagccggaaacagtcaagtgggttaaggatacattaccataacattacaattttgttcaaattttgttattttcactaaaggttctaagtctgaatctgaccaacctgcttatcatcatactcctgaaaatacttatcttctcagccggaatgctgggcgctgggcactggagtggctatggttatggacatggtcgctcagccggtcgtagtgataacttcggtttgggcatagcttctggcgatgactatcttataaccggatttctcgccgcccaaggagccggcagagatgagtgcctctatgcagcatcctgtgcctgccccacatcggcctatgagtacgcgaaagcaggacgtgctcttatgggcgccattgaagttttccaagggtaagaagacattcctaattgataagtgcaaactttattaaaaaaaatttgttaaaaactattacaggtgataacttgagatatcgctgtgttatattaagtattaatctggttctaactaatccacagagtgccgctggagaagccgcgctacaacgacctcatcgtcctgatggagcgagccgcctacgatggcttccgaggagtggcctgcaacacgacccagacctgtgacggattgctttaaagattccaaagcaaaatgcactcttatttatgtatctattaaaatgtatattaaatcattaggttgtattacaaacggggtgcagtcaagtgcttggttttcttttgcttgcggtattacagtctcaaatggttcagcttggaaatcagattagttgctacaaaatttaactatgctatgactattattgtgtctacttcggctgtttggttgagtactgttagtcgggatcttggagggattagcgcaggatattcctgtccacattcggctgctccttgccaccggtaattgccttcacgaattccgggtaatgcagcaggccatcgttattgtcgtcggcaatcagcagaaatttatcaattgcctctgtaagaaaatcattttgagatcatattcaaatatatttctatctataaaggggacaataatatctaaagtcaaaaaaaaaaactaagataggaaacgttaaaatacctataaagtgctccagctcatcggtggcattttgtaggtatgcatcccgctcgttgtttttgaaatagtcatagttatgatgcatggcagactgaatcatttcgaggccgtccagtgcattgttattatcattgtcatgggcctaaagcgataacacaaattagtacacctaacattttagtgaaaagccaacgacataccttaaacatatagaagattttctcctcctcactcaaatcatctaaatttgcctggacgcccatgtccttcaaatcgtcatcaatgcgactaaaatatagaaatattattcaaatttttacaacatttgcgttactgccccccacttactgctcctcatgggtgagatgctggtccactctcctggtttcgcccctcggatgatgtggacccctcttgaccgccagagttgcatcgaagttttggctgaagctggctatgcagatgatgaaattcagcagattcgatagattgcacatcctatacattgtgaagtgaattttgcaggaaattgttgtgtgttgagttcgggttttgtgtatattttctaaggggtgggttggccaggccacaactgtcacgcgagctgtcaaagcggttagacttgcgcaggcgctgactttttgatatctatgtagtatttccccactcggccaactgtcaaaattcaaacatagcaacctctttggcacttgtcccgttggttcaatagcattaggcatttattatttatttgagctcacataagcaaacatcgcttaaaacatttacaaattttcaacagtaaaaacaggaaaatgtgcgaacagtactgtgacaagtttgagaccttcaatccggaggttgagtttgccaagtttcaaaaacgcaagcctgtcgtaaggactgcccaactctatgagaatttgcacaagcgggaggatatcaagtgtccctgtgagtaacaggtttctagtttcgtatgaattctataatgttaaaaatgctaaatattttctaaacagacagcttcaaaggttatggcgtggagacggattccaatacaatgtaccgcacttgcaactccgaatatggttactatgcacccaatgcctataccatacccaagcgtttctatccattgccccagagtttctccaatgaagtcgtgcgtttcggcatgtatcgcaatttctccctgaacacacatatggatcgtaccttctattaggacagcaaatctcaatagcctcatattgttttaaggtttatacacaattttacgatttcttatgaaatttgaaattttattctggtcaccaagtaactgtatcatttattcgaaacccttgccttaataagcaaccttgagcaaatctatcaataacaaatttaaaactgtaaaacggcataaaaataaaaaaaaacatttcgaaaagcacccgaaactcgttttgattattatgttaatttaagttcttcagttagctttttgtaaaa

SEQ ID NO: 29141 - DNA, 507 bp, DROSOPHILA
atgtgcaatctatcgaatctgctgaatttcatcatctgcatagccagcttcagccaaaacttcgatgcaactctggcggtcaagaggggtccacatcatccgaggggcgaaaccaggagagtggaccagcatctcacccatgaggagcatcgcattgatgacgatttgaaggacatgggcgtccaggcaaatttagatgatttgagtgaggaggagaaaatcttctatatgtttaaggcccatgacaatgataataacaatgcactggacggcctcgaaatgattcagtctgccatgcatcataactatgactatttcaaaaacaacgagcgggatgcatacctacaaaatgccaccgatgagctggagcactttatagaggcaattgataaatttctgctgattgccgacgacaataacgatggcctgctgcattacccggaattcgtgaaggcaattaccggtggcaaggagcagccgaatgtggacaggaatatcctgcgctaa

SEQ ID NO: 29142 - protein, 168 aa, DROSOPHILA
MCNLSNLLNFIICIASFSQNFDATLAVKRGPHHPRGETRRVDQHLTHEEHRIDDDLKDMGVQANLDDLSEEEKIFYMFKAHDNDNNNALDGLEMIQSAMHHNYDYFKNNERDAYLQNATDELEHFIEAIDKFLLIADDNNDGLLHYPEFVKAITGGKEQPNVDRNILR

SEQ ID NO: 29143 - DNA, 3663 bp, DROSOPHILA
cgcatctgtaactcggtcgcctgtcttacctcctcctccacctcgagcatatttattgggggttacccttagacttgccttgccagtcggtcggtcataactgtcagagacaaaatgctgcagcttaagagcaggcaagtcctcatagttgcactactgcaactgctccacaatgctgatagattagttctctaatagcatcgcaatccacatccaggcagcacaatacccgcaacggaggaggagatggcggttaggtggtggcatcacaagtgaccactttaagccagacacttggtggaccttcaaggagagtctaccggatgcgagccaacttggtggattattttgtttggcatttctaaagatttccccattgaaacaatgaaatgatatctgtagaatcttgaaattattttaaaaattcagaatttgaaagcaagtccaaatatctgttcatcttcaaaattccttaccttgaaagtatagttaccttgaaagtcgtttactgactgcttttggcatctcatcaaaagcaagccctgaaaaatgtgtatatattttgataaaatattgctcaagacaacatttataaacaaattaaaaatttatgacactgcgcggtaaatatggtggcccaaaatgaacactaccttgttccacagtatctttcggtgcaactgagtcctcgaaatcgtgcatccttgctggggcataattaaaaactgggtcgagtgtagattttcggtggctctcgtccttttatgccagtcagccccagggaaaagcgcagccaaatttgccagcaactttgaagctgattctacccttacatatgtcagttgcaagagcgattgccttcgcttcacccactcactcgcctcgtggataattaattgattgcccatttgattgaacgtttgatggatgagggctgtccgagtgtatggctcagcttactaacggatttcccatctcttgtctcctctccgtctcttgcagtaatttgcatcggctgttagtggagcagcctcgacatcagacccagtcccagccccaaccccatattcagcccggaaaacagtagcagtaccagtcacgggcaccataatcttagacagatctgcagtcacatccatatccacagaaatggtgataagcaaacccgatggaacggcgcccaatggagcggcgggaggagcggaagccgctgccccaactggccttgatgccaccgggaacagtctggcgcatccttcgggaataccgcaggatcagatagacaacatcatgagcggcatcgccaacacgggcaatgtcaaaatgaacaatcaccgcaagaagttgcgacaaaggaaagtggcccctgaattaattgagtccatattaaagttttgaactattaatatgcagtggattcttgacttagtgaatacctgtatgaatttatttaattttaattatcttccctgcagatttgatattattaagaaactaggacaaggcacttacggcaaggtgcagttaggtattaataaggaaaccggccaggaggtggctatcaaaaccatcaagaagtgcaagatcgaggccgaggcggatttggtgcgcatccgtcgcgaggtgcagattatgagctcagtgcatcatcccaacatcatccacatctacgaaggtaattgagtttaagcacagcttaaatatacatagatacaaattgaatgcctaaacacttgcagtatttgagaatcgtgagaaaatggtgctagtcatggaatttgccgctggcggcgagctctacgactatctgtctgaaaggaaggttctcaccgaggaggaggcgagacgcatcttccgccaggtggccaccgccgtctactactgtcacaagcacaagatctgccatcgcgatctcaagctggagaacatcctgctggacgagaagggcaatgctaaggtaagaagaacttaaaaataataataaatatagtataattataaaaatgtaccttctatagattgctgattttgggttgtcgaatgtgtttgatgaccagcgactgctgggcaccttttgcggttccccactctatgcctcgccggaaattgtggaaggcacaccataccagggacccgaggtggactgctggtcactgggcgtgctgctctacacgctggtctacggctctatgcccttcgatgggtccaatttcaagcgactggtgaagcagatcagccagggtgattactacgagccaaggaaaccttcgcgagcctctactctcatccgggacatgctgaccgtgtgtccgaggaaacgggccagtatcgagcaaatctgctcgcactggtgggtcaacgagaacgataatgtgtcctgtctggatctggccgaggatctggccaatcagaccccagtgcgattggatgtcctgctttcccttacgccagccacaatcaccgcggatcagttggtggtgccatcggcggagggagcagctgctgccaaggcggcggccaatgaacgcgttcctcgctcgcattcggtgggctcgatccgggacatgggaccgccgaacacggaggcggaacgtcgcatcctggacatggtggccggtgagtcgatgtccattctcctgcttgacgcttctgaaatcgcttgagtggtccccagtgtgtgagatagaagtcccagtgcagcaacccgcgcatatatgcttctgtaataggttggatcgatttgggcggacataacaaatgtgcaatctatgggattaaattcaagtgttgtttgattgtttaattgaagatctcagaagacttcatagattacaatcttgtgcagactatggtccatcaaatcattccaccctattgtgtatataaatggagactaactggctgcccaatacacaccaacaccaaccgacctatacccactaactgatcctactcctggaaccgaaatccaaccacataatcccatcacttgcgagtgtactaaaccatatgaaactaaagtcatttaaccaaactcattaaaccacgccaccctttctctctctctctctttctctgtctgtttcgtgtttccagctggaggagaagccgccttgatgccctcacccaccaggaccataacccccgcccagagtccggtgcagacgaagaggaaactgcagcccactgtttctacggagaatgcagccggaactacagccaaaaagaaggagaagccggccaatagctcgtttgtgatcagcaaggatggtgcaccactgactgaagcgccaccgaccatcatcgaaccgcaagctacgctcatggaggcggagacgattgccaatatacccgaggaggttcctgttcccagttactcccagaaagacatgcaagcggtgggtgatatttgcgatctgctgatgggcaccgccacaactccagcccctgcaccaccggcacccacacctgttgctcgccagcccaccaggggaaaactggatgccgttgttgaaactcctgaggaaaaggatgccaccaaagtgatcaagaagtttgtgaacaagcacaagaccgcggatctggtaaatgccatcaatgaaagtgcctccaaggccgcagcgccggtgagcgcagtggcccctccacccttcgtccgcaagt

SEQ ID NO: 29144 - DNA, 1454 bp, DROSOPHILA
agtaatttgcatcggctgttagtggagcagcctcgacatcagacccagtcccagccccaaccccatattcagcccggaaaacagtagcagtaccagtcacgggcaccataatcttagacagatctgcagtcacatccatatccacagaaatggtgataagcaaacccgatggaacggcgcccaatggagcggcgggaggagcggaagccgctgccccaactggccttgatgccaccgggaacagtctggcgcatccttcgggaataccgcaggatcagatagacaacatcatgagcggcatcgccaacacgggcaatgtcaaaatgaacaatcaccgcaagaagttgcgacaaaggaaagtggcccctgaattaattgagtccatattaaaatttgatattattaagaaactaggacaaggcacttacggcaaggtgcagttaggtattaataaggaaaccggccaggaggtggctatcaaaaccatcaagaagtgcaagatcgaggccgaggcggatttggtgcgcatccgtcgcgaggtgcagattatgagctcagtgcatcatcccaacatcatccacatctacgaagtatttgagaatcgtgagaaaatggtgctagtcatggaatttgccgctggcggcgagctctacgactatctgtctgaaaggaaggttctcaccgaggaggaggcgagacgcatcttccgccaggtggccaccgccgtctactactgtcacaagcacaagatctgccatcgcgatctcaagctggagaacatcctgctggacgagaagggcaatgctaagattgctgattttgggttgtcgaatgtgtttgatgaccagcgactgctgggcaccttttgcggttccccactctatgcctcgccggaaattgtggaaggcacaccataccagggacccgaggtggactgctggtcactgggcgtgctgctctacacgctggtctacggctctatgcccttcgatgggtccaatttcaagcgactggtgaagcagatcagccagggtgattactacgagccaaggaaaccttcgcgagcctctactctcatccgggacatgctgaccgtgtgtccgaggaaacgggccagtatcgagcaaatctgctcgcactggtgggtcaacgagaacgataatgtgtcctgtctggatctggccgaggatctggccaatcagaccccagtgcgattggatgtcctgctttcccttacgccagccacaatcaccgcggatcagttggtggtgccatcggcggagggagcagctgctgccaaggcggcggccaatgaacgcgttcctcgctcgcattcggtgggctcgatccgggacatgggaccgccgaacacggaggcggaacgtcgcatcctggacatggtggccggtgagtcgatgtccattctcctgcttgacgcttctgaaatcgcttga

SEQ ID NO: 29145 - protein, 434 aa, DROSOPHILA
MVISKPDGTAPNGAAGGAEAAAPTGLDATGNSLAHPSGIPQDQIDNIMSGIANTGNVKMNNHRKKLRQRKVAPELIESILKFDIIKKLGQGTYGKVQLGINKETGQEVAIKTIKKCKIEAEADLVRIRREVQIMSSVHHPNIIHIYEVFENREKMVLVMEFAAGGELYDYLSERKVLTEEEARRIFRQVATAVYYCHKHKICHRDLKLENILLDEKGNAKIADFGLSNVFDDQRLLGTFCGSPLYASPEIVEGTPYQGPEVDCWSLGVLLYTLVYGSMPFDGSNFKRLVKQISQGDYYEPRKPSRASTLIRDMLTVCPRKRASIEQICSHWWVNENDNVSCLDLAEDLANQTPVRLDVLLSLTPATITADQLVVPSAEGAAAAKAAANERVPRSHSVGSIRDMGPPNTEAERRILDMVAGESMSILLLDASEIA

SEQ ID NO: 29146 - DNA, 2981 bp, DROSOPHILA
gcgaatacattagcattttcaatggaactcttaaatcaaatttaaattgaaaatttcaataatagataaaaatttaatattgtattttttaaatttgttaatgtttctgtttaagaccaaaatgtttagcaacaatttgaaatctgtgttacatcgttcttctatagatatgattcagacaattcagatattcgatgaaccagaagactattgatatattgctattttttgctgtgtgggttctaattcgcagttttccactgtattgacatttgcgtgcgccagtgtgagtgagtgtgtcccattcgtgtgtgcataggtgtgatttttttttcctcggaaatcttaccattgctactgaggtgataggtctgcagaatcactcctgaattggcgtccaggaccttgaccgtgcttccgttgtcaaaaagcaaaaggacatttaattgcggatggtagacgacgttgcgcatctcgaatggtcgagatggagcgctattacagtcgcccaaatccaagtagccatcttgcttgaggacgcgctgctggtgatgctgctccgtggccattccggaggtgcgccgcggcaatttgtgtgctcctgcttctggttgggatactctgtaggggtttttttcgcaattcaattcggaaaataattgctgcgaaacagagctctgtgcttcttcttcttcttcgttttgccccttcttcttctaccttctgacagatgtgtttgccattcgattgctagcaatcgcctgtgaatgccaaaaattaatcgagtgcccagggggcgcgcgagtgtaagtgggtgtggccacgtcaagtcagcaaagtaaacacatttaaaaaataaataaaatagtccacttttcaagctagagagcaacaaattcggcctactgcgcttagggcattcgataattcagagccattcgatagacagagatgcctatcgagtaatcgattacaggaatgtcaacaaagtggaaataaaatgaatattttaccaaaaaaacggtaagttttatactgattctaaagatacctctcatcaattcacgtgtatttcttagctggcatgtgcgtaccaaggagaacattgcccgcgtgcgccgggatcaagcggctgccgcagcagaagaaaaagtccggcaggagaaattggaatttgctgtgggtattgcccaaatatcgtcaatttaacatagtaatgtgtacttttatcaaataggaaagcgaggcacgaatcaacttcctgcgccgccaatcgggcttgccggagaaggcctccaaggaatctcgagaggagtcgcaatgcagtactgaaacaaccaaaggggtggatctctttgccgactacaaggcgagagtgaagaccactaacaaagacttggaaaaggagcaaaaggaggagcaggagaagtatgagaagcagatcggctacctcacctacttgggccaggacaccaatgaagctttgaaagtgcgcagctggtacgagttagcccccaaaagaccagaagttggggatcccacagctactgaaactcatcataagcaaaagctagcccacgatcctctgaccctaattaatgctttgttgccgccagaaaaaaaggatcccaaaaaggccacaaaaagaattcgcgaaaggacacccgcgccttctcaggaaccttcaataccccacaaggacaagaaatccaagaaagataagaagaagcacaagagcaaaaatggttcaagggagacccttttggccgaggaacgcataaaacgagaaaagctcgagacgctaagaagggagcgcatgcgacgggaaacagcggaacgccagcgttccgaggctctgttcgcacccaaggagctgccggtggctgccagtgccgaatccacgccggcttcgacgcctaaggttgtccaaaagtacaacagtcagtttaatccggagttagcaaagcaaaatatgctctagccattaattatgttttcaacttaatgttaacagcctgattatgaatataatcactaagcaaataaatagaaattacactttattattgaattgtctaaaaaaatactctttgtttaaatataaaaatgattatcgtcaaatatttgtacttttataaatacatacatatgtataaacacatcgctttaatatccagttattcaaccgttacaagaagtcttggcggtttggtcatggtttaaatttagatttcgcgataattccgcttaaatgatatcggctactttatcggtgccgaaacaggccaatgctgcacagcgtctaaatcggacgaactattaagtgattttgcacttaaaataagaagatagaaacctaatttcgaataaaatttaatttaagataattcatcagttgaaggtgatattaggctatcgacacattgaatttagccccgaaactatactagtttgaattctaacggccgccacacaaatgctcaacagccggctgcagtgttagagaacgtcgcagtttgcggcacatgtgaaaatcactttttggctcggcgtcttggcgtcttcgtttctatttctttgttataatttgcatgcgggttcgaaactctcttgatttcaattaattgttgtgtgcgaaaaacaaaagagccgggccaaatggatgataatacggagaacacagatggaaagcgcggtgagtgaatctaagcgtgctgtgctgaaaaagcaacgggacaagtaaaccggcgctccaaagtcagccattaacggggggctcctatctcaagcaggtcgcctttgcattcgatcgaataaaatttattcttacacattattcattttttcgtttatccgtttaatccaataaatatggtagtgacccgggctagaactcgtcgcttgtcccttctggaaacggacagtcgtccgagcactccgcagttggatacggttgcggaactcggtaagttgtggcccaa

SEQ ID NO: 29147 - DNA, 867 bp, DROSOPHILA
atgaatattttaccaaaaaaacgctggcatgtgcgtaccaaggagaacattgcccgcgtgcgccgggatcaagcggctgccgcagcagaagaaaaagtccggcaggagaaattggaatttgctgaaagcgaggcacgaatcaacttcctgcgccgccaatcgggcttgccggagaaggcctccaaggaatctcgagaggagtcgcaatgcagtactgaaacaaccaaaggggtggatctctttgccgactacaaggcgagagtgaagaccactaacaaagacttggaaaaggagcaaaaggaggagcaggagaagtatgagaagcagatcggctacctcacctacttgggccaggacaccaatgaagctttgaaagtgcgcagctggtacgagttagcccccaaaagaccagaagttggggatcccacagctactgaaactcatcataagcaaaagctagcccacgatcctctgaccctaattaatgctttgttgccgccagaaaaaaaggatcccaaaaaggccacaaaaagaattcgcgaaaggacacccgcgccttctcaggaaccttcaataccccacaaggacaagaaatccaagaaagataagaagaagcacaagagcaaaaatggttcaagggagacccttttggccgaggaacgcataaaacgagaaaagctcgagacgctaagaagggagcgcatgcgacgggaaacagcggaacgccagcgttccgaggctctgttcgcacccaaggagctgccggtggctgccagtgccgaatccacgccggcttcgacgcctaaggttgtccaaaagtacaacagtcagtttaatccggagttagcaaagcaaaatatgctctag

SEQ ID NO: 29148 - protein, 288 aa, DROSOPHILA
MNILPKKRWHVRTKENIARVRRDQAAAAAEEKVRQEKLEFAESEARINFLRRQSGLPEKASKESREESQCSTETTKGVDLFADYKARVKTTNKDLEKEQKEEQEKYEKQIGYLTYLGQDTNEALKVRSWYELAPKRPEVGDPTATETHHKQKLAHDPLTLINALLPPEKKDPKKATKRIRERTPAPSQEPSIPHKDKKSKKDKKKHKSKNGSRETLLAEERIKREKLETLRRERMRRETAERQRSEALFAPKELPVAASAESTPASTPKVVQKYNSQFNPELAKQNML

SEQ ID NO: 29149 - DNA, 7097 bp, DROSOPHILA
actcatcataagcaaaagctagcccacgatcctctgaccctaattaatgctttgttgccgccagaaaaaaaggatcccaaaaaggccacaaaaagaattcgcgaaaggacacccgcgccttctcaggaaccttcaataccccacaaggacaagaaatccaagaaagataagaagaagcacaagagcaaaaatggttcaagggagacccttttggccgaggaacgcataaaacgagaaaagctcgagacgctaagaagggagcgcatgcgacgggaaacagcggaacgccagcgttccgaggctctgttcgcacccaaggagctgccggtggctgccagtgccgaatccacgccggcttcgacgcctaaggttgtccaaaagtacaacagtcagtttaatccggagttagcaaagcaaaatatgctctagccattaattatgttttcaacttaatgttaacagcctgattatgaatataatcactaagcaaataaatagaaattacactttattattgaattgtctaaaaaaatactctttgtttaaatataaaaatgattatcgtcaaatatttgtacttttataaatacatacatatgtataaacacatcgctttaatatccagttattcaaccgttacaagaagtcttggcggtttggtcatggtttaaatttagatttcgcgataattccgcttaaatgatatcggctactttatcggtgccgaaacaggccaatgctgcacagcgtctaaatcggacgaactattaagtgattttgcacttaaaataagaagatagaaacctaatttcgaataaaatttaatttaagataattcatcagttgaaggtgatattaggctatcgacacattgaatttagccccgaaactatactagtttgaattctaacggccgccacacaaatgctcaacagccggctgcagtgttagagaacgtcgcagtttgcggcacatgtgaaaatcactttttggctcggcgtcttggcgtcttcgtttctatttctttgttataatttgcatgcgggttcgaaactctcttgatttcaattaattgttgtgtgcgaaaaacaaaagagccgggccaaatggatgataatacggagaacacagatggaaagcgcggtgagtgaatctaagcgtgctgtgctgaaaaagcaacgggacaagtaaaccggcgctccaaagtcagccattaacggggggctcctatctcaagcaggtcgcctttgcattcgatcgaataaaatttattcttacacattattcattttttcgtttatccgtttaatccaataaatatggtagtgacccgggctagaactcgtcgcttgtcccttctggaaacggacagtcgtccgagcactccgcagttggatacggttgcggaactcggtaagttgtggcccaactcggatcccggttgtttcaagtctaagaatattatttctcgcttcaaaaggtaccgcttcgccacgtgccacacgtcgcacacgtctgaactcgtccactttagatgtgaggactccaacacgaaccaggcgcgcatccttggcacgcggtgaaactcccgagccgacgacgccctcttccgtgaaaaggacagctcgcacgccagctaaaaacaccagatctgtgcgccaacagcttacactaacagaggaacctgaggaaaatgaggtcaagcaggaaaagcccagccccagtccaagccctgtgcccaaagagggcaagggaaaggcacagcggaagcccagtgtcagtccgagtccagggcgaacactcacacccaatcagcagagtgatgagaaacgagtgacgcgttcaatgtctcagactccaccaatgcccactcgttcgtccagtaatacgcctcgtgatcttaacgattcacccaaagttgagcaaaaagctaaacccaatattaaaaccactcccaaagtggcagtcaggctcgagaaactttcaatggacaaattctctggcaagaagatggaaaaggcgaagccattgattgtaccggatgaactcaaggataatggagttgttgaggagcaaaataaatctatcactgaagcccattcacaggcaccagaaacacacgaatcagcccaacctgacaaggatgctggcaaacaatcattcctgaagtcatttactacactttcgaaaattcaaggttcaagtaaagctcttcaccctgatgagagcgcagatacaattacaaaaataactccaacctcgacatccaagaaaattgaagaaaacatggatgatgtgtttgaaacactacgcgtcgagtcccccaaagttgaaagaaaaatcgagactctgcagaaagtccatactgttggcactcctgaaattaaagaaaaagacgagcccgttggggtagacaatgaaattaaaacgaaaaccgaaactccccagaagattgaaccccctataattgaaagcaaagtagaaactcagcaactgattgatcatcctcaaatagaaaagaaaagagatactccacaaaacgtttctactgttgacttaatggacacaagcccagaaaaagatgagtccatggaggaccaagagtttttggatgcagaagattcgattgttcagttagagccacaaaccgatgagccagtagagaaaccaaaagaactggagtttgtagacctcgacgacgatgagccggtatttccgtcggaagctccaaaatatgtcgaagacagtaaggaagtacacccagatgattcaatggatgatgacaagcaaaacaaaatcgatgttaccgaggttatacatctgcccagcataagagctcgtgctgtgcgttctcctgctgtggagcaaaaaaaatcggtggacttcaacaacgacactgatgacttagaggtagaaaagaaacggtttcccaagactccaggacgtgagaaggtgccagtttgtcgcattctaacccccaagccggagacgcccttaaaactggctctgcaaaagggtcgtaatagttccacaccaatattaaaagatcaggaacgtggcctgtccaacagcacggaggaattgcatccagcacctcctcaaattgatgctatcaagccattcgatgagctggaatcaaagaatgctaaggatgagatggtggaacaatcacccatgtcaaagcaaaaggctgagaataaaatcctggctcgtctagaaagctttgaggaagatgttgaagaccacgggaatgaagaagaaaacgaggaggagcacgaagaagacaaatccatttccgaatttgtggacctagaagctgaagatgctgggaaagattacatgtctggagattcgatggacagttcgcttcgccgggaaatggaggagaatgaaattccaatcgatggggagtccgttggcagtaaagatactgaggagtctaccccagaagaatctgatggcgacgattcgtttattgtatcggacaacgaagacgaggaagatttaggacagctttgctactcctctggcgaggatgaaattgaagacgctgaagaatctgaacaagctgagaggtctagcgtgaaacgtcgccgcattattattgcgagccccagtgatgaagaacatgatggaaaagttcagagcaatgacgactcaagtgagaacaaaacagagaagcccaaaaaccaaagtaactgctcatccaatgccagtaaattgagcgaagcggcccaactgttaaacgtcagtgaggaaaaatcttccatctcggaaaccgagctggaaagatctcgccaagtcgctctcaacgaactgaacaaatcggagcggtttaacaagacagaaacgcaactcgatatcagcgtcatggaggtagactcctcggatcacgacgaggaggagaagacagagaaggttggagccaagaacaacagaagcctgtacgaaatcgtggattctgatgacggggaagagcaagatcaagaccaaagtgatgcagataaaccagctgaaagcgaaaaccattccgaaattaaaaaatctacatctttcatggaccaaatgtctggagccaaaggcaacaaaagctgtatacgaaataatggattcttatgaaactgaaggccctaaggaggctggtaaaaacgaggagtctgataaggacaaaccggccgaaaacgggaagtctgataaagacaaacaagccgaaaccgagatgtctgatgaagataaaccatctgaaatcaaaagcccttccacaatcaaaaaatccataatttcaactgcggatgaagaagctctgctcgccgaattggcctctagtgatctaagccatttggaaaaaatgtttaaccctctacagaaatcccgccgccagtccttacatgtccccagtcccgagctggcagccaagaatcccaaactgagacgccgtagtgaacgggttgaagttggcaatgacttctgcccctcgcagtcctttgttgacatggtggccgagaaaaagaggcagaaaaacaagcgcaagcgcctgtcgaaaagcctatcaggcgcaccagaggatcttgaggaaatggagattaagcacgagcgcaagcgccttaagagctcacatggtgcttccacggattcaatggaggaggacaacgaaaacgaaacaatgactgtcgccgaggaacatcacagcgacggggaagtctcgaatggtgaagttcctattgaagaaaagcccactacttcatctgagaaaccatctgcgtcggaattacctgaagaagaagaaactgtcgccgttgaggagcttctcatggagaagccgaaaacttgcgattcaccgcgatccgaggaaagaccgacagaaattgtgacttcaaaaccgaagggtatggcgccggtcaaggtggagaagactgccgaatattacttggcatactgtcacaacctcctggaagctgccaacgaggctaagttaaaggaaaagaaagaggtcagtttcttaaataaaaaatctcctttacgattcacactaaattcgcttatattttatagcatcttgccagcggagcaaagcaaaagaagccaaagcgaattgctgcgcaagcgccatccaagctcctgggcaccatcggctcagaatcggaaaccaacacagcgaaatcgtccaagcagccaccggcgctgaagaaggatgtaaagcgcctacaggcagcgcgccaggctgtgagtcatgctgttaatcttctggcgccaccaaaagccaccgaagcagaggtaagcgttagttagtcgcctacaaataataagagtataaccaaaagtccttgctcctccgcagccacgcacgctctcgcgcaaattgtcgccacagccgccagtggtggacaagaaatcagccaaacagaagaaggggaagaagaagcaaaagccccaggaggcatcaccgctaaagagttccgatgaggagaaccacggccatcgtattcgaacaaatgctggctacgtgacggtggtcgatgagccgcccactaaagttcccaaaatcgagctgattaagacaagttcgggcatggttcgagttgagccgtgcacacccaaacagaagtatttccgcgagctgccgcccacaccgaaaatgcatgggttccgcgaggagccaggaccctccgggatgtcaaggaagcgggccaagcacgcagcaccaaaggtcgaacacaattccgccaaacaggcggcgctgcgcttcaaggagcagatctttgctcgcagatcttaggatacattacatttagagaaaaattagtggaaatgttaagtgtacacaatgcatacttcagtttttgtttcttttcattagcatttccccgattgaatttgattctattatttgttctattggttatttgttacgcaagcccttgctctttgccatatattattattttgttcaattgcacatcacttaaccacacttaacgctagcaagttggttgttgatccaatcaagatatgaaatcaattaagaaattttcgaacttgtccccttttttttttgagcatctgagaaacagaaaataaagcctacccatacaaatacaaaatgaaggaggaaactttttattacgggtccgaacattcggggacaattctctggaaaagtaggctggcggttgcctgtccgtcatgttgcacaaaacttttcatattttttcacatatggctcaccatttcgcaatgcgaacaatttgtaagtaaaatgctattctattctcaagatttagtatcctatttcgatttttgcttttagtcaatgcaaaaattggcgatgcagcctacatccaggatgaactgtcttcgtcgctatcctcttctgtggccagcaaattcaaagaattttcgaagcgcaaacgcatttcggacagtttctcggatctttcagaagaacttgagagaataggtttgcgacagatgaggaaacgcattaagttggagaaatcgttcgaaagaactcccaaaaagaaggtccagaccaagaagcatttaccaccggttcggaagaaggatagcgtgaaacgtcgccgcattattatagcgagccccagtgatgaagaacatgatggaaaagttcagaccaatgacgactcaagtgagaacaaaacagagaagcccaaaaaccaaagtaactgctcatccaatgccagtaaattgagcgaagcggcccaactgttaaacgtcagtgaggaaaaatcttccatctcggaaaccgagctggaaagatctcgccaagtcgctctcaacgaactgaacaaatcggagcggtttaacaagacagaaacgcaactcgatatcagcgtcatggaggtagactcctcggatcacgacgaggaggagaagacagagaaggttggagccaagaacaacagaagcctgtacgaaatcgtggattctgatgacgaggaagagcaagatcaagaccaaagtgatgcagctaaaccagctgaaagcgaaaaccattccgaaattaaaaaatctacatctttcatggaccaaatgtctggagccaaaggcaacaaaagcgtatacgaaataatggattc

SEQ ID NO: 29150 - DNA, 4721 bp, DROSOPHILA
tcttggcgtcttcgtttctatttctttgttataatttgcatgcgggttcgaaactctcttgatttcaattaattgttgtgtgcgaaaaacaaaagagccgggccaaatggatgataatacggagaacacagatggaaagcgcgtgacccgggctagaactcgtcgcttgtcccttctggaaacggacagtcgtccgagcactccgcagttggatacggttgcggaactcggtaccgcttcgccacgtgccacacgtcgcacacgtctgaactcgtccactttagatgtgaggactccaacacgaaccaggcgcgcatccttggcacgcggtgaaactcccgagccgacgacgccctcttccgtgaaaaggacagctcgcacgccagctaaaaacaccagatctgtgcgccaacagcttacactaacagaggaacctgaggaaaatgaggtcaagcaggaaaagcccagccccagtccaagccctgtgcccaaagagggcaagggaaaggcacagcggaagcccagtgtcagtccgagtccagggcgaacactcacacccaatcagcagagtgatgagaaacgagtgacgcgttcaatgtctcagactccaccaatgcccactcgttcgtccagtaatacgcctcgtgatcttaacgattcacccaaagttgagcaaaaagctaaacccaatattaaaaccactcccaaagtggcagtcaggctcgagaaactttcaatggacaaattctctggcaagaagatggaaaaggcgaagccattgattgtaccggatgaactcaaggataatggagttgttgaggagcaaaataaatctatcactgaagcccattcacaggcaccagaaacacacgaatcagcccaacctgacaaggatgctggcaaacaatcattcctgaagtcatttactacactttcgaaaattcaaggttcaagtaaagctcttcaccctgatgagagcgcagatacaattacaaaaataactccaacctcgacatccaagaaaattgaagaaaacatggatgatgtgtttgaaacactacgcgtcgagtcccccaaagttgaaagaaaaatcgagactctgcagaaagtccatactgttggcactcctgaaattaaagaaaaagacgagcccgttggggtagacaatgaaattaaaacgaaaaccgaaactccccagaagattgaaccccctataattgaaagcaaagtagaaactcagcaactgattgatcatcctcaaatagaaaagaaaagagatactccacaaaacgtttctactgttgacttaatggacacaagcccagaaaaagatgagtccatggaggaccaagagtttttggatgcagaagattcgattgttcagttagagccacaaaccgatgagccagtagagaaaccaaaagaactggagtttgtagacctcgacgacgatgagccggtatttccgtcggaagctccaaaatatgtcgaagacagtaaggaagtacacccagatgattcaatggatgatgacaagcaaaacaaaatcgatgttaccgaggttatacatctgcccagcataagagctcgtgctgtgcgttctcctgctgtggagcaaaaaaaatcggtggacttcaacaacgacactgatgacttagaggtagaaaagaaacggtttcccaagactccaggacgtgagaaggtgccagtttgtcgcattctaacccccaagccggagacgcccttaaaactggctctgcaaaagggtcgtaatagttccacaccaatattaaaagatcaggaacgtggcctgtccaacagcacggaggaattgcatccagcacctcctcaaattgatgctatcaagccattcgatgagctggaatcaaagaatgctaaggatgagatggtggaacaatcacccatgtcaaagcaaaaggctgagaataaaatcctggctcgtctagaaagctttgaggaagatgttgaagaccacgggaatgaagaagaaaacgaggaggagcacgaagaagacaaatccatttccgaatttgtggacctagaagctgaagatgctgggaaagattacatgtctggagattcgatggacagttcgcttcgccgggaaatggaggagaatgaaattccaatcgatggggagtccgttggcagtaaagatactgaggagtctaccccagaagaatctgatggcgacgattcgtttattgtatcggacaacgaagacgaggaagatttaggacagctttgctactcctctggcgaggatgaaattgaagacgctgaagaatctgaacaagctgagaggtctagcgtgaaacgtcgccgcattattattgcgagccccagtgatgaagaacatgatggaaaagttcagagcaatgacgactcaagtgagaacaaaacagagaagcccaaaaaccaaagtaactgctcatccaatgccagtaaattgagcgaagcggcccaactgttaaacgtcagtgaggaaaaatcttccatctcggaaaccgagctggaaagatctcgccaagtcgctctcaacgaactgaacaaatcggagcggtttaacaagacagaaacgcaactcgatatcagcgtcatggaggtagactcctcggatcacgacgaggaggagaagacagagaaggttggagccaagaacaacagaagcctgtacgaaatcgtggattctgatgacggggaagagcaagatcaagaccaaagtgatgcagataaaccagctgaaagcgaaaaccattccgaaattaaaaaatctacatctttcatggaccaaatgtctggagccaaaggcaacaaaagctgtatacgaaataatggattcttatgaaactgaaggccctaaggaggctggtaaaaacgaggagtctgataaggacaaaccggccgaaaacgggaagtctgataaagacaaacaagccgaaaccgagatgtctgatgaagataaaccatctgaaatcaaaagcccttccacaatcaaaaaatccataatttcaactgcggatgaagaagctctgctcgccgaattggcctctagtgatctaagccatttggaaaaaatgtttaaccctctacagaaatcccgccgccagtccttacatgtccccagtcccgagctggcagccaagaatcccaaactgagacgccgtagtgaacgggttgaagttggcaatgacttctgcccctcgcagtcctttgttgacatggtggccgagaaaaagaggcagaaaaacaagcgcaagcgcctgtcgaaaagcctatcaggcgcaccagaggatcttgaggaaatggagattaagcacgagcgcaagcgccttaagagctcacatggtgcttccacggattcaatggaggaggacaacgaaaacgaaacaatgactgtcgccgaggaacatcacagcgacggggaagtctcgaatggtgaagttcctattgaagaaaagcccactacttcatctgagaaaccatctgcgtcggaattacctgaagaagaagaaactgtcgccgttgaggagcttctcatggagaagccgaaaacttgcgattcaccgcgatccgaggaaagaccgacagaaattgtgacttcaaaaccgaagggtatggcgccggtcaaggtggagaagactgccgaatattacttggcatactgtcacaacctcctggaagctgccaacgaggctaagttaaaggaaaagaaagagcatcttgccagcggagcaaagcaaaagaagccaaagcgaattgctgcgcaagcgccatccaagctcctgggcaccatcggctcagaatcggaaaccaacacagcgaaatcgtccaagcagccaccggcgctgaagaaggatgtaaagcgcctacaggcagcgcgccaggctgtgagtcatgctgttaatcttctggcgccaccaaaagccaccgaagcagagccacgcacgctctcgcgcaaattgtcgccacagccgccagtggtggacaagaaatcagccaaacagaagaaggggaagaagaagcaaaagccccaggaggcatcaccgctaaagagttccgatgaggagaaccacggccatcgtattcgaacaaatgctggctacgtgacggtggtcgatgagccgcccactaaagttcccaaaatcgagctgattaagacaagttcgggcatggttcgagttgagccgtgcacacccaaacagaagtatttccgcgagctgccgcccacaccgaaaatgcatgggttccgcgaggagccaggaccctccgggatgtcaaggaagcgggccaagcacgcagcaccaaaggtcgaacacaattccgccaaacaggcggcgctgcgcttcaaggagcagatctttgctcgcagatcttaggatacattacatttagagaaaaattagtggaaatgttaagtgtacacaatgcatacttcagtttttgtttcttttcattagcatttccccgattgaatttgattctattatttgttctattggttatttgttacgcaagcccttgctctttgccatatattattattttgttcaattgcacatcacttaaccacacttaacgctagcaagttggttgttgatccaatcaagatatgaaatcaattaagaaattttcgaacttgtccccttttttttttgagcatctgagaaacagaaaataaagcctacccatacaaatac

SEQ ID NO: 29151 - protein, 920 aa, DROSOPHILA
MDDNTENTDGKRVTRARTRRLSLLETDSRPSTPQLDTVAELGTASPRATRRTRLNSSTLDVRTPTRTRRASLARGETPEPTTPSSVKRTARTPAKNTRSVRQQLTLTEEPEENEVKQEKPSPSPSPVPKEGKGKAQRKPSVSPSPGRTLTPNQQSDEKRVTRSMSQTPPMPTRSSSNTPRDLNDSPKVEQKAKPNIKTTPKVAVRLEKLSMDKFSGKKMEKAKPLIVPDELKDNGVVEEQNKSITEAHSQAPETHESAQPDKDAGKQSFLKSFTTLSKIQGSSKALHPDESADTITKITPTSTSKKIEENMDDVFETLRVESPKVERKIETLQKVHTVGTPEIKEKDEPVGVDNEIKTKTETPQKIEPPIIESKVETQQLIDHPQIEKKRDTPQNVSTVDLMDTSPEKDESMEDQEFLDAEDSIVQLEPQTDEPVEKPKELEFVDLDDDEPVFPSEAPKYVEDSKEVHPDDSMDDDKQNKIDVTEVIHLPSIRARAVRSPAVEQKKSVDFNNDTDDLEVEKKRFPKTPGREKVPVCRILTPKPETPLKLALQKGRNSSTPILKDQERGLSNSTEELHPAPPQIDAIKPFDELESKNAKDEMVEQSPMSKQKAENKILARLESFEEDVEDHGNEEENEEEHEEDKSISEFVDLEAEDAGKDYMSGDSMDSSLRREMEENEIPIDGESVGSKDTEESTPEESDGDDSFIVSDNEDEEDLGQLCYSSGEDEIEDAEESEQAERSSVKRRRIIIASPSDEEHDGKVQSNDDSSENKTEKPKNQSNCSSNASKLSEAAQLLNVSEEKSSISETELERSRQVALNELNKSERFNKTETQLDISVMEVDSSDHDEEEKTEKVGAKNNRSLYEIVDSDDGEEQDQDQSDADKPAESENHSEIKKSTSFMDQMSGAKGNKSCIRNNGFL

SEQ ID NO: 29152 - DNA, 3347 bp, DROSOPHILA
tatggaacctttttcacagacagacagacagatggagctcggatttatgtgcgaatattgtgcactggacaaatgtaaataaaatggcccgcccacagaagaattatgtattccatacgcgtaatgcgggaattttaaagcataaatcccagcctctctgatatttgaccttcaattaggccgcaaactcaacagcttcctcgtacattagtagcagcatcatttagtcgctagataaatgtactttcacttcacttggcacgcagaaaatcatctccgaatatgtcacaatatggcgagtacttattaatcatacgctccgttgtcaacgttaataaagtcgatgacggcgtccgttgctctctaacttccctactcccaccaccacccatcgacaagatgagttggcggcaactgcaaaatgtttttcgccataataatgtcaacatattatgttgcataagtggctctttcccccttgcgaagacccctcccagtcacagccccgccctgccgcagcaacaaactcgataccactggtgaaactttcccgggaaaaaaggcagtgaattggagaagggatgcagcgacgagtgttttgcacacattttaacttgtcactcgtgaatggcctgtggtagatttattacacactcttgcagcaagagaaatgagtaatagattggttttcccctcgaaatgctttaagagctctcaatattatctaataagggcttaaactgcgagtattcttcatcgcatatatatttttaaaacgcgaatacttaaactagttgctttaggatccacttagttaagttatattcaataagttgagaaacagtgcacacatttgcttgtatagcttggaataagttagaatgagttattaagaacttttcaagactttttatcgtagtttcccttctaataattcgcttgatataaactgacaaaacaaaagtgcccataaatcgttagctggacacgctgtatttatatgttccaactcttttcacaggacattgatttcgacgggttccggcgcttcctggacgccttcctcgactgcgaggcgccgttggacctggccaaacatttgtttgtgtccttcctcaagccgaatgtcacccaggcccagctgcatggccgggcacttaatcaaatggccgccatcagcagcacggccgcctgtgcgccggtcacgtcgcacacgaagggtaagagatcgtccttaccacccacaccacccatactgcccatacgcatacccatcccacccactctcatgtgcatgtgaataatcgctgaacatttctttttggcccaccctgcgcccacatctcgccctgctcccatcccgaccgcctgtaattaggctccataccaaacatcaatagcattgccgagctgatgccgcagtgcagcggaggcggaggcggcatcggtggcacggggggcgtggccggggccgaagggcacgcacaagcccgcagcagctttgtggacaaaatccatggcatcacggataaattacaccactcgctgggcggacatctatcccacgatcctagcaagaccggtgagtaacgaagggaaactgccagggagctgcgattcaggatgagtttacagaacagtgtcctttgaatgtatgtccggttttgatcattaaagtggattttgctcttaattaaactactctcaagaacactcatttctctttaaagatatgcaaacaaggaagttgactaatcttcccaaaataacttgtttctaatgaaccaaaaagctgattcaaaacaaacagaatagttgtaaaaatatataaaaaatattaaacaaataattcctttatatctgtcgtgttccgtaatattgaacgccaatcaaggcttaatagtatgacaaacagatttacattttgcaataacatatagccggtttaaatcgattaaaattaaaataaaataaaaattccaatgctgtcgataatcatatttaaagttttcatttccgtttttaaagaattgtgtttgcacatttatttattggttaaagccaacagttatggtccttaaatttcttttgctgcctctgggaacctacgtgatatgtgcgtctaattcatccaacggtccactcaacaggcagtgtccatccgatgctcacggtgacgccgagtcccttggccagcggacccagcatgttccaggcgagcaatccggcccgtcgctccgtggactccagtccctcgcactcggccaccaaccactcgcagatgtctcgcaactcctcgaagaagagcagcaactcggttaattgcaaaattgatggtgagcattaattaggcatctacgcccatccgaattacgatgtgcatgcgacttccaattaagtcgcttattgtgcaatcatcatgtgatgtggaattggaattggaacagggattggaactgtgactgggattgggattggaggtgcacatccaactgattgggcagccaacatacgtagctggcgaacaattcaaatgcaaaaattaaccgtctgtgtgctccatttgctcgggaaaaaccaacttttgtgattgctttccgaatgaaggccagcagcatttgttacaatagttttgcataaaagtggttgaattagcgaatttaaaatgcaaaaatggatgttcctacatttgcagtcttatttaaaaaatttaaaattgcctgctttctagatgttcgaattgatagagtgaatggtaatggcacaggatagctggttaagctgaaaattcctacttatttgcctatttacttagttaacttgctcgcgaacttgctaattagtggagcgagtggaaaaagcaaatatcagcgcggaagtaaaacaaggcagacattcgctaattcatgagttcataaattatgcgaattgcagtcgctagcaaagacgacgaaacttggcaccggaagtcgggcgctcctcttccgtttgcccagcgaaaacaacaaaggacagcgtaaaaaacaaaagccaagggtcggtctcttgtctcagagatcgtgtcgtaaatcaacgcccaattagaaacatttctgcatttcacgaagtcgcaactcgtaaaatgcgaggcctgcgttaaattaacatttattgctaacacacagacagacacgcgcctccaggacactcgcacacacacacacacactgacgcagcgcggcgcaattgcggcctgaaagtatgcagcacaatttttctcttttcgcttcgccctcgcccttcgctccctttttcgccttcattcatttcgcttcgcttgaaatgtgcacgagaatgattaatgaacg

SEQ ID NO: 29153 - DNA, 621 bp, DROSOPHILA
atgttccaactcttttcacaggacattgatttcgacgggttccggcgcttcctggacgccttcctcgactgcgaggcgccgttggacctggccaaacatttgtttgtgtccttcctcaagccgaatgtcacccaggcccagctgcatggccgggcacttaatcaaatggccgccatcagcagcacggccgcctgtgcgccggtcacgtcgcacacgaagggctccataccaaacatcaatagcattgccgagctgatgccgcagtgcagcggaggcggaggcggcatcggtggcacggggggcgtggccggggccgaagggcacgcacaagcccgcagcagctttgtggacaaaatccatggcatcacggataaattacaccactcgctgggcggacatctatcccacgatcctagcaagaccggcagtgtccatccgatgctcacggtgacgccgagtcccttggccagcggacccagcatgttccaggcgagcaatccggcccgtcgctccgtggactccagtccctcgcactcggccaccaaccactcgcagatgtctcgcaactcctcgaagaagagcagcaactcggttaattgcaaaattgatggtgagcattaa

SEQ ID NO: 29154 - protein, 206 aa, DROSOPHILA
MFQLFSQDIDFDGFRRFLDAFLDCEAPLDLAKHLFVSFLKPNVTQAQLHGRALNQMAAISSTAACAPVTSHTKGSIPNINSIAELMPQCSGGGGGIGGTGGVAGAEGHAQARSSFVDKIHGITDKLHHSLGGHLSHDPSKTGSVHPMLTVTPSPLASGPSMFQASNPARRSVDSSPSHSATNHSQMSRNSSKKSSNSVNCKIDGEH

SEQ ID NO: 29155 - DNA, 2231 bp, DROSOPHILA
tgctcagatggaatgttaattggatatactcgcaatataatatgtgtccttcgaatcgttactccccctaagtagttcggaatattaaagcttacttcgaagactaaccatagtttttacaaacacttcacacctaatgttatggagcgcgtcgagatatcctagccattttccgagtccaaattgagttctcctcgtacgtgccatcctaaccgaccttagacttcctcagcaggatatccgcactgcacacgattaatccttaatgtacgtggactcttgtatactgtcgaactactattgcaaaccaacgtaatatacataaaagtcgatttaattttgcaaataaacattttcaatgcgattccccgcgcccacgagtcctcggttccgcatggaacacggggttttggtgccagcgccgggacgccgctaatgccacacagtagccagttaacattaattataaatgaaccacttaatattagtaaaatgcaaagcaaagcggctcagcaaggccacgcttgtgtacagtacaactagatgtaagcgtatacctgtctaatgttaaatcgaagtaatcgaaaagtagctactagttgatattagccgagaaaaaataacgaaaatagcaagtggaacttgaaaactatacactacgttaagcgataaataatgcctaagtagttgaatgtattcactaagcggagttataacctgtgtacaaagctgggttcctttcgtaacttcattagtttttcatttttaacttaaattatccatgtgatgtgctgcttcaggtgtcatgtcacatggtacgaccctgtgccccatggatcttcacttgtgccaagaactggtggcgatggggtccccagttaaggtgtaaccactctaaaatagggaacgaaatgtaaaactgtaaaagggcataagccatattatccatacatgtatactcctataaccagtgtttaaaaaaaccaccaataaattcaaattacgtatactcttggcttaagccgtacgcattttgcaggtgcaactgcacgtggggtccgtacagactgatgaaggtaagcacctggttgcagctgggctttccgaactgctttagcacttcggcggtgcggcatggatgcaatgccataaagggtctgaaaagcaccgggtgatccatctgggtgagtatctggtggagatcgctggccttcgattcgggcatgaacattcgccaagtggcctccacatccaaaagacttccatctacgataagtggatttattttcacatctagtgagattttgtaaaatatgtaaatacctgatctgtgtgcctggaagaacaacattggtacttgataggaaacactgaagaccacatggtactccacactaaccaactcagccgagttgtccttgccacctcggcatttaatcttctgactacatttgagataggtgtttggttcattcgagtccttaattgggatggaaaacgtattaaataattagcccgaattataaaatccgcactgcgagataccttttgttccaatatccaattatcacccaacttctgcgaaatttcgaggaactgcttggcctggctcaaaaaatctttccagctcaagtcgcccataatgctgaaaataaagcacaaaaatatgcgtgttaaaatctttaaacacttcaaatacccacgcgtaacgatacttgaaagaaaacaatttcttttgcgtgggaaacaagcctcatacatatatttaagaatgtcctgtattctagagcaaaattgaaacgccaaaggttaaagctcctcaacacaatacacttaagcttaacacaaatcgtcaattaacgaatatcaattgcaataatccataagttaggcgctgcgcaggtcgccgtccagggcggtaacctggacattctcgttgcgccggacctgaaccacagtcaccgtgccggccttgtcatcaaatttgcacgtcaccgtgacctcccgcagctggaaggtaaatatttgcgagccatattttgtgcgcaagtaaacggagcgcggatccgcctccagaatgtccacgatgcactgcttctccacctgcagctcctttaactgcgcctcggcatgctcgttaaaggtcacgctaagtctattgctggccaccacccagttgggcactcgcacggcgctgggtggcggcagaatagcgtcagctccaatgcccg

SEQ ID NO: 29156 - DNA, 231 bp, DROSOPHILA
atgttcatgcccgaatcgaaggccagcgatctccaccagatactcacccagatggatcacccggtgcttttcagaccctttatggcattgcatccatgccgcaccgccgaagtgctaaagcagttcggaaagcccagctgcaaccaggtgcttaccttcatcagtctgtacggaccccacgtgcagttgcacctgcaaaatgcgtacggcttaagccaagagtatacgtaa

SEQ ID NO: 29157 - protein, 74 aa, DROSOPHILA
MPESKASDLHQILTQMDHPVLFRPFMALHPCRTAEVLKQFGKPSCNQVLTFISLYGPHVQLHLQNAYGLSQEYT

SEQ ID NO: 29158 - DNA, 2422 bp, DROSOPHILA
cttccgcgtatcgatgacaaaggcatttacatcgaatttgcgacggcatccctgatagttcatgtacctaaccttaccgaagatagcccgctccttccagcccatgtcatggacgccgccaatggaccacatgcagcccacatagccgttggggtcgcgaccatccagactgtacttgtcgttcagcaggattgcgtactccaacgcatgctccggtgtcgctgtccattccagaatctttttggcccagtacatgcgcaaaaagccgtgcatctttccctcgcgtaccagctgcagttgcgccgagttccacaggtcgtcataagtgagagactaggaaaaaattataaaatcattttagtctcaaatcaaaagaaaaagaatccgtggtgaaccttttctagttcttctaagctgtagcagggatctcgcttgtccttgcgatgtgcatctagcgtttgatatgcccaagaacttagacctttaagactatcatagtgctcgttgtagaagcaaaagttatccgccttggccttggggtgggaattgttgcggtgaaaatgatagatgagccacagatgggaaaagtcctctagtccctccaaggagtgctccggattggtgaacacaccgtcgttcagttggatgataccccgcaggcgactgcccacaattgactgcctcggcacggcccgcttctctgggaatgctgtccggatcactcctatgggccgaaagtgtgcgtagtcctctcccaagcagtgcccaccattggtataattgctctaaggattgggtgcgaggtttgtatgtgtctttcagtgtgtgggagggtcaaacgcacctgaccttggcccgtctgctggtcctgcgtctgctgttggtgctggtgctcctgcttctcgccggcgaccttgtccttggcgcttttgttgttgttcgcacacccctcgcagcggaagtcctgcagcaggcgggttatcgtctcaatgtccttgcgctgcacatgctgcaggttgcgcacttgctgcgcgtgggaaacaagcctcatacatatatttaagaatgtcctgtattctagagcaaaattgaaacgccaaaggttaaagctcctcaacacaatacacttaagcttaacacaaatcgtcaattaacgaatatcaattgcaataatccataagttaggcgctgcgcaggtcgccgtccagggcggtaacctggacattctcgttgcgccggacctgaaccacagtcaccgtgccggccttgtcatcaaatttgcacgtcaccgtgacctcccgcagctggaaggtaaatatttgcgagccatattttgtgcgcaagtaaacggagcgcggatccgcctccagaatgtccacgatgcactgcttctccacctgcagctcctttaactgcgcctcggcatgctcgttaaaggtcacgctaagtctattgctggccaccacccagttgggcactcgcacggcgctgggtggcggcagaatagcgtcagctccaatgcccgcgttcccgctgtagccagctgctccatacagttccaggtccgattcctctccgtcaggctcctgtctggagtcgtagaagtccaggctgctctcatgcggtccaacagaggttcttcctgtccggggcaagaactttagttgcatttctgcttgattctcgtccaacgtacctgagtcaacgctcaaggatggtgcatcgtagtgtggaatgtagggcttaatgtccaacacgggtgtgccgtctaccatgtccgtaccaaagaaactaatggtggcgttctcgatcttctcaatctccaccaacgagagaccaatgggacacgggcggtgtggagatcgtgtggaaaacacacccacccgctccccaccaagacggggaggcgccaccttggccttggggtgggaattgttgcggtgaaaatgatagatgagccacagatgggaaaagtcctctagtccctccaaggagtgctccggattggtgaacacaccgtcgttcagttggatgataccccgcaggcgactgcccacaattgactgcctcggcacggcccgcttctctgggaatgctgtccggatcactcctatgggccgaaagtgtgcgtagtcctctcccaagcagtgcccaccattggtataattgctctaaggattgggtgcgaggtttgtatgtgtctttcagtgtgtgggagggtcaaacgcacctgaccttggcccgtctgctggtcctgcgtctgctgttggtgctggtgctcctgcttctcgccggcgaccttgtccttggcgcttttgttgttgttcgcacacccctcgcagcggaagtcctgcagcaggcgggttatcgtctcaatgtccttgcgctgcacatgctgcaggttgcgcacttgctgcctgca

SEQ ID NO: 29159 - DNA, 1751 bp, DROSOPHILA
caaagggatttgtaaaaaaaaatattaacaaacatatgtaaattgaagacaaaacttttactgctcagtaacgttatcttatataatttttgttgaggcttacaacgttatttcttaagaaaatgtttgtaaaaaaagctattgagcgcaagctaaatctaactggaattaaggcagttggccgtaactaagcacaggtgaacctatcgacaatcgataacgtcgcggtgccgtgcgtaagtgatggccaactctagctggatgtaaccattgagaatcgaggtaaatattggtcaataacagcggagaacgctgcaattgcggattatttgggagtcaagtgcgcgttgccggcagcgaaaatgcacgaggatgatctgaagagtcagttgaccatcgcgcggaacgagatcaacaatctcaggcagcaagtgcgcaacctgcagcatgtgcagcgcaaggacattgagacgataacccgcctgctgcaggacttccgctgcgaggggtgtgcgaacaacaacaaaagcgccaaggacaaggtcgccggcgagaagcaggagcaccagcaccaacagcagacgcaggaccagcagacgggccaaggtcagagcaattataccaatggtgggcactgcttgggagaggactacgcacactttcggcccataggagtgatccggacagcattcccagagaagcgggccgtgccgaggcagtcaattgtgggcagtcgcctgcggggtatcatccaactgaacgacggtgtgttcaccaatccggagcactccttggagggactagaggacttttcccatctgtggctcatctatcattttcaccgcaacaattcccaccccaaggccaaggtggcgcctccccgtcttggtggggagcgggtgggtgtgttttccacacgatctccacaccgcccgtgtcccattggtctctcgttggtggagattgagaagatcgagaacgccaccattagtttctttggtacggacatggtagacggcacacccgtgttggacattaagccctacattccacactacgatgcaccatccttgagcgttgactcaggtacgttggacgagaatcaagcagaaatgcaactaaagttcttgccccggacaggaagaacctctgttggaccgcatgagagcagcctggacttctacgactccagacaggagcctgacggagaggaatcggacctggaactgtatggagcagctggctacagcgggaacgcgggcattggagctgacgctattctgccgccacccagcgccgtgcgagtgcccaactgggtggtggccagcaatagacttagcgtgacctttaacgagcatgccgaggcgcagttaaaggagctgcaggtggagaagcagtgcatcgtggacattctggaggcggatccgcgctccgtttacttgcgcacaaaatatggctcgcaaatatttaccttccagctgcgggaggtcacggtgacgtgcaaatttgatgacaaggccggcacggtgactgtggttcaggtccggcgcaacgagaatgtccaggttaccgccctggacggcgacctgcgcagcgcctaacttatggattattgcaattgatattcgttaattgacgatttgtgttaagcttaagtgtattgtgttgaggagctttaacctttggcgtttcaattttgctctagaatacaggacattcttaaatatatgtatgaggcttgtttcccacgc

SEQ ID NO: 29160 - protein, 412 aa, DROSOPHILA
MHEDDLKSQLTIARNEINNLRQQVRNLQHVQRKDIETITRLLQDFRCEGCANNNKSAKDKVAGEKQEHQHQQQTQDQQTGQGQSNYTNGGHCLGEDYAHFRPIGVIRTAFPEKRAVPRQSIVGSRLRGIIQLNDGVFTNPEHSLEGLEDFSHLWLIYHFHRNNSHPKAKVAPPRLGGERVGVFSTRSPHRPCPIGLSLVEIEKIENATISFFGTDMVDGTPVLDIKPYIPHYDAPSLSVDSGTLDENQAEMQLKFLPRTGRTSVGPHESSLDFYDSRQEPDGEESDLELYGAAGYSGNAGIGADAILPPPSAVRVPNWVVASNRLSVTFNEHAEAQLKELQVEKQCIVDILEADPRSVYLRTKYGSQIFTFQLREVTVTCKFDDKAGTVTVVQVRRNENVQVTALDGDLRSA

SEQ ID NO: 29161 - DNA, 2596 bp, DROSOPHILA
caaagctacatatttattgttgttgaataaagtatcgccctgttactgtatttaaatgccagctatttgaaaaataaaacttgtgcatcgaatgaagaacgttgcttgtgtaagcccaagggcgtgtgaaggttatatcgggcggacttgctgagatatgcagtgaatacacaaataagtatctgtgcttcgcctgggagagtcatcccaatcccaaaggaacgatgtttctatttatgtacataccatatgtatgtatgtacgtttgttgttgccaactctggcagtctcgaaattcgaagataacgaacaaatatattctcttatcgctgcactttgaaacctgtgcggatgctgtttgtttgtctcggatttggattcttcggcaaaacaacataaatacacataacgaccaattgaactcagaccatataaactatatagcttatatatactttatactttttggtggataaagggtttgttttcatatatcgacctgcgttcttatacaaagcggctttcttatgagcataaccaaggtcacgaaaggtcatacacatatgcttgctgcttggtacatagcttatcggcattacagaattgaatcgattagcatcaaccagggctgcaaagagcgggatatttgaaaatgccgtcattctaaatttccaaatgctaagcttaagatatttttaaaaaatatgtagcttttattatttgagctatttctgttcaaattataaggcttaatagaatttccatttaacaatcataaaaatattgatggtaaatcaaatggaaaagtaatttcaacaaatcaaactctcagtattaatttgtatattatagaatgtaatatataaatacaataacaccactaaaaatgctcttcaccatattatatataattattgcatttagtaaagacaaaatatataaccatatctcagaagcatcatgcttttgataaaccaacaattgtaaatggcaaaatgcatcatatgggattcaccaaaatacttttgacttgcatgtcggcatacttcggtggaagcccatccttgcgcatcctgcggaaggccttctgcaccgcatagaatgccattccgaggcagcctgaaagtagtttttggatttattgaaggacgaagttaatctctatattgtacctatcattggcgctgcgcaaaacatgacgattaaccaatcgcccatggccagcagcacaatggatgagtaacccattaagtagaggaacatggcggttgtgatcatccagggcacgaagagcttgtgcctctcctgcgatgagagaatgtgggtgaaaaattggaagttgcattgggagtatggccgaccttgatggctccgccgatgagtactgcgctgctgataatctgcatggacgctatgtgaactccaaatgcgtaggataattctgcggggaaactggtattagatgtgctggctcttgaactttgacccccgttcagtacccctcaagttggcgaatatgatgaggtaggcgatcgcaaggcagatcgatgcagccccggagcaaataatgcccgccttggagtccggtttccacatttccaactcctcgatgggcgttttgttcgcaaatgatccattgttccattactaaaaagctttttttaatacttatctaatcagccattgctttatatacaacgcatatacataaaagcctttgtgggatatataggcaccgcaaaagggataataaaattgtgcatcatagaaaacaagctttgctaaaagccaaatgataaaagtaaaaaaaaaacagaattacctttgtcagagataacagagatgtgagctggaaacgaaatttcgcagaaaaaagataacaaatatattttcagagcacactgaaaataatagttcacaaaagtgattgccttaaagtttatagttcccattgcaaattgtaataaactttagaaaagtttaaatttacaccgatttcttgtgggtttgtttcgtttgaatagcacttaaaatgagcttttattttccagctatctgatctacctttaatcttttttttgtttgtattgaaattgcttatatatgtatctatatgtgattgatgaactccttcttgtcggacaagctggcatatgccggtggctcctccttgcgcatcctgtcgaaggccttctgcaccgagtacagggcgcagcccagataggctgaaagtgaaggattttggttaattggctgtccaatctctggctgcgttaactcctcacctgtgaacggaacgaccatcaatggtccgaagatccaagctgtgccctggactatcagtgaaatgaacaggttcaccatcaggtataaaaagaatcctgtggttatcatccacggcacgaagaacttgtgcttttgctgtatgcagcaaagagcagagcaaagagataagagataagagtgttgtggactgtgcacagtgtgcctaactaacctttatggctccaacgatgaggaccacgcttcccaagatctgcagcgccgaaatgtgtattcccatctcgtagagtccatctgaaacgaaatagctcta

SEQ ID NO: 29162 - DNA, 444 bp, DROSOPHILA
atgtggaaaccggactccaaggcgggcattatttgctccggggctgcatcgatctgccttgcgatcgcctacctcatcatattcgccaacttgagggattatcagcagcgcagtactcatcggcggagccatcaaggtcggccatactcccaatgcaacttccaatttttcacccacattctctcatcgcaggagaggcacaagctcttcgtgccctggatgatcacaaccgccatgttcctctacttaatgggttactcatccattgtgctgctggccatgggcgattggttaatcgtcatgttttgcgcagcgccaatgataggctgcctcggaatggcattctatgcggtgcagaaggccttccgcaggatgcgcaaggatgggcttccaccgaagtatgccgacatgcaagtcaaaagtattttggtgaatcccatatga

SEQ ID NO: 29163 - protein, 147 aa, DROSOPHILA
MWKPDSKAGIICSGAASICLAIAYLIIFANLRDYQQRSTHRRSHQGRPYSQCNFQFFTHILSSQERHKLFVPWMITTAMFLYLMGYSSIVLLAMGDWLIVMFCAAPMIGCLGMAFYAVQKAFRRMRKDGLPPKYADMQVKSILVNPI

SEQ ID NO: 29164 - DNA, 2633 bp, DROSOPHILA
ccgaggcagcctgaaagtagtttttggatttattgaaggacgaagttaatctctatattgtacctatcattggcgctgcgcaaaacatgacgattaaccaatcgcccatggccagcagcacaatggatgagtaacccattaagtagaggaacatggcggttgtgatcatccagggcacgaagagcttgtgcctctcctgcgatgagagaatgtgggtgaaaaattggaagttgcattgggagtatggccgaccttgatggctccgccgatgagtactgcgctgctgataatctgcatggacgctatgtgaactccaaatgcgtaggataattctgcggggaaactggtattagatgtgctggctcttgaactttgacccccgttcagtacccctcaagttggcgaatatgatgaggtaggcgatcgcaaggcagatcgatgcagccccggagcaaataatgcccgccttggagtccggtttccacatttccaactcctcgatgggcgttttgttcgcaaatgatccattgttccattactaaaaagctttttttaatacttatctaatcagccattgctttatatacaacgcatatacataaaagcctttgtgggatatataggcaccgcaaaagggataataaaattgtgcatcatagaaaacaagctttgctaaaagccaaatgataaaagtaaaaaaaaaacagaattacctttgtcagagataacagagatgtgagctggaaacgaaatttcgcagaaaaaagataacaaatatattttcagagcacactgaaaataatagttcacaaaagtgattgccttaaagtttatagttcccattgcaaattgtaataaactttagaaaagtttaaatttacaccgatttcttgtgggtttgtttcgtttgaatagcacttaaaatgagcttttattttccagctatctgatctacctttaatcttttttttgtttgtattgaaattgcttatatatgtatctatatgtgattgatgaactccttcttgtcggacaagctggcatatgccggtggctcctccttgcgcatcctgtcgaaggccttctgcaccgagtacagggcgcagcccagataggctgaaagtgaaggattttggttaattggctgtccaatctctggctgcgttaactcctcacctgtgaacggaacgaccatcaatggtccgaagatccaagctgtgccctggactatcagtgaaatgaacaggttcaccatcaggtataaaaagaatcctgtggttatcatccacggcacgaagaacttgtgcttttgctgtatgcagcaaagagcagagcaaagagataagagataagagtgttgtggactgtgcacagtgtgcctaactaacctttatggctccaacgatgaggaccacgcttcccaagatctgcagcgccgaaatgtgtattcccatctcgtagagtccatctgaaacgaaatagctctatgcatcgcaaagatatccaagattggtatgtatatgcgcctacatttccagaagtaatcgtccatcaaaaccagataggttatggcaaaggctatggacaggcagcccgagcagatgattcctcctttggtgtccagcttccacatgtttccaaaatcgcagagtaacttgcagaccgccgattatttcacaactaaactggacgggagtattcatggtggtgatgggtgagcaggctagcttttgccgcagaccttatctaatctcatattgtactgtagctcctccaccagcgcaacaacaattgaagaaaacctttgttggttagtgtataattataattttattgaaggattcgcttattattgcttcgactggccagctaactgggcaatccatgcgggcctatctatcgatgggttcccaacttgtggctacaccattttacaatgagatacgacctcgagtcgattactttgaataatgcaatggaatttaattgattagctaacgaattgagagtggcgagtgtgcaaaaatttgttaattgtaaaatttgtaacatgcgttttactatttggttttcttgcatctttaactagtataattaggtataaaaaaatgttactgcaatatcaccgcacggcattgcttcatatgtatgttttgatgtataataactattcgattttcagttaactcgcgttataaactgcaaaatgtagcgtattttagaaaacgttcgaggcgttctacgttctgcgtgagaatcgttgattaatttgagttaagtggcgttagaaattggttaagatagacttaagaaacttggcaaacgtcgccttcctctggtgttatcaagttagtcaagatatataaaaatacgttacgtaggttataacattcgattagtacaagtaggtatgtataaatatataaaaagtacacaacgtgtaaataagactaagtcaatagaggagacctccttcgggcaggttgcttagctgccccgcgcatctgtcctttctcatcataagcacttcatatttcgatttgttgcatttcgattggttttgttgtttttttttttttttttttgttttgtttttggcaaaatcacaggagaattagaaatataacatcaat

SEQ ID NO: 29165 - DNA, 435 bp, DROSOPHILA
atgtggaagctggacaccaaaggaggaatcatctgctcgggctgcctgtccatagcctttgccataacctatctggttttgatggacgattacttctggaaatatggactctacgagatgggaatacacatttcggcgctgcagatcttgggaagcgtggtcctcatcgttggagccataaagcaaaagcacaagttcttcgtgccgtggatgataaccacaggattctttttatacctgatggtgaacctgttcatttcactgatagtccagggcacagcttggatcttcggaccattgatggtcgttccgttcacagcctatctgggctgcgccctgtactcggtgcagaaggccttcgacaggatgcgcaaggaggagccaccggcatatgccagcttgtccgacaagaaggagttcatcaatcacatatag

SEQ ID NO: 29166 - protein, 144 aa, DROSOPHILA
MWKLDTKGGIICSGCLSIAFAITYLVLMDDYFWKYGLYEMGIHISALQILGSVVLIVGAIKQKHKFFVPWMITTGFFLYLMVNLFISLIVQGTAWIFGPLMVVPFTAYLGCALYSVQKAFDRMRKEEPPAYASLSDKKEFINHI

SEQ ID NO: 29167 - DNA, 2453 bp, DROSOPHILA
gattcaaattcaaagcgcattccgccggccgggtcgagtttttttgttttgctttttattgctttttattacttctagaaaatcgcagtttttaacacttcctgagtcagccggccacattttcacgacaacttgattaggcgccgcatgagccattgcggttggatatttataaaggctgatccgtatttttagacagcgtcccatttgcgtgtctatgctgatttatggtaaaataataaaatcgctcggtttccttacaacgacactagaggtctggatttagacttagcgtgtgaccacacaaaaattaccacccggcgaccacagcgcctggtacacatattactcatacgctccgtgcgccgcaaacctttccagccgcgagcagagtgccaaaagcgcctaattactttcgttcgatcgcacgtcgacgtcagagcgtcgcccagcgtcgaaatctggattaataattttaattgatctaaatcaaaacaaaatagtcgcagacaatggcagaattccgggggagcgtatctttccgcattgtaaaaaattttccgaaccaaactggatctccgctaagcgaaacagtgcacccggcaattagagcctttgtcttcgccaaatcccatggagccgagatcgggttcaagtcacagacaccgcgcatgctcaaaacaaagccccggctgtcaaccgaagagagttcggacacatatgtacgcttcagcttacgcctaaaatgtcgctgcgtttcctccggtcttgcgtcacagccggagcatcggctcggcccgaaagcaaattttcacatttgggtgcgaatgtggtggccggtgcgtatataaggcaagggttcttcacaccagagcatacagaactcgccagacgttcagagaaatcgaagcagccagcaagaaatcaaaggataacccacagcagcccaaccaggatttaccaaatcacagccagtttaaagcgatctaagcccagcacaatggatcttaaggtaagcatcattgtagcaaagtttcactgagaatccagctcacccatccctcctcctcagcaattgtactcgtggatctgcctgctgatcagcatcatcatctgcaaagtgtccgaggccaagcccacctactacgacttggatagctacgaaaactacgacacagatcgctatgacagctacggcgggtcctcgtacgccctgacctacgggaaaccgttaacggacaaccgccttaagaagctgagtccgggctactactacgtggacgatgggtacatcgccccggtggcctccagcgccggctacacccgccgcgagggcgtctccgcctccgacagtggctccttgccccacaatgtcaagtttactcccatcgtgcgcgtccggcagaccaagaccaagcgcaagaagctcttcgtgcccaacttctttggctagaggggcttcccctgctctcctcctgccgggactgagactacagactgaggatgatagcataggcttagcattagcattagtcgcgtggctcccacaccaaaaagtaccttatacctatacgttatctattttatacgcggtcacatgtctgaccacattatatttatatacgcaaagctactaaataaaaatatccaaaatattgaaaacatatatcaactttaaaaacgaatgagagtcctgatttcaaaattcattttattaaaagcaaacataccgactttataacgaagtataaagttttattataaagttttttatggaatttcacaataacctcgataaatccaaaatatatttaaaattttagcatcttgtaaacgctttcgctggtaacgcccccacttttgaatgaaaagcgccgtaaagaattttatgaaccgtaaagtgtgtagatatttagtttggcgatttggtgctaattgaccacttaggtgatttaatgaactcagaatagcattgttgctacttatatgacgtacaataaacttttcccgatgatgtgatcgttcaaaataaaatattcgtaaagcaaaaacatatttgctctccttgggaatcctaatacatactcgaaagtccatgaattcatattccttttttatttagcacatataaaataaagcctaaagcctaaaacacttcttcatcaattataaaattaatctagacaaaaagtatatattttgctgtacctaagtgctgtactaaacaaacccgtaagaatgtggttatattgttttcaataagaagtttgcaacgcagtcaagaagacatttgtgactatgtgaaggacatatattcttgatagccatgtccttcagtcattactttcgtttctacacaagaactgttcgtagaagtgtttccattgcaggtacaatttaatttgaattaaagagcaaaaatacatatgtgaatctcttcgttgattatgata

SEQ ID NO: 29168 - DNA, 393 bp, DROSOPHILA
atggatcttaagcaattgtactcgtggatctgcctgctgatcagcatcatcatctgcaaagtgtccgaggccaagcccacctactacgacttggatagctacgaaaactacgacacagatcgctatgacagctacggcgggtcctcgtacgccctgacctacgggaaaccgttaacggacaaccgccttaagaagctgagtccgggctactactacgtggacgatgggtacatcgccccggtggcctccagcgccggctacacccgccgcgagggcgtctccgcctccgacagtggctccttgccccacaatgtcaagtttactcccatcgtgcgcgtccggcagaccaagaccaagcgcaagaagctcttcgtgcccaacttctttggctag

SEQ ID NO: 29169 - protein, 130 aa, DROSOPHILA
MDLKQLYSWICLLISIIICKVSEAKPTYYDLDSYENYDTDRYDSYGGSSYALTYGKPLTDNRLKKLSPGYYYVDDGYIAPVASSAGYTRREGVSASDSGSLPHNVKFTPIVRVRQTKTKRKKLFVPNFFG

SEQ ID NO: 29170 - DNA, 2300 bp, DROSOPHILA
cagctggagctggagtcgagtcgagtcgcctttggagctaaatgccaggatggatcgatcgatggatggcgggctgcagcctgcaggccatggaaacacctttcgctgcggttgtcttgtccctgctcacccagttgcataatttacggcatctctttattgatctggacgcttatgcgagtatgtaggttatgcattgccttatattatgactatcggcagacaggtttccgctgcgcggaagggaagcgtgtgaaattggctggaaaacgtgttaggccgagctgcaaggaaggaagatgaaattgagagaaaggtctgatgggactcgcttaaaatgttttgacagttccctcgactaatcccataatggccagattttatggttgctgtggaggagacgatggcccataaatctgtacattcaattataaacaggaagggaaacaaatcagttgcctcacctgagtgtagatgcaggtcaaagttgtattgttacaactatcgatttgttttcgaagcaacataaaagtacaataaatagctaaagaaaacaataccaagttccaagctataagagagtacttagacttagaaatactatgcttagcacctacttttcgagatgtttttattttttttatgacacaaatattagatttatttcgtaagagacaaaatccgacttaaagcaagtcatgtaagactcgtaacccagtccatagaccaattttgagttgcagttatacccttaatcatagcctcatgacgattcacaaattctttgtttcacttttaatgcatttcttgttagtcgaatgcatttcccatcagcgggcagcgtatgcttaattttattgcgcatacgcctcattgggcgcgacgctgttgcattgcgacagctagaaatagcaggcacttatccgccgaacaataagccataacaaaacactcacgttcacacatggctaaccttcaatcaggctctcgtggatcaggcctaatccgaacgaggcggacgacgggaggctggggaggaggtctctccacggcggtctgcaacgtcaccgtcatcattccagcggtaattgcctgtggctttctttactgccgctcgacacttggcgcttggcgcttggcgcttggcgcttggcgcttggcgcttggcacttgacacttgggttgctccaatttgttgcgtggagctggaccgcaccggacccgaaactgaagctgcaggtggtgcgcgagtgtcgacgttaatgtcattgttgccacggtgcagctgacccacttgcatggcaaatgaagcggcactaattgctggcaggtaaattgaattcattgcagttgcatcacgcattcgagtcggtgggtgcgtttagtcggcttaaacggaaccccaaattgattggcccggtaatcggagttgaaagtgcgtgcacacttagccccagtggccacattggataaagcagcaggtggccaagagtcgaggagctggccgagattcgagatccgttcggcagatgagcggcacctcgttcacttgcttacgccaaggtcatccggccgcaagttaacaacatgttggacaccgccaacgggtattaacgcttattaatggccacagccagtgcgcctttgttgctgctgctctgttgcaatggccattaagccagaagatgctgacttgcagacttgcagacggaacattgattatggccaatccccagtcgtcctttgctacagatactcgtattgtacatatgtgcaatttggtggccgagtgtggccgaaaccggctcagtggctgttacgcaacttctggccaaaaagcgaagctaagccaggccagccagccgttttattcacacagtcagaggtctcgcattccaatttgcgtagactcgtcgcaaaagttggactcggagtcggagatgctgcccactcctgctccaaacttcgcttactgctggccattgcctgctccaagttggcagtcaggtaggcagctgcacccgctgccgttgatttcctcattgctacacggcacaaaaaatatttgcatgtcgcctgacccctgacttggttattaagtgtgtgggcgaacaggaaatgatggtaaatggtgccagggtcaggagacttcagggggttacatcgttaacttccccttcaatgcgtaattgcccgaatcattttatcaatgtgttttcacaaaaaaagttaagatcatttagttcctttaagtagaatttgtttcagttattataaaacctttacaatattgcaggtac

SEQ ID NO: 29171 - DNA, 300 bp, DROSOPHILA
atgcaagtgggtcagctgcaccgtggcaacaatgacattaacgtcgacactcgcgcaccacctgcagcttcagtttcgggtccggtgcggtccagctccacgcaacaaattggagcaacccaagtgtcaagtgccaagcgccaagcgccaagcgccaagcgccaagcgccaagcgccaagtgtcgagcggcagtaaagaaagccacaggcaattaccgctggaatgatgacggtgacgttgcagaccgccgtggagagacctcctccccagcctcccgtcgtccgcctcgttcggattag

SEQ ID NO: 29172 - protein, 99 aa, DROSOPHILA
MQVGQLHRGNNDINVDTRAPPAASVSGPVRSSSTQQIGATQVSSAKRQAPSAKRQAPSAKCRAAVKKATGNYRWNDDGDVADRRGETSSPASRRPPRSD

SEQ ID NO: 29173 - DNA, 2350 bp, DROSOPHILA
gtttctctcgctctcccgctctttgggggctctctcttgccaaataccggttatctcagaaatagtgggcacagatggggccaatatctttctgcaattgtagtggccgctgcgcgctccctcccaaaacttcgcgactgcgacagctcgtcgtccctttgttagaacgctcgggttgcccccgacaagtttctttgtttctgcgccttgtgagcggaatgctaaagagcccatttcgggagggaagaattgcagcaggtgcatggtccacggtgcatggtggattgtgcacggtgcatgcgcctttaaccaaatgccacaagtgatgccccctccacgccgaggacagtggaaactagtttcaccgcccaaaactgacagttcatttagctaatcccagatcctggcatccgggagtaatcgtgcgatcatatgtacatgttgtatagatcatgtttccatcctatgaatctaatagctaagaataaattagaatgtatccccaatatttgaaatgcaactttattcataaatatcgtgtatggatatgttttgagtgtaaggcccgtttaacccattgtaagcaaaaagccgagggatataaggtgaggggctgcagtgcatccagttgtagttaattatattcggtattttctccggctcttgctggttaattttggggtcgcacgttctgtttgtcgttttcgagttaaatattgcaattgtcttcgacgatttcggttaaatgtgtaccttactgcagtgtttatttttggcttaagccccgacagaccaccaagctacagtttatattatgagatatctccctgcacttaacaggttttctgtgacttgcatattttattcccgagtactcgtacacctataattggatttttaccccgaataatgaattcgattcgcctgtgaataggagagatgtatccaaagcgtgtactcattcccactcccatagcttttcgaatcggtcgctagtgaaatgaagaagcatttggaagtgttcttggtcgtggcattagctgctctagcggaattgccaggagttacagcctcgtccgtggaaatactgtcccattgtgtcgcctgtccggacgaatttaggggcatgttggtctgcgcctttatcaacggttgctacttggaaatagaatactgctccatggtggtcttcaactgtggacgccaacagcaccacaaacactgtgaggatcatagccgtatgctgataaagataccctctaacttgagattctttcagtgttcctagtggtaaacgagggcaagtgcaagccagttcggggctacaaatgcgagaccatggatttttaagttctggcggaggttctccgcatttatttattgatgtaatgattacaatttaaagtgcttaatctgagggaaatgtgtgacgattaaaacttgacaatgtgtccggtgaaatagacagcgtgcttgtcgcgaatgatgaacgcaaatggatgatcggccacgaaagtcttggggtccaggggcagggacatgggaactccggcagcatctagaagaaccgaaatactggtggtgtctactggaagtgacggaaaaccatataacttacaactagctccagccgcctcacatccgatctcgttcacatcgatgaaggtcttgtgctgcacctttgtgatccgagtgccgatgggcgagtcctggaaaatgttgctgaagtcggctgcatctgagaacatggcactgattcccatctgaaaagagaagtttcgaaagaaattcccctccattagataccactaattcacggtctgagaactactcccatttaaatggtttcaaatccgacagacccacgaattgtttttaaccctatctccctaccgcttagatcttatctccccctggaatatcattatgttgcccctcctcaccttatgcaatgtgggtcttaggtccgtgtcgaactcgaacttgaacttgggcaggtaaacggacacactctgccactgccagcggtcttcgagcagattgaagtcgacgcccttgagcttctgctccagagcctgtagtccggaacgctggttgggcaggatgaaccacatggtcaggttgatgttttcgaagaacagctcaatggccttggcgtcgagttccgggtagtcggcgtagtagtaccagttgtctgcgaacatggttggcacctggatggaccggctctcgctcagccagaactcgcgatcccgggtatcctcgtcgttgaagggtcgtgcccagcgagccttgaagtagatggcgttgaccagcgccacattggtgtccggctccaggctttccacca

SEQ ID NO: 29174 - DNA, 294 bp, DROSOPHILA
atgaagaagcatttggaagtgttcttggtcgtggcattagctgctctagcggaattgccaggagttacagcctcgtccgtggaaatactgtcccattgtgtcgcctgtccggacgaatttaggggcatgttggtctgcgcctttatcaacggttgctacttggaaatagaatactgctccatggtggtcttcaactgtggacgccaacagcaccacaaacacttgttcctagtggtaaacgagggcaagtgcaagccagttcggggctacaaatgcgagaccatggatttttaa

SEQ ID NO: 29175 - protein, 97 aa, DROSOPHILA
MKKHLEVFLVVALAALAELPGVTASSVEILSHCVACPDEFRGMLVCAFINGCYLEIEYCSMVVFNCGRQQHHKHLFLVVNEGKCKPVRGYKCETMDF

SEQ ID NO: 29176 - DNA, 2240 bp, DROSOPHILA
aaaaatactgtataaaaaatacatttgattcgacttgcatgcgttcagtaagctaatactcccttggcaaagaaaaaactagggtattaaaagtcttaaaactaatttatatgcattcggttagtttctgctcgacatgcaaatgttgctcgccgcatttgatgacgcccataaaaatcaaaattttattgaatgaattgcagtggttaggacgcgaaaattatttgtcaagctccgaggccaaatccattgagattttcataggccgcgcacgggacttgttcgctcaggcggttggaaccgccccgcccgatccaaaacgctccaatcgtgcgggttcgcatcgcatgtgtggccataaaagtgcgttacaaataactgcacttttattgaatagtgccgtggcgacaagtgctgccgccgccttggaccgctagagcggttcgctggtgcaatcgagtcttaagattgatgccactgcaaaaaagtctactaagttccacataaaaattgctagtttcaaatttcaaattcttgggtctctcgataaattctcgattatcgtaaaaatgcgtttttataatgcaatataaaataagagttatggcactgaaacaatttgaatcaatatcatcagaaataaataaatttattttgcatcgggatagtagatatttaactagcttcttgggtagtttattatgattcaaggccaaattcatcacatgtttcgctcagtgcagactcaaactcgaacccagacttgaaaagagttgagtcgagttaattgctgtgcaatttgtgagcagcaaatggaatgcgctgtcaaatcaaacccgaagcacttaattaaaacttattgaaggcaatcgccaaatgtagcgttgccaattgcactcttaattgcataagcatgttgctggtgtcgcgatgttgctgccgcagtgttgcatgcagcatacagcacgcagcatgtcgctgcttggactcattcgcttgtttacctgacttcggcggatttgatgatggccttggggggcgcatcccaatagttgggggcgggcggcacccactggcgcagcacttggtagttgccctccagcagcgccatgccctcgatgacctcctcgtcggagtcgccgtcgttgttgggtccatcgttggtgttgctgttgccattgttgttgttgctgactcgaccgtcgcagtcggcatgcaaattatcggtcgaatcgttcattgtttcggccggaaaggcagaagaaaatcactagactaagattttggcgccgctttcactggcacttctccgcgatgagagccctggattttgcgggtaaacaaagatgcgcattgccatttgcgctgactcacagacacagatacgtacacacacactgccaggctctcaaacacacgggcacaaacacaaagaactattccccccaaaaaaagaggaagaagcagcggcaaacaataacaaaggcgaccggcgaagagattgaggaaaacttgagtggtattctatctcgctggcacagtttctgcgaattagcgataactcctcgacaccgattcgaattaatgaataattatagctaattgttgcaatcgcggcgacttatcagcagcgggataagtcggaatacacgaggaatcggcggatccgtccgctcgcgttgcactcacggatggttcttgcttctaatcggcgaaaacgttcgttgcgtttgttttggcacgacgggattgacaagcacggcgaaaacccaaacacatcgcacaaaggctcaccaatactgcgccaccggcacacacacctctgccgcacactcacacacacacgcacatccaccggagggttaatatctggcactcgcttttgcatcccttgtcgatggcagagaactcgccctgtgtgcaccccgcgtccttgagccctgcgatttctccgcttcagtttcagtttcagtttcggttgtttcgccttcgaatcgcccgcctttcctcctctttttagtgtgtgagcaaaataagggtttgcaatgtaatgtttttatgtctgatttcgttttcctagattgtggtggtgcacgtggtgtgggaagggggtggtgcacgttcaatactcgcatattgttaaaattatgtagcgaggtgtgcgaaaggggggttaaggcgatgtgaggcctgaaaaaatgctccagagagtgggcttaaagttcgaaaaacgttttcga

SEQ ID NO: 29177 - DNA, 240 bp, DROSOPHILA
atgaacgattcgaccgataatttgcatgccgactgcgacggtcgagtcagcaacaacaacaatggcaacagcaacaccaacgatggacccaacaacgacggcgactccgacgaggaggtcatcgagggcatggcgctgctggagggcaactaccaagtgctgcgccagtgggtgccgcccgcccccaactattgggatgcgccccccaaggccatcatcaaatccgccgaagtcaggtaa

SEQ ID NO: 29178 - protein, 79 aa, DROSOPHILA
MNDSTDNLHADCDGRVSNNNNGNSNTNDGPNNDGDSDEEVIEGMALLEGNYQVLRQWVPPAPNYWDAPPKAIIKSAEVR

SEQ ID NO: 29179 - DNA, 2735 bp, DROSOPHILA
aatcccgtggaaaggggaggactgggtatggatagcaagaaaaatcaaaattcgtgttggcatgcaagttcgatggctgccatcctgcgacgggcgaacgaaattaaatttatctgtatcagttccaccgccacaaggatcgggggacggagcacggagaacggggtcctggaacagctgcagcaggagatgaacacatgttcggacaaattcatctggcatgtcacaatgcgcaacggtatgcagaaacatcccagagggtaggacattgttatggaaaagcccaaacaagctctggcatcctagtttctggcccgggtgcagattgcacgtgacaggactcgacgaaaagtgaaacttggcaaacattttgttgaaacacttttggggccgggcggggaaacatcatcccccggctcagtggctccaaaatccccctcgttggagcggtaagtgtcattaatcaaatgccgcccaataatttccaaccctttgtgcggtgcagtttctgaaatatgaactttttgctgtgatgaatgccggcagtcattaataaattaggggttaaaatgccataacaacgccgagggacgcgggatgcgggatgccggatgggggatgcgggacacacagcattttggcagccgctgaaaagttgtttatttaattgaaagcgaaacgagggggctaacagattcgcttaactcaattaaattgggagccagggagcaggcagtgaaatcagttaaactttgatttaacgatccaaacactcgctgtcaagcccatatcatattaaacgaaactaaaattaatttgggagaaagtttactttatgacatagaaagccacagaaacccaaaaccaaaagtcaaaattcactttattgtcatatagacacggttcactttccttcaattgtatttctcacgaaacacataaattctagaagtccatcgcgttcaaatccccatttgtatcaagtcgcgaggtgaacgccatgtcagcatggaagatagccccgtgtcgagcaccgggtatccccaaattggatgagcaggaggagagcgacctggtgtccagcggcatagatcccagcgacgcagaggaggaaaccgatctggatgccgcctacgatgagctggaggagatgaagcagcgtctgatcacactgcgtaataagataataatcacaaatccagatgcgtgccaggatctaaaaattcgggatctctggaccccagagggcggggaactgcaggagttgcgtgaccagaagtgccaacttatttgccaacttcaagaggcaacccagcacctgaaggactcccaaaatgagctcaaggaactggagacttggcgatgccacctccaattacgcatccatcaggcaaagcggcagcttagtcagttcgagaacttcaaactgaaggttatccaccaattcgggctgtgcatcgagcgttgggagaaccagaagacatgcaaactggactgcaccacgtaccgcaaggaaatggcggcccacatccttcacgcggacaactcccgaaagagcgtggtgtaccaaaaatgccacaagtcctacagacgccgcatccgcgtcgagcttatgctggtccgcgttttcctgcacaatctcttcgaggcgatggtcaacgactttaggttctttagccgccacatgagcattaagtgggtaaccttcacctctcccaccagtataaagctatagtcctcacttcgtttcagcttctccgttggatccacagaccacacagttccggaaactccaatcaacactgtttcttcttccgaccaggagagccgcaaataaatgttccaacaattaatgctttaatttacattttattttcgcgggccctctgcttgtaatggcctgggaaatgtcgcccaattaaggttattgaggttccgcggacctaatggcccttttgtggccaataataattacaaaatttcaactcgaacggaaccgtcgcggccatcattaaagcctagctatcacggactttccggttgcctaatccgactttcgacgtcagccaaatgtgctggcattcccaccaggataagatggctaaatacgaaacggcatcagataaaaacaaaagcagatttgtctttccccatcctcgcttcgaatcgaggcaatccgcaccacacactgaaaccgaacggagctaagctgactgcctcgggctgaaggccagcagccaaggctgaaatccttatcctgcttcaactcctgctccaactcctgctccatttcctattccagctcccatatccttttcggaggttttcgaaatgcgtaaaaactcaattgctgcgcatttgacgaggaggttggcgaagggggcctggaatccgggatcgacatgggtcccgggttgagtgagatgctagataacgccgaaatggaatggcggggaatggtctccgctggcgaaaacgaatttattggagtcatgtgctaatgccaatgccaaattgcaaggttacaagcgtttagaggccggctgctttaccaacttcccaactttaccacgaacgttacatactctaacaattatgaaatactgaaaagtacttaagaaatataatgaaatatgatgttgttgtttgattttgatcataaatctagatgcacgtaatttaatataatgttactccctccatttcctctctaaaatcagattttattgaaatcg

SEQ ID NO: 29180 - DNA, 735 bp, DROSOPHILA
atgtcagcatggaagatagccccgtgtcgagcaccgggtatccccaaattggatgagcaggaggagagcgacctggtgtccagcggcatagatcccagcgacgcagaggaggaaaccgatctggatgccgcctacgatgagctggaggagatgaagcagcgtctgatcacactgcgtaataagataataatcacaaatccagatgcgtgccaggatctaaaaattcgggatctctggaccccagagggcggggaactgcaggagttgcgtgaccagaagtgccaacttatttgccaacttcaagaggcaacccagcacctgaaggactcccaaaatgagctcaaggaactggagacttggcgatgccacctccaattacgcatccatcaggcaaagcggcagcttagtcagttcgagaacttcaaactgaaggttatccaccaattcgggctgtgcatcgagcgttgggagaaccagaagacatgcaaactggactgcaccacgtaccgcaaggaaatggcggcccacatccttcacgcggacaactcccgaaagagcgtggtgtaccaaaaatgccacaagtcctacagacgccgcatccgcgtcgagcttatgctggtccgcgttttcctgcacaatctcttcgaggcgatggtcaacgactttaggttctttagccgccacatgagcattaagtgggtaaccttcacctctcccaccagtataaagctatag

SEQ ID NO: 29181 - protein, 244 aa, DROSOPHILA
MSAWKIAPCRAPGIPKLDEQEESDLVSSGIDPSDAEEETDLDAAYDELEEMKQRLITLRNKIIITNPDACQDLKIRDLWTPEGGELQELRDQKCQLICQLQEATQHLKDSQNELKELETWRCHLQLRIHQAKRQLSQFENFKLKVIHQFGLCIERWENQKTCKLDCTTYRKEMAAHILHADNSRKSVVYQKCHKSYRRRIRVELMLVRVFLHNLFEAMVNDFRFFSRHMSIKWVTFTSPTSIKL

SEQ ID NO: 29182 - DNA, 3122 bp, DROSOPHILA
acccatggcgtaaatagcaattcgactacgcgtgctcgttttttcagtagttactaatttttatttcgatggttactcctagacggctattgctgtactaaataggtgggcaaatacgagtctcgattgggttttgtttgggttcgccatcaagtgtgagaatgcactggcaaaagtgaatgtgtagcttgaaattgttcgcttaattcaaataattcatacaacacttatataaaaaaaaaacattaatttaggagtatagatttatagacggcaactataagtgtataccatcacattaaatggctgcaatactttattgctgattttttcaggtgcaacacatgacattgctcccaactgattaacgcccagattaagttcgctttcctctcttcggaaaacctcgctgaccatgaaaccaaccagaccaagtgccccaaatctgataagtaactatgctctctcccagaaagctatctttattgcacttcaggcgattgctgtttagggtggacactctgcaatgcctgataacactactattaattaatcgcttcgaatatgaataagctaagtaataccttgagaacgtacatttaatacccattgatcgcccccatttatttttcttacgtcgcatgctaaatatgtccacctgaatcacaccctgcccatagatattccctcgctgttttggtaggtgaaccaatatcgagcgaatttccatgctcaagtgctcatcaaatacaacaattaggcagggagcgaccctagtcacaacgctcgccagtggatgggaacccagctctttgcggagagccttatcagcccacaggccgggtgcttttgataactctaagcctcattggactgcgccgtttggcgtttgctgtttggtttttggtttttggtgttgggcgctgcctttcagttgatttccgatagcgagtgcgagtgtgggccaaaccgacatcaagacacctgaaaatccaccaaaatgagctgcggcacgaaggcattgaaggtgtcctccttcgttttggactttctgtgctgtgtgagttgttatcaccaaatcgccaactgatagtatattgttatatgcctcctctctctatcactcataggttctggcggcactgaccatcgcggcttgctcctatgccctgattgcttttagccacagcgtagccatccgggtgcccagcatcctgggcatcgtcctgggcggcctgctgttcttcagcacgatcttcggctgcattgctgccctgcgggagagtattcgcatgacctggatcgtgagtagcgctctatctagtacctagtggccaggtgacctccaatattaactcgaccgtcttgcttcgcccaaaagtatgccgcaatactgctggccctggttttcagtcagatcaccgtcatcttggcccaacccatcaactatgagctgctggccaacgagaccatttacgacgcctggcagggacaactttaccactcggacagaatgtcctactttgagatcaaggtgagctatgtagggatccttggaaccttctccatatatagcagacatgagttccattttcactttctcggaaaaggcattaggaaaatggtatcagttggctttttttttgaaattttatcgaaatcatttcgcaagcttgttatctttgtttaaccaagtactaaacggcttttcttttagtatcactgctgcggacagacggggcccgcaaactatccggatagtggcctggtgattccgcaaagctgctacttcaaccagaacgccacggtgactacggatctctatacggttgggtgtaaccatcagttggcagcggccttcgtcaagggaactcgctgggagaagatcacggattggtccgttgtgggtgtggaggtaactgaatccgatcacttgcgatccttcaactcatattccaaatgctcctcagatactcactgtcatcatcgccggactcctggctataaccttacagaatgccgagcgccgccgtctttaccgataaaagctggccttaagtttctaccaaaagtattagaactgtacgaatgtgaaagtgttcctaattatatgagggagtagttgccaaaacatgaatacattaaattggtaacgttaatatatttcaaccgtatttaaattgctcaatacaaaatttcagaatgtatgcaagcacttttataaaattagtcacacttaaaccgattcgtggtacatttggaatgttgtgtcgctttcgacgtctgggtctaagctgtttttatgtgcaatactatgtataagaaaagtatgattatatatttaacaagtctatgaagcttattaagaaaataaacaatttaatgcttagtatatttcaagttgcagttaggttaaatttgcttaacagacttaaatttgcataagatttaaaatcgatatcaatgcgcgccgatacatttctttttcaccacagctatcgagccagtgaaaacagctgcttgctcacaagtgctgctacggtgctgctaaaatattttaaaattaaacacacgactcacatctcatttcatttgtacacaaagaaaaatatcgcagaacaagtctatgttaagcgtttaaataatgtgcatataattaaaacatgttttacctaccataccgaagcaccttattgaggcgaacaaactcttgatccatctggaaaatagccagacttacagcgcttctggtttcgaactactggttccgtgaactgttgtcaaaagtaatgaaatgctggagaaagcagtagaatgataagtttaggccgtatttgcacaattactgagtaactagtgacagccgaacaagcgccatgtattcataagcacctgccgcgcacctgccaattcgaatttaaagcggccccggagcagaagcgacgcatttcttcgccgagcgtccgcagagtcgtcggatcggatcggatcggtttggattggattggtgactaaaacagttggacaacaacagcggcttgattagttggcagtaaacagagctaccgaacgcaccggtcattcactccgcaccgttttgaccagaagcagttccagtattg

SEQ ID NO: 29183 - DNA, 792 bp, DROSOPHILA
atgagctgcggcacgaaggcattgaaggtgtcctccttcgttttggactttctgtgctgtgttctggcggcactgaccatcgcggcttgctcctatgccctgattgcttttagccacagcgtagccatccgggtgcccagcatcctgggcatcgtcctgggcggcctgctgttcttcagcacgatcttcggctgcattgctgccctgcgggagagtattcgcatgacctggatctatgccgcaatactgctggccctggttttcagtcagatcaccgtcatcttggcccaacccatcaactatgagctgctggccaacgagaccatttacgacgcctggcagggacaactttaccactcggacagaatgtcctactttgagatcaagtatcactgctgcggacagacggggcccgcaaactatccggatagtggcctggtgattccgcaaagctgctacttcaaccagaacgccacggtgactacggatctctatacggttgggtgtaaccatcagttggcagcggccttcgtcaagggaactcgctgggagaagatcacggattggtccgttgtgggtgtggaggtaactgaatccgatcacttgcgatccttcaactcatattccaaatgctcctcagatactcactgtcatcatcgccggactcctggctataaccttacagaatgccgagcgccgccgtctttaccgataaaagctggccttaagtttctaccaaaagtattagaactgtacgaatgtgaaagtgttcctaattatatgagggagtag

SEQ ID NO: 29184 - protein, 263 aa, DROSOPHILA
MSCGTKALKVSSFVLDFLCCVLAALTIAACSYALIAFSHSVAIRVPSILGIVLGGLLFFSTIFGCIAALRESIRMTWIYAAILLALVFSQITVILAQPINYELLANETIYDAWQGQLYHSDRMSYFEIKYHCCGQTGPANYPDSGLVIPQSCYFNQNATVTTDLYTVGCNHQLAAAFVKGTRWEKITDWSVVGVEVTESDHLRSFNSYSKCSSDTHCHHRRTPGYNLTECRAPPSLPIKAGLKFLPKVLELYECESVPNYMRE

SEQ ID NO: 29185 - DNA, 11470 bp, DROSOPHILA
agtaccgggagaaacacaatatcaccaggcccgacatgatccagcttctgatggaggccaagaaggagtcgaaggacaactggacggacgatgagatcgtggctcagtgcttcattttcttcttcgccgccttcgaaaacaactccaatctgatctgtaccaccgcctacgaactgcttcgcaatctcgacatccaggagcgcttatatgaagaggttaaggaaacccaagaggcactaaagggtgcacccctcacttacgacgccgcgcaggagatgacctacatggacatggtcatctccgagtcccttcgaaagtggaccctttcggcagcagcagaccggctctgcgccaaggattacacgctcacagatgatgaaggcaccaagcttttcgagtttaaggcaggggataatataaacattcccatctgtgggttgcactgggatgagcgcttctttccgcaaccccagaggtttgacccagagcgatttagcgaaaggcgtaaaaaagatttgataccctacacatatttgccatttggagtcggaccccgcagctgcattggtaagttaattcctataaataaaacaaggaatacgtctaattctgcctattattatattattatttagtatttgctaatgcatgttatttgtacaggaaatcgctatgctgtgatgcaggccaagggtatgctctacaatctaatgctaaattacaagattgaggcgtcaccgagaaccaccagggatatgtgggaatcagcacgagggttcaatataattcctacgaccggattctggatgcagttggtgtcgcgtaaataggatgatgtaaaatcgaattccgctcatattgtacgataaagttggagagaacgatacaagggagttccgcgacagtcagataccctttacttagctagtggcattcaaagtcgttttgaataggaattgacaggaattggaggattccggttaataaaaagacggattagttgataagaataaaatacacagacatatattttacttttgattatgtttccatacacacttgttgatatagcatagcttagaaataagatttcgtttaactctcactggttggttacaaacgtattctggacacatgcttttatataacaatttccctttcacgccgcggagaaagcacgcaaattacataaaacatttgactctcaaacaaaagaatcttcaattcgaattgattaacaaaatattcgaagacaagaagccgcaaatgtggcaaatgctaatggttttacatctctgcgtttcgctttgctggtggaagagttaatttcgcgttctgcgttgccattttaaattattgcacatttggctaagatctgaaacaaataatactttcactctttcggagattcttttgttggccttcgataggatttcgttggagtttattgttcgttgattgcgttgtttgttgtttgtggtctctacttttcgtttgttttgttcgcctaatctagctctagaataacttatacctatggtaatgcccccgactgggcatgtgtatatgaatatgcaaatatgatatagtctcagctttgtacaacgatttctctcatctctgatctcatatgtgccttcttattaagtgtattatacatgacgatatgttatttacagccacggttgccattaaaaagatatatttttaaaaaacacggcttaccccatctgtatatatgtacatttttaaaaagtgttctgaagaactaatcttttgtagttaatggaacaacctttgttggcaaccgtgctaaaaacacctttcttaaacctcattccacagctacacgctgtatagccttccgttgctgctgtgctgggagttggagtggcggggcttgccgagcccaaagaagttccacaccctcctcaggcagccaggcttcttctccggcagcatcagactctgctcctccaggatcgtgtccaggatgtagtagctgctcaggttgaagggcgggggtggcagcacggggggtggtcaggaaatcgtgcagttcttgctctcgtgcatgatcgccggtgccccgcccacggatgcattgcctgccccgggggccagggacgagtcctgggccatcttcttcttgcgctcataggccaacgcatcgttgggcacataggccactctcactccgccgtagtgtttccgcgcaggcaggcggtatacgtagtcgtccatgtcgctcgaggagctggatgagcaggtggagcagatgctggccacgtcgcagttgtccagattgtttagcagattgaggggagtcgttcccacctgcgtttgtgcgttgtgcaggcggaggttcgtttggttgatctgcatctccgaggagctgcgcgactggttgcgacgcctcctccgccgccgggcattggagttatccgtgtagctctttgagcgcgacatagtgtcctggacgctgtgaaagcgcacctccttcatcggtcggttgtccagctgctcgtcgtcatattgttcggccgggtgctcctggttgcgattgttagcgaagagctgttcgtagccatcgtggggcagctcccgcaccggctcgttgtccagctccagctcgttggccagttcctgggtgctctgcgtcagatcagagttgctgggcgagttcaggttgattttgtcgatgctctggtaactgtgcgagtcgtcagccttggagagcagcatgtccggcatggagttggtcagggtctgggtgtccccgaagatggacttgtcgccggcacaaatgttgtccaggctgatccccaactcggttaggtcgatgggcggtggatgggctgggcgaggcatgcccggtactcctcctccgagcagtaggtccgccactcccgcggcctccatgcgctgcctttcctgccgctcaagcagatcgcctgcactgcccgtagccttcgggtgaccgtggtgggccttccgtcccggatcccgctcccgctctccacctctacgcggcgatttagctatttggctggaggtggaagctcggtgagtcggccttagctggggacccgaactcgtgtctgacggcgtgggcggctcacctttgctacaggcgatcgagcagtagatggtgccccttctgggcaggaagggccttcccagcagcgaacagcggcaggtgcagcagctgaagcactggtccgtcgcatgccagtgctgcccgtcgtggctcatctggccctggtccacgccgattacctccccgcagtagtcgcagtactcggcgaacattgtgtcgaagcaggccagacagtacggtttgccctcccgcatgatgtaccgctgcccgcccagctggtgctcgcactcctggcaggcgaagtgcttcatgtgccacgttctgccctccgcctccgtgcactcgtccgagaagatgatctggaatgggtggagaggaaggagatagtatcttgttagcgaagagcgtaattgttgcgtaattattcgatggacactggatggcctagtgtatatgtaaagtgtatatgtagtgtatgtaaaaagtaaaccgtttttgaattttcctaaagacttcctataattcaagagttaccacattcccttgccgacttcccccagaagttgaaccagaacttacctcatcgcaggcggagcagcgtggcttctgggtttcggcatggtgccgaccgcagtagaggttcccgtcccgctggaagtagatgaggtccaccaggagctccttgcagacgctgcacacaaagcagcccggatgccaacacaactgggcgcccaggcgctgggcgaaaaccacgatgtcaccgccggacaaaggctcctcgcactgaaagtagacagcagggaggcagaaaagcaggagtgagttaggtaaatcgtacgaatgggaggaatatgctcaagttcttcgagcgataaaaatctgcagcgtctggttgctgctggggcagaaatatttaagcgactataaatgctaaataacggtaataaaacgcttaagctcaacgccccacaactgggaaaaccgaccaggaaaagccgccagcaagaaaaagtcctgtaaccgtgtcctgctctacgactcccctcgagttttccaaagcggaaatcatgcaaaaatagctgccggccatgtgtccgtgtcagcccggtgtgctcctccatcttccgcccaccaacccagaagcgcttctctgtggataaggaagcgctttaagtggagctggctgctgggaaatttctgaaaactaaaagctgaaatctaagaaatgtgggtaggaagtgccgcttttaatgactcctggcaagactcgttaaatttaaacacgctcgcataatgaactcgtttcgaccaaaagggttcacaaccacaggccaatgcctggtgacgtttttacgtctctaaattaaggatctaattgagttcgctcagaggtcagactgtcgagcaggataattccaagctaaatgctcggctacgttgaaatggggatactttaaagtacacactatatacgatttgtcgatttgtaacttcagtctaccaagaaaaccttgggcttatgtgtatcctattataatagattggttagatccttgtcggcacggtaatgccctacactacttatacagcgtagttctaatagaattagtctgcttaataaattctacgctcataccctaacatttctagtattgctgtatgaaaggcaacaataatgtaaggaaaacgttaaagtaaagccttatatattattttcacaaagaactcgcattcgtttactctatttcgatggctttccacacctgcctgcagatcttggctgctccggcataaagcaattagcccgcccgccttaatatatgcacaatcacccaagaggcgacacatgcagttcctacgagccaacggcaaacccaagttccctgccaatttgcaccctcatttcagacactgctcgagattgctccactgcgtctccgttttcggttttggcggtttctggctcaggcaaattacgcgacgccaccacagagccaccgcaaaggattcaggatcctgggccccaatgccaatgccattgccgttgctgttgccattcagccatcatcctggaacaggagctgcttaactttccaggctattaaacctcggcgcgggcgatgctcccacttcgtgagatgcgcctcgtcctggacgcaacttgctccaccgcgttgccgcaatcagcatttacttttgcaagccattaagcattgacaggcgaatacccggggcgccgactgcgcggtgttgataatttcccggggcgtaagtggcgccctctatgcgtcgttaattgtttggcaactccaaaaatttatcgcctcgggccacgaaaatcataaaaaccttggagctgcgcagggcgcactttaattaggcagctccagttccattcccattcccttttccctgcctaatgacgcattgagggcggaatagacttgtccttgcactctggcgtggctaaccccagaaactctgcaaaaaactttttccgcaggaagctctttaagtagtttctgcggtgggcacaaagtgctaaagtttccatggttggatcccaaatcctatcccccgaatccgaccaacccgcctccgctattgattagtttgtctgtgaaatctgtgcacttaaaatgacatttttcattggactgccagcccggctaaatgtcatgtaaataacagcaatcgctgctcatttatcttatcaatccaattaatcccagttggctgttggctgccgcttgtttgcaggcactctgcgccagacaattatgctattgacaaattgttgccggcggagccatcgcagcacctagctgaactcggatgacccggggggccagcagtgtccttgctaacccatttcgtgtccggactaatcccactcggagcgacaaacttcgctggcagacagtcgggcaaggcagccagtatcctgccccgatcccgctccattcccaaccccaatctcccccaagaagcaactcaaattattaatgacgctcgttatcatgcccttttcagtacataaacttttcgcttaacagccactgcgccttaccttcgtttgctggttttttcttattgttctgctcctgctacctagctgcactgaacaaaaatccataatccacttttacacaaaccaagagcaaaccagagggaaaataaatgaaagagcacccatcatttacagtaaagaaaaaattaatttcatttaattgattaaagtttgaagcaagtttttctctgtaccctgaaatatataaatatatttcttgctgcaaagtgccgagtccgagatggcgtttcttgtaattatttcattgttgccaggacgacctttagtgtcacatccttgtcaaaacttcagcttccgctcgtttctgttcgtgcggaaaatctgtcaagaagagagcccctcctcccccgccagtcgattccattatttttgggaaaatcattgccagttggatgtgacacacgtttgcggcccacgttgctactcattcacgcctgactgactgcgaaagcatcctccccttggttagtcgggattcaggactctggattcaggatcattgaacgttttcataaattttccctcataattttcccatgctttccacgccattcgattgggtgactccaggatgaggcctttgttcgcattttaacgtccgtttagcaagtcagttatggtctgtgaattttaagcactttttccgactgcggatagcttcgattttcaaatccctttaaagtttatcagattccacatggcaacgaagtggaaagtttgcagaaaacgcccactcagttccattgattttttttttgctttacatgtttattgataacaatgagtttccatttttaaattggaaaaagtaatttaggtggctcatgcagattctatattgttattagtatttataacattcaaagtagcgaaatgcaaccagtttaaatatttcgaagtaaccttatgtatccgtgtatgagttgggcaaactttggggcactttttgccaagttcacactgattattcgggactctaatgaactccgagctctgggaagtgcggtcaaagttgggccacagtcataataaacccgagtcgtctgccaatttggacatgccacatgaaatcagacacacgcacagcactccgggctagtccctatcccggcttggttcccgtttggcgcggcacgtagcagacggattcaaggagcagaccgacggatcgaggctccagaccggccggagaggatccgaccatctcccagacacgcagcatgcggcgcaaagtttttaataagttttacgagtggcgaatgtgagcacaataaaatcgagctgccaactatcagccggaaaagtgcggagctgacgatgaccaagtgcacatcgccaagccagctccaactgggaggcagtggagtggagtggagaaggttctccgactgtcagctcataacaatgcaaatttcccagaccgggccagactgtgaaaggacgcaggaggcactgcgagtgccacctctgccactatttaatgccactgccattgtgctttaatgccatttcattgcgtctttggcaaaccggcagctccattcgctttccgcgtgaggaaaactgtggaaaaggggaaaagctgcactctaccactgcgactctcttagcctttatgttgtcagagccaagtcagtgcaattgtttttgcaacaacgtttttcattttccactcacccttcgccagctgaaagtgtacttaatgaaatctttttgtcatcttttacttcgagacgtttgaaagttggcaacaccggtcgcttagcagcccgcatcccgcatcccgcaccctctgatcccattgtttttccggaccattgtcaattttttcccctgtttgcgaccgggccaagaaggaatctctggcgcaaaacttcgcccggccaggcacaaatgaaatcgaaacgactcttcatcttcataataaaatgcaaatttctgcaacaattatgtgcgcgggaggggtgcagtaaaaaaaggtagggggagaggttataaaaggcagtaaaaattgtttccaaacttacccccttgcagggccgctcgtcggacagcagacggaccgcccctcgtccgagggcctcccgcttcctttgggccgagaagatgcgcagctccttgcgctcctcgtcgctcagcgagtggcagtagcgcacctgcaacagacacgtagacgaaaaaagttagcagggaggaaagtcagcttctgtgttcctgaattttaattaaggcaactcaaaaggcggtggcaagttttttaatctcgccgggccttttgaagggagccctttctttatactactcactcaatgcccgcaccgggctaattataaattttgtcacaacgagttgctttttcaaaaaacactttttaggaataaagtttataagtggttaacttggatttttaatttaattttactattcatcttataagaatattttttcttacaggatataccacagagttaccatcttataagaacattttttcttacagcatataccaaagaaaagtttatattacttaattatttggaatgtctggaagcgatgatgaaattaaaataaatttttttagtaacgaaagtggcaaaagtggtatacggtgacattcttctacaacttaagtttcaaccgtttcaaactaatttttaagtgaccagtgcctgcgcttctctgtccattgtgttcagtttcattctttttagccagaccgaaagcaatgctcttctgctggccattttggccaatactcacttcgttatcttgcggcggcagctggtgcagcaactgcttgacacgatacttttcgccgggactgttgacgtagggcactttgtcgtctggcagttgactgaagtacaaacggacctgggaagtggataatgcaagccggaaagttggattagcttccgattaaactcatacttactgctgctatggaatgtattaaatttggagaaagaaataacgaggcaatcgaacgcgtgtttaaatggactcacgcccacaaaatcgtgcaggtggaaagtgtcgcaatgctcatgggaaaaacgaatcgaggaaacggaaaattgcaggccgacttcggcttttcccaggagcttttatgtaagcctccgccccgaaaaaaatatcgacaggcatttcaagctctaattgccgccgaatgtatcggcaatttaattacaaaacgctttcgctttccaccagatacaaataccgatcgcgatcgggagagataatttttcggatttttcagcgtgaaattaaagcggtgtccaaccgatttccttaagcgcgcaagtggccaacgaccagacttgaactggatttggttttggtctgggaatgcgattgggagagcgtggaaaatcgatggaaagcaaaagctggcagcgggtggcctgcggccccaaaaggcaaccacctcgccccacatagccccacatcgtccgagatttcacttaatttgttgcgacaaatcggaacacatgtatgctcgtcatcataatgctgaagatactgggcttctttcggctcaaatactcaaagaaatactttgtgtactttacttgaatgtatataaaaccgaatatgaatacgaggatggacaataacctgtttgtgagattacagctaaatctgttctttgttcataaacttggtttgccacccatttttcttgcagtgtatcttacctgatcgggccgcagacccggcggcacccaagtgtactcctcgagggcacagccgctgtcgtcgtccgactgcgagttccgctggaagtccagctgctggtgatggctgtggtggaagccatgaccagcgaccgccgccgccgacttgtagctggcggtgcggagcggggaggccaccgagttcagcggcaggtggctgggcggctggcagtggcggcgctgcagcggggacacaaatcgacccgcggattccggagctccgccgcttcccccactgactgcactgcccccgctgccgctggaggcggccgagggcacgtccaggtgggcggtggatgccacctgactgatcgccgattcgggacgttgcgagtgggaggcgaaggtcaggcccgtgccgcccgcctcaatctgcagcagctcgctttcggtttgcgtgtagtagctgctgctgggcggatggggatgctgctgctgctgcggggcctgctgcatgttgccggaagagcggggtgcgggcgtgggcttgaatttttcgattacttggctgggctgggtgctgcaaaagttacaaatcgaaagggaaagcattatgaggtgaccagattacgagacaatcattggatatggtttctagttttctgaggtggttaaatgtaatcaaagagagcgagactgaactacaaagttaatactccatgaatttcgaatagtttatacttggacatggttgggatacacttttatacactttgctactttatctattgacaacttggttttaataaggtgagctctaatccagtatgttataatgtgccgcttggattttgcaactccatttatatctccatccatagaacatcatttatggaataccattctgtctattatgcctctaaatcatttcggactccaactgcccgactcatttgcaattagacggctggactagcggaatacacgtattcgttttgagagcccgcaggtatttcgaatgacttttgagtgcaattacggcgcagctgcatgcgtgcagttgtccaatcagatctgatgaaaccccgagtccgattagcagtcataaggttggttgccactcgcttgaccgctgcccacagtggaatcttctccgcgccgctttctgcggtactttcactcggtttgtggcacgccgcgcgattatgcagccaagcagagacggccgagagattcctggtcatgtttcggccttcctacctcatgtgtttttgtggcaattaaagtcatttgtttggctcagagtgccggcgattgtgagtgttgtgtgaaatattaaacgtttcattcacaaacgccctgcatatcgaattgcacaacattcagagcatgaataacagccatacgcagccattaggccttccacttttttatttactaatcaacgtgagaagaagcccctaacaatttgccattccaacgaaagagacccgctggcatatgcaaatcgaagacatctcatcacaatcggagtttagccttctgctaatgaagctaagcccacagaaagtgaatgccactccggatgtgtggcat

SEQ ID NO: 29186 - DNA, 3481 bp, DROSOPHILA
tttgtaacttttgcagcacccagcccagccaagtaatcgaaaaattcaagcccacgcccgcaccccgctcttccggcaacatgcagcaggccccgcagcagcagcagcatccccatccgcccagcagcagctactacacgcaaaccgaaagcgagctgctgcagattgaggcgggcggcacgggcctgaccttcgcctcccactcgcaacgtcccgaatcggcgatcagtcaggtggcatccaccgcccacctggacgtgccctcggccgcctccagcggcagcgggggcagtgcagtcagtgggggaagcggcggagctccggaatccgcgggtcgatttgtgtccccgctgcagcgccgccactgccagccgcccagccacctgccgctgaactcggtggcctccccgctccgcaccgccagctacaagtcggcggcggcggtcgctggtcatggcttccaccacagccatcaccagcagctggacttccagcggaactcgcagtcggacgacgacagcggctgtgccctcgaggagtacacttgggtgccgccgggtctgcggcccgatcaggtccgtttgtacttcagtcaactgccagacgacaaagtgccctacgtcaacagtcccggcgaaaagtatcgtgtcaagcagttgctgcaccagctgccgccgcaagataacgaagtgcgctactgccactcgctgagcgacgaggagcgcaaggagctgcgcatcttctcggcccaaaggaagcgggaggccctcggacgaggggcggtccgtctgctgtccgacgagcggccctgcaaggggtgcgaggagcctttgtccggcggtgacatcgtggttttcgcccagcgcctgggcgcccagttgtgttggcatccgggctgctttgtgtgcagcgtctgcaaggagctcctggtggacctcatctacttccagcgggacgggaacctctactgcggtcggcaccatgccgaaacccagaagccacgctgctccgcctgcgatgagatcatcttctcggacgagtgcacggaggcggagggcagaacgtggcacatgaagcacttcgcctgccaggagtgcgagcaccagctgggcgggcagcggtacatcatgcgggagggcaaaccgtactgtctggcctgcttcgacacaatgttcgccgagtactgcgactactgcggggaggtaatcggcgtggaccagggccagatgagccacgacgggcagcactggcatgcgacggaccagtgcttcagctgctgcacctgccgctgttcgctgctgggaaggcccttcctgcccagaaggggcaccatctactgctcgatcgcctgtagcaaaggtgagccgcccacgccgtcagacacgagttcgggtccccagctaaggccgactcaccgagcttccacctccagccaaatagctaaatcgccgcgtagaggtggagagcgggagcgggatccgggacggaaggcccaccacggtcacccgaaggctacgggcagtgcaggcgatctgcttgagcggcaggaaaggcagcgcatggaggccgcgggagtggcggacctactgctcggaggaggagtaccgggcatgcctcgcccagcccatccaccgcccatcgacctaaccgagttggggatcagcctggacaacatttgtgccggcgacaagtccatcttcggggacacccagaccctgaccaactccatgccggacatgctgctctccaaggctgacgactcgcacagttaccagagcatcgacaaaatcaacctgaactcgcccagcaactctgatctgacgcagagcacccaggaactggccaacgagctggagctggacaacgagccggtgcgggagctgccccacgatggctacgaacagctcttcgctaacaatcgcaaccaggagcacccggccgaacaatatgacgacgagcagctggacaaccgaccgatgaaggaggtgcgctttcacagcgtccaggacactatgtcgcgctcaaagagctacacggataactccaatgcccggcggcggaggaggcgtcgcaaccagtcgcgcagctcctcggagatgcagatcaaccaaacgaacctccgcctgcacaacgcacaaacgcaggtgggaacgactcccctcaatctgctaaacaatctggacaactgcgacgtggccagcatctgctccacctgctcatccagctcctcgagcgacatggacgactacgtataccgcctgcctgcgcggaaacactacggcggagtgagagtggcctatgtgcccaacgatgcgttggcctatgagcgcaagaagaagatggcccaggactcgtccctggcccccggggcaggcaatgcatccgtgggcggggcaccggcgatcatgcacgagagcaagaactgcacgatttcctgaccaccccccgtgctgccacccccgcccttcaacctgagcagctactacatcctggacacgatcctggaggagcagagtctgatgctgccggagaagaagcctggctgcctgaggagggtgtggaacttctttgggctcggcaagccccgccactccaactcccagcacagcagcaacggaaggctatacagcgtgtagctgtggaatgaggtttaagaaaggtgtttttagcacggttgccaacaaaggttgttccattaactacaaaagattagttcttcagaacactttttaaaaatgtacatatatacagatggggtaagccgtgttttttaaaaatatatctttttaatggcaaccgtggctgtaaataacatatcgtcatgtataatacacttaataagaaggcacatatgagatcagagatgagagaaatcgttgtacaaagctgagactatatcatatttgcatattcatatacacatgcccagtcgggggcattaccataggtataagttattctagagctagattaggcgaacaaaacaaacgaaaagtagagaccacaaacaacaaacaacgcaatcaacgaacaataaactccaacgaaatcctatcgaaggccaacaaaagaatctccgaaagagtgaaagtattatttgtttcagatcttagccaaatgtgcaataatttaaaatggcaacgcagaacgcgaaattaactcttccaccagcaaagcgaaacgcagagatgtaaaaccattagcatttgccacatttgcggcttcttgtcttcgaatattttgttaatcaattcgaattgaagattcttttgtttgagagtcaaatgttttatgtaatttgcgtgctttctccgcggcgtgaaagggaaattgttatataaaagcatgtgtccagaatacgtttgtaaccaaccagtgagagttaaacgaaatcttatttctaagctatgctatatcaacaagtgtgtatggaaacataatcaaaagtaaaatatatgtctgtgtattttattcttatcaa

SEQ ID NO: 29187 - protein, 785 aa, DROSOPHILA
MQQAPQQQQHPHPPSSSYYTQTESELLQIEAGGTGLTFASHSQRPESAISQVASTAHLDVPSAASSGSGGSAVSGGSGGAPESAGRFVSPLQRRHCQPPSHLPLNSVASPLRTASYKSAAAVAGHGFHHSHHQQLDFQRNSQSDDDSGCALEEYTWVPPGLRPDQVRLYFSQLPDDKVPYVNSPGEKYRVKQLLHQLPPQDNEVRYCHSLSDEERKELRIFSAQRKREALGRGAVRLLSDERPCKGCEEPLSGGDIVVFAQRLGAQLCWHPGCFVCSVCKELLVDLIYFQRDGNLYCGRHHAETQKPRCSACDEIIFSDECTEAEGRTWHMKHFACQECEHQLGGQRYIMREGKPYCLACFDTMFAEYCDYCGEVIGVDQGQMSHDGQHWHATDQCFSCCTCRCSLLGRPFLPRRGTIYCSIACSKGEPPTPSDTSSGPQLRPTHRASTSSQIAKSPRRGGERERDPGRKAHHGHPKATGSAGDLLERQERQRMEAAGVADLLLGGGVPGMPRPAHPPPIDLTELGISLDNICAGDKSIFGDTQTLTNSMPDMLLSKADDSHSYQSIDKINLNSPSNSDLTQSTQELANELELDNEPVRELPHDGYEQLFANNRNQEHPAEQYDDEQLDNRPMKEVRFHSVQDTMSRSKSYTDNSNARRRRRRRNQSRSSSEMQINQTNLRLHNAQTQVGTTPLNLLNNLDNCDVASICSTCSSSSSSDMDDYVYRLPARKHYGGVRVAYVPNDALAYERKKKMAQDSSLAPGAGNASVGGAPAIMHESKNCTIS

SEQ ID NO: 29188 - DNA, 2987 bp, DROSOPHILA
ccagttttgcaaatagtcgggcattaataacaccttcttagcgagcccacaaagtcgcctccagctgacagagcctcttatggcggattatttgtgccattattcgagggtgacctgtaggatttgtactctcagcgcaattgaaactgatacgcgtagccaacaacggctgttgatcaggtgaaaatgataaactccgctctatttatgagccgccaaagaggtatgccttatcgttctggattccttaagaagttctgaagaaattaatttatcctaaacaatatgaaatctaataagggaaagaaatggcgatggtgacaaaaatgacaacagaaaaaaagatcacgggattaattccatattaacattgcaaacttcaaatgggctataaacccaagggccaaaaacaacaatcgtgtccattggtttattaccttttaaacaattgcaattgtagtcggtaaattcggtaaattgtttggccttcgtacttctctttcaatagttgtaaaaacaacattggtagaaagttgcagacccacattttcaacggcagctaaaaggtattaaattaccaaacacgaaagcggccattttcaatataacgagtattaactcaacgtaagtcggaaatctataaagctgtcagtgtgccagcccattttaatgcgatctgccttgcctataacttcgaatagccagtttaatttgaagaaccataaagtatgattccagtggttaggaatagaatcctccagaacccaactgctcctcaactcggagcacggagcacggctcatatgaagctattaagcagccatcaaattgggccgtaaactctctactgcgacgcccgttttatagtcacttaaattgggaaatgcaaagctcatcaaatggatttcaaattagttggccacattcccgccgacaactccgctttccctcgcccacttatcgccgagagttatggccattagagatagccggtggaaactcacattttgggtgctgtggctgccggcggtggcggcctctttgagtggccatcaaatctggccaattgttcttcaatatcgctgagctggatatcgtcggcaatggcctggttgaagtagcagttggccttcctcctgctcttgtccacctcgaggagctgctccgtatccttgggatttagccaaacggcgttcctgttgcggcagcggttcaggttcctcagatcgtcatatcggaggatctgctgcccctggatccttgctatctgggagggcgttaagctgccggtcagcatggccacctccacgtcatcgtcggtctccccgttgcaggagattcccgaggagtggaactgatcctcgctgctcagcttcctctgcacgcagccggaggattgggccacggccatggccaaagtgggtgcaggggattcgttgggcagctccagcgctatttcgtagggtgctagggtgatcgtggtggcctttggcttggtcttggttcgcactgccgacttgatgatgcacttcgcaggggcgttgccccgatgtttggagcacgtggacttgctactctgcttcctgggcgtcagtttggtcaccgtcgatagccgggactgctgtccagctcctatctgcggcattttcggcggctgaacctgctcctccagccgctcccggctggccaggcgctccctttccgcggacacagcccgtcggcgactccgccgtatgctgggcatgttccgggggaacagcttgcccgcctccgcctgggagctcttggagagactgtcgcagctccggtggcgggtgggactgccgctgctggcggtggtggtggagctgtcgctaatcgtggtggccgtgttggccagcactgaggagcactcgctcaggttgacgatgtcccggtagttcctcgactgatcctgcttgcccacctgcggcagccggatcttccaccagcgcttcttcgagagcatcgcggtgagtggaacgcacgtcaatcacgggtcgcgggccaatcaatcaattgacacattaacgaacggggaacaccttaagcagttggcaggtatgcggcggcctgcaattaccgtcgccagcaattaacgggcgatccgcttgctccaattacgtgcactcgcgatcggattgatacgtatcggctgggattctatctgaattcctggttcgcgaaagaacagcactcgcaccgctcgctttggggctgctcaaacaactgaagattgtagaaagtagctgttggccgaaaggcggcttttggccaggttggtgcaggtcaaactcaccaccaagacgatccagccaactcaccacagctctctttctctcatctatatatctctcgctcgctcttgtggcccaagcaagtgcaggtaaaacaggtggcacaggtgagtcgagtggctttcggttgagtgcttcggattcgagccagaatgtggtggcgtttattagccagctattgaagaggcagattctggtagctgcaactggttgatgcagctgtcttcgggccatttgacacatttcaggccgtttagcgattgacccatttcaatcacggccaacaagggaagaccacggccagcgtcccttgggcgttgtgttaccacattagcagcgcactcataggtggtcattagactgcgggcttggtgaaaatgtggtaatcgggtaaggcccctctcatgaaatccatccgtttgccccggaatggaaatgaagacgggcggatggaacgtggacgagggaacaaaccaatcattggaaattagggtttgtggcttccctatgctgcacgggactctcttcttgtggcagcacacggacggtaatggagtcgacaccgatttcacatattattcaattaacacgcagctactgattcattgcaattgaggctgagctagaatttactagccagtgcaattatgtcctgttgatatttgggataag

SEQ ID NO: 29189 - DNA, 987 bp, DROSOPHILA
atgctctcgaagaagcgctggtggaagatccggctgccgcaggtgggcaagcaggatcagtcgaggaactaccgggacatcgtcaacctgagcgagtgctcctcagtgctggccaacacggccaccacgattagcgacagctccaccaccaccgccagcagcggcagtcccacccgccaccggagctgcgacagtctctccaagagctcccaggcggaggcgggcaagctgttcccccggaacatgcccagcatacggcggagtcgccgacgggctgtgtccgcggaaagggagcgcctggccagccgggagcggctggaggagcaggttcagccgccgaaaatgccgcagataggagctggacagcagtcccggctatcgacggtgaccaaactgacgcccaggaagcagagtagcaagtccacgtgctccaaacatcggggcaacgcccctgcgaagtgcatcatcaagtcggcagtgcgaaccaagaccaagccaaaggccaccacgatcaccctagcaccctacgaaatagcgctggagctgcccaacgaatcccctgcacccactttggccatggccgtggcccaatcctccggctgcgtgcagaggaagctgagcagcgaggatcagttccactcctcgggaatctcctgcaacggggagaccgacgatgacgtggaggtggccatgctgaccggcagcttaacgccctcccagatagcaaggatccaggggcagcagatcctccgatatgacgatctgaggaacctgaaccgctgccgcaacaggaacgccgtttggctaaatcccaaggatacggagcagctcctcgaggtggacaagagcaggaggaaggccaactgctacttcaaccaggccattgccgacgatatccagctcagcgatattgaagaacaattggccagatttgatggccactcaaagaggccgccaccgccggcagccacagcacccaaaatgtga

SEQ ID NO: 29190 - protein, 328 aa, DROSOPHILA
MLSKKRWWKIRLPQVGKQDQSRNYRDIVNLSECSSVLANTATTISDSSTTTASSGSPTRHRSCDSLSKSSQAEAGKLFPRNMPSIRRSRRRAVSAERERLASRERLEEQVQPPKMPQIGAGQQSRLSTVTKLTPRKQSSKSTCSKHRGNAPAKCIIKSAVRTKTKPKATTITLAPYEIALELPNESPAPTLAMAVAQSSGCVQRKLSSEDQFHSSGISCNGETDDDVEVAMLTGSLTPSQIARIQGQQILRYDDLRNLNRCRNRNAVWLNPKDTEQLLEVDKSRRKANCYFNQAIADDIQLSDIEEQLARFDGHSKRPPPPAATAPKM

SEQ ID NO: 29191 - DNA, 3571 bp, DROSOPHILA
tggttaaagcgcctgtctagtaaacaggagatcgtgagttcgaatctcgccggggcctaacccttagaacgctgattctggggtgtttattttttttagcccctataataaccgatatttgctgtgctcctaacgactgtttgtagttgttgccctcgacagatggcactgtgctccaattgcggcaataattgtttcaataatcattaaaatttaattgttctggtgggcaattcaccacccccaatgcaatcaagtacttcgcgtacagaaagctttatgaaaagctcagcgacggacggacaagtttttgtatagaaatttccattgaaaatatattattattattattattattttcaaagtaagccaattctaattgattttagacatttcgtatagatagataaagaatcttccaattaaaattaataacctatttaatggtttctgtctaatcttttataacagttgacagtacaacagttaattacttccagtataacagtataaaggtaaccgtaagcgtaaaacttaaaagcttatttcttaccgtaaaatagaacttccgaatctgaagctctttcgaaagacgtattcgtaggcggctgagcaatcttaatagcacagcccctgtgtctcccacataccaccagttatcttagatttaaaacaactgaacaaataacaatttttaaattacttttccaaaaaaaattcgatatggatagttattattcttaaattgagaagttctacgcccgtagtcacaacggcgccgtggcttagttggttaaagcgcctgtctagtaaacaggagatcgtgagttcgaatttcgccggggcctataggagaggacagcgttctgttcactttttcttccaattatttttttaattatttcaaatacctaataagttattttaagtcaacactttgcttaaccttaacgtaattaacaagcaactagagacagttaagctgacatccacttcgcgactaatccttatagaccagatacagcacaacgatcatgaagtacgtgggccgctcaaagaccagctgggtgaagttgtcccgcttctcgtccattaggtggcacatgcgctggtagaccccctggttctgcttctccacgatcgacagcagacagacgatgcggtggctgcgaatgcgatccaagggtatcttggggctaagtgattaggtggcagattagtttgtgccgccacttaccgcctgtggttcagcttcttgacccggtcgcgtatctcggccgctagaccttcggccagctgcagagcccgccaagagtcgtaattgcggctgaagcggtcccacagcagccgctcctcgatgcaatcttcgatgatcttctgggcacgttccatattgaagttggtgtgaaagaacttccagtcgttcttgggcttctccttccgtggctccccggcctctccgccggtcgcctccccttccggattttgggccgctcgcctcctgctcagcatcgactccgagagcagggcgttcatccggttggtggtgcgcaccgatgcggttatcctgcggattgtaatcggggtaattgattagtcccttgttacgaattaccaatcagaattcgatcgaagtaataatcacgggtcatacgtacacacagagaaaaggggttggatataaagaaggaaactcagttatggacgagacgctactggaacctaagatatatcttttttaaagaatttaagattgtacttatttcacagataattagatattatattgagaaaactcttgggtcggtcccaccattaccttatttctcaggcacttcattgttttttacagtgtaacaaatgtgaatactagaaaatggaaggctttctcctttttacaatacgtacattcttacaggtatcaaaattaccacatatccataattgtttaatacattcacgcaacatgctctacaatttgtagcagtgtgattggtttgaagtacttagatacattcgcgctagtagtttcattagttatttagattatttatagtattcactgcgaacatctttcctccacgatgggacccctgactttgccgtccgattcgtaccgcgttttcatggtggtccaggaggtcatggtgtccctgcaaccgatgggcttccgtctccggagctcgcagctctgccagccggcagcgggaaaacaaacaccgagcgctgctatctgcacactgacaggagcgacatgccgacacgagttctgcccatcgacagggcctccagttggtgccccgcaagggggtcggatggggtatccacacgtcgtcaaaagttcattgaagctttgttggcttaggtccgctctccagccggactagggatggcatagtttcgtatattttgcatagagctatcaaagggtttcccgcaaacatctcacgatgccatcgccgacttcgagttgggcctcggccttccggcttgcgtgccgcttatcataaatccactgccggggcgctccaattgcaatccgccggatggcggcggagacgtgggtgtcatcgccaccagccactcggcaggattttcacggggcttgggcttagtcaaaggcaaaggcaaagtgttgccatatggacgtgcgggatgggcgaatcactgggcccaggcggcacgcgattccctctgaagttgatgacttctgatcggctgccctgtgacacctgggcgcggtcgtcgcggccaggtgagtgtcttcgtcttgggcgcgaactttcaagcaccttgattacttttatcgcaaaagtttcgctcgctcggcggcagcgtatgcaaacttcgcgttggcgcggcaaattcaatctatcgccatccatctacaggcccatatatatgaagttattaaattgaaataactgtcaagtcacgtgcatggagcgcggagttgatgactcctcattgcgcccaaatgggcgatacaagtgaccgggaaatgaagaggaactgagcattccacggaggagcattcttggggtagggcaaaaaacaacagctgaagccacaagaatagaatcagttgctgggggtactgaggagaaatacttaatttataataggctctcttattattcgcattattctgccagacacagaaaaaagattcgatttaattgggttaattaatttgatttcttaaacatttaaaaatttctgcgcagaatatccaaatacattaacaaactatttcagaattcttttcttagataattagaaaatgtcagacgctcttcatgttttaagaagatatttttcacaatttttaaaggaaaacaataaaatttgttataaattctgcgtttaattagttttctatgcgttgaaatatgtgtataccttgtgtattttgttatttaaagacacttttgttagggacaattttattttgagtgttctttaaatgaatgtgtttcgtttctttttccatttgatatataactagtaggtattacctactattggatacaactattagactttttaaaatgcataattagtcagatta

SEQ ID NO: 29192 - DNA, 795 bp, DROSOPHILA
atgacacccacgtctccgccgccatccggcggattgcaattggagcgccccggcagtggatttatgataagcggcacgcaagccggaaggccgaggcccaactcgaagtcggcgatggcatctgtgcagatagcagcgctcggtgtttgttttcccgctgccggctggcagagctgcgagctccggagacggaagcccatcggttgcagggacaccatgacctcctggaccaccatgaaaacgcggtacgaatcggacggcaaagtcaggggtcccatcgtggaggaaagatgttcgcagataaccgcatcggtgcgcaccaccaaccggatgaacgccctgctctcggagtcgatgctgagcaggaggcgagcggcccaaaatccggaaggggaggcgaccggcggagaggccggggagccacggaaggagaagcccaagaacgactggaagttctttcacaccaacttcaatatggaacgtgcccagaagatcatcgaagattgcatcgaggagcggctgctgtgggaccgcttcagccgcaattacgactcttggcgggctctgcagctggccgaaggtctagcggccgagatacgcgaccgggtcaagaagctgaaccacaggcgccaccgcatcgtctgtctgctgtcgatcgtggagaagcagaaccagggggtctaccagcgcatgtgccacctaatggacgagaagcgggacaacttcacccagctggtctttgagcggcccacgtacttcatgatcgttgtgctgtatctggtctataaggattag

SEQ ID NO: 29193 - protein, 264 aa, DROSOPHILA
MTPTSPPPSGGLQLERPGSGFMISGTQAGRPRPNSKSAMASVQIAALGVCFPAAGWQSCELRRRKPIGCRDTMTSWTTMKTRYESDGKVRGPIVEERCSQITASVRTTNRMNALLSESMLSRRRAAQNPEGEATGGEAGEPRKEKPKNDWKFFHTNFNMERAQKIIEDCIEERLLWDRFSRNYDSWRALQLAEGLAAEIRDRVKKLNHRRHRIVCLLSIVEKQNQGVYQRMCHLMDEKRDNFTQLVFERPTYFMIVVLYLVYKD
